United States Patent Application Publication US 2026/0092266 A1 - sequence listing, part 13

SEQ ID NO: 2123 - DNA, 24299 bp, synthetic construct
  misc_feature 1..24299: note = Synthetic
  source 1..24299: mol_type = other DNA
gtgatgtgaagcgcacactgccttatgccaaaatggtttatgaaacactgatcgaaacttacgaatatatagagacgctccccgatgaaaagtcccgccaagcccacttgaagcggatggagaaagaacttttcctggaatataaaccgcagttgaaaaaactaaccttctcacaaggtaaactgcttatcaaactgattgacagagaatgtaaccaatcgagttataacctgttgaaagcctatttaggcagttttcgggcaggcttttggaacctgtttgccggcatgttcggcgccagcctaaaaaccgaatacgatccaaaaggaaaagatgccatgacggaacgggtagtcgtacttgtcgaaaacgggttaatctgacaactgcttgaagaaatcccagataatgataccggtagtcaccgaaacattcaaagaatgcttggttccgtactgcggtatttcaatgcacatatcacagttatcaacgacacattgttgaacacctttcacttcgtttcccatgataacggcatactttttattcttgtccaacaacaacttgtctaacatcgtactcccttcagcctgctcgaccgcacagacagtatatccccgtcgcttcagcttttcaacagcttccatcgtatcttcgaaatactcccagtcgacagtctcttccgctcccaaagccgtcttgtgaatctcggcatgaggcggacaagccgtgataccacacagataaatactttccaccctgaaagcatcggacgtacgaaacacggatcctacattgtttaagctccttacatgatcgagtacaacaaccaacggaatctttttactatctttgaatgcttccggagtcagacggttcagctctgttatctttaacttgcgcatagctatcatttctttgtttgcaaaagtagtgaattaatgtggatatgccgttgaaaagctattgataagtggtggacacaaaatgaaaattaattcttgcattattcaatttgttcgttatacatcctctcatttttattatgcaataaaagtaacggattatttactacgccctatcaacagtggttatacacgtattaacagcccttggctaccataaacttttacacataggtagttttcaaccgcaaatcaataaagtccgtaaaacaaagaaaaccaatctataaaacaataaataggatgttggtatctatttaataagtagtttacaccgtttaataacgaaccggacaagtattgtaacagaaatgtattaactgtttcaacaggctattatattcatcatatttagatttaaaataaagaataaataagaatataataatatgattgtggataactcggaggaaaggatggtcaacttgacatatgctgatttgcggtaccaaacctaacaaattttagttctatttccttggttttatatatgtttcttagggaaaaatcaataaagtttttacctttgcacattatcaactatcggttgataataagagtaaaatgaagattatcaggtataaagagtaatgataactttgttgatagactgtagatagcggtttatactcattagcgattattgaattttacaatcattaaatacaggtaactatgttgacaaaccaatcgatcggatatatggatgcacccattccaaaggggttgaacctgaaggaagagataaacaggatgcgtaaagaaaagaacgccgttattcttgctcattattaccagacgggtgatattcaggatatagcagattttgtgggagacagtttggcattggcgcaacaggcagccaaaacgacggccgatatcattgttttctgcggtgttcattttatgggtgaaacggcgaaagtgctgtgcccggataagaaagtgttggtcccggacctgaatgccggttgctcgttggctgatagctgtccggctaccgattttgcagaatttgtaaagcagcatcccggtcatgtggttatttcgtatgtgaatacgactgcagccgtgaaggctgtgacggatgttgtggtgacgtctaccaatgcacgccagatcgtcgaaagttttccgaaggacacgaagatcatcttcggtccggaccgaaacttaggtaattacataaacggtattaccgggcgcaagatggtgctttgggatggtgcttgccatgtacatgaacagttttcgttggaaaagatattggaattgaaaaaacagtatcccgatgcggaagtcattactcatccggagtgcaaacagcccgttatacaggtctcagacttcgtaggatcgactgcggctcttctgaagcacactgtcaagtcggataagaaacggttcatcgtagcgacggaaagcggtgttattcacgaaatgcgcaagcagagccctgataaggaatttatcccggctcctcccaacgacagcacatgtgcctgcaacgaatgtaatttcatgcgtctgaacacgatggagaaactttacaactgtttgaaatacgaacttcctgaaatctttgtcgacgagcaagtacaggaaaaggcaatccgcccgatcaagaagatgctggagatatcggaaaggttagggttgtaagaattttgttagataaacggaactaaataatatgatccactgtggcatttgtttaatccacagtggatttttattttttattttataactgcgattttagtaactacgctttcttttgaatcttcggtggcggaaagcaccagatatataccagaagcgacacgggtgcctttggcgttccggcagttccagataacctgacctcctaaagatttcgtctgatagaccagattgccattcagatcggtgatttttacaatcgagttgtccatcaatcccgtgatagttactttgtccctgttttcgggccgtacgggattcggatatgcatacacgtccgagtagtcatcttttccttttgttgcttctcctttgtaggaaaccaaacctttgtcggagccgatgaatacttcgcctgtgttttcatttatttctatggaatatattttgtcagacagtagcggactgttggatgtattgaactgatggacgatttcctggttgtcttcgctcagtacataaaccccgttgccgtccgttccgatccatttccggtttccattatccactttgatggtcgttactatcgcattatcgagaaaataataaggaataccttcgtcgttaagcagtttcacacgtgtgcaacgtatagattggttgttttctgtcgttgccagtttaggatttgtcaagtatatggctcctttgttggttccaacccataggtatccatttttgtcttctgccatacaggtgtaattgttgggagaaaagtcattaccgtctgtgtcaatgaaggttttaaattcataggatgtcgcttcatctaaagagctgctgttggcaacggctgtcaggcaggcttggctggctggacgggagatattgatccatttgtcgttgttcgaggtgacgagtatgtcgtttaccgtgtactttccgtttaatgattcgacagacaggctgtgccattttccttctttatccaatatcttgatagctttgtcgacttctgaattggtcatccacaggtttccttccttatcgaaagcaagtccgtctacacgacaataagaccccgcattgccgtgtgcgttttcaagcggactattcgttctgttataaacggcagaaggttctctgtctataaattgaaaaacgccataaccgaaagaagacacataaatgatttctttttcagcatcatcggttgtgacggcaatgctggtatagtctcttggccatgtctttagtttattcagaacatcggagggttccaatgcaccccatttttcataatcgtatatcatgaccgagcctgccttattaaaggaattggcaccggtcaggctttttccaccgggtataacgtatattttatcgttttcatatacgatatcataagaactgttggaatatgggccatccaaaattatggcttcgtttacggcttcgaactggttggctcctgttcttttgatagaacgcaggcctttgcttccttcggctatccaatatttatcagtctgataagtgctgatatcttttatggatagattaccgatctggtcaaaagtttttgtatctgtaaaaatatagacttgggatgtggctatgcaagccagtttttctcccacaattttcatatcgttcatttgtgtgttattgaccaagggaacgacagttccatccgattcgtagtagactcctttattttgagacagatagaacagtttgtctttgaataaggatattttgtcaatggaattttcggatggaaatcctgcaatcggatatgttttccagtttgatccgtccagcaggttgtcatttaaagaagcgtatatgagcgtagacttttgatcttcttttgtggaagcgtatatattattgttgaaaatggcacaagatgttatatttttagataagttataggtgtcggttatttctttcttatccatgttgacaactactatgccggattgtatggacaaataggcatattcgttataaatcataacggaattaagcgatttttctcttaaggaagttgtcatgtacagataaggtatgttttttacggaaccttcttccagaatgtctatattggaattattgtagacaatcaataatgattttgtttgtttgttgtaggaaatggattggatatccgtgtcgctcaatccatttcctttataatattgtttgatgctgttatcttcttttccgtatgtgtataaagctccttctgctacgacaaatacttgatcggccgattcttccacacaattggtattattgtaggaaagatatgttttccatccgagcgtattgtcattgactggcgaagcggagaatgataataagaaaagtaagatgacagttaatatatttctcatattaattacaatattaaaatgtgtgatctgataaaaaagcagtcagttttttgactgcctcggcacggtggctgatctggtttttaatatcattgcccatttcggcaaatgtttgcgaataggtatcgggaacaaatatgggatcatatccgaaaccgcttccgcctcttttttcgcttatgaccgtaccgttgacgataccttcaaacaaatgttcttttccattcaagataagagcgattaccgtgcggaaacgggctttccggttttctttattttccatttcatggagaagtttgtccatattggcttccgaatcatgtccgggaccggcataacgtgccgaatatactccgggagcgttgttcagagcttctacttcaagtccggtgtcgtcagcgaagcagtcatatccgaaatgttctttaatatagcgggctttttgtaaggcgttgccttctaacgtgtctgctgtttcgggtatatcctcgtggcagtcgatatctgagaggctgattatttctgcatatccgactgtaattttccggacttcatccagcttatgccggttgtttgttgcgaatacaagtttcatgtttgttgctgttatgaataaaaaagcacttctatacgatgtatatataacgtatggaagtgctttaaattgtttggatgattgttttatgtttttatctggtcaaacccttctccatatacccctctgacaatgctttgagagatgaaagcctgatggtcgatttgttttaccaggcggaaaatagaaacggattctgattttttagccagcaatacaacgactttgaccggtttgcgggaatatccgcctacaccgtcgagaatggtgcaaccacggtccaggtcatggatgatccgctcggctatttcgtcgtatttctgagagaatatcaggaactgaacggattgacggtttccgttcaggacgacatcgattatataattgcttacaaacatttcaacaaaaccgaaaacgattttttcgacatcatggaacaggaaaaatgaagaaccgatgatgataaaatcgcagaacagcaaggctcgcccgatcgatatattcctgtatttgttcacaatagccccgacgatatccgttccaccggtactgccgtttgccgaaaaaacaagtccgagacctgctccgcagaggaatgcgccgatgatgatggacataaacggttggtcgtgtaaaagaggttggcctttcagaagccattcgaagaatgacaaggaggctgacagggagaacactccgaaaatcgtttttatcaggaacttgaatcctaaaattttcagtgccgccaacagtaatacgatgtttatgacaaagtaagatactgaaacggggattaattcattactagcaaaaaagatcaaggcgcaaataccactgactccaccggtgataatttcattcgacagaatgaaagcgttgaagccaaagccgtacaagagagtacccaacaggatcatcaggtaatcttgtacagcaaaatagactttgtcgtttataagcttcatataaataaatttagattacgatgtttacaatctttccgggaacaacgataatctttttcggggtcttgccttccatccatttggcggaattttcatgggcaagagcggctttttctatctcttcgcggggcatatcggccggaagttccatgctgaaacgggctttgccgttgaaggagatagcataagtaagcgaattttctttcaagtattcttcgttgtagacaggccattcggcatcgcatacggtagtatcgtgaccgcaggtgtgccataattcttcagcaatatgaggagcgaacggagtaagcagaacgattaactgttccagaatcggccgtttattgcatttcaggctgctcaattcgtttacacagatcatgaaggcactgatggaagtgttgtacgagaaatgttcgatgtcgtatgtcactttcttgatcaatttgtgcaatgatttcagttcatcggccgtcggttctgcatctgtgatctgcaagctgtccgtattgccgaagaacaatccccagagctttttcaagaatcggtgcacgccgtcgataccgttcgtatcccacggtttggactgttccagcgggcccaagaacatttcgtacaggcgaagcgtgtcggcaccgtatttttcgacaatcatatccggattgaccacgttgaacatcgatttcgacatcttttcaacagcccatccgcaaatatatttgccgtcttccaatacaaattccgcatcgttatattccggacgccagtttttgaaggcttcgatatccagtatatcgtttgatacgatgtttacgtctacatggataggggtgacctcgtattggtctttcagattcagagatacgaatttgtttgtgccgttgatacggtatacgaagttggaacgtccctggatcataccttggttgatcagtttcttgaacggctcctcttcgcagacgagtcctaagtcaaacaggaatttgttccagaaacgactgtatatcaagtgtccggtagcatgttcggtgccccctatatataggtcaacattgcgccagtattcgtctatgtccttcgcaaccaaagcctggttattgtgtggatccatatagcgcaggtaataggcggatgaaccggcaaatcccggcatcgtacaaagttccaacgggaagacagtcttgttgtctattttggaaacttccgtgacctcctgttttacggtgtcccatgcccattttacggcatgtcccagaggtggttcgcctgtttcggtcggcaggaatttatctacttccggcaattccaacggcaacttgtctaccggcaacatctgcggcataccgtctgcatcgtaatagacagggaacggttcgccccagtaacgctggcggctgaagatagcgtcacgcagacggtagttcacctttacgcgtcctaacttatgttctgccacgtatttcttggtggcggcgattgcttcttttacggtcaggccattcaacgacaagtcgcaatgaggcgtcacgtccggtctcggtgagttgcagacgattccttcttttgcatcgaagctttcttcgcttacgtcgcaaccttcgatcagcgggataatcggcaggttgaaatgtttggcgaatgcatagtcgcggctgtcgtgtgccggaacggccatgatagcgcctgttccatagccggccagtacgtagtcgctgatccagacgggcacggcgtctcccgtgaacgggttgattgcgtatgaaccgctgaatacaccggtaacggaacgatcggcgatacgttcacgttccgtacgttttttagtgcggtccagataagcgtcgacttcctgtttctgctccggagtcgtcaattgtgccaccagttcgctttcaggagccaagaccatgaaagtaacaccgaacatggtgtcggcgcgggttgtaaagatggtaaactcaaggtcgctgtcttttactttgaactggatttcggcaccttcgctacggccgatccaattgcgttgtgtttctttcagcgaatctgtccagtcgatcgtgtccagtccgtccagaagacgttgtgcataggcggatacacgcaggcaccactgacgcatgattttttgttccaccggatagccaccacgttcggaaacgccgttcaccacttcgtcgttagccaatacggtgcccagtgcggcacaccagtttaccatcgtttcgccccgataagcgatccggtagttcagcaggatttcctgtttttctttttcgcttttggctttccattcgccggctgtgaaatgcagttcttcgctgcaagcaacattcaaaccttccgttccggactgttcgaaagtggcaaccagttcgctgataggacgtgcctgctttttatcgttgcagtagtagctgttgaacatccggatgaatgcccattgcgtccatttataatattccggatcacaagtacggatttcgcggctccagtcatagctgaaacctattttgtccatctgttcccgataacgggcgatgtttttctttgtcgttacttcaggatgctgtccggtttggatggcatattgttctgccggcagcccataagcatcgtagcccatcgggtgcaggacgttaaatccttgcagacgtttatagcgggaataaatatcagaagcaatataaccgagcgggtggcctacatgcagtcctgctcctgacggatagggaaacatgtccaatacgtaatactttggtttgtcggcatttttttcgactttataaactttattggcaatccagtattcgtgccactttttttcaatttctctgaaattgtattccatgattatttattgtttattttatcgttttctatttaaagccacaaagttagtgaattttgtaatacataaaggtttgaagcgtcaaattgcaaggatgggcaggacaaaatttcattctgaaagcaatggatggcaactcgaaaaatacaatatccccctttaggcctcaaatgtacaataaatttctggtttatagcgaaatgataaaaatgtctgtttcttaaaaaatattaccctatagggaaatttgaattagatagggtagaaaatcgaattagatggggtagtagtttcgattcagacgaatggcttttttgaaaatgagacaataaggatgaaaaacaagaaaggttctgttggatagaatagatatgagagggtaggggacacttataaaaaaatcccccgcaggagggcgagggaacctaatgttttcacaacggaataatccttattgtgatttgcttcattttagtagaacaaatgtatggaataaaaggtttgtatgcaaatatattttagaaatattatttatatatttgggaaaataaaaatgatataccatgaaaagaattttgggattggatttaggcacgagtagtatagggtgggcattggtaaatgaaggtgaaggagccgaggaaatatcatcaatcgttcagttaggtgtaagagtcaatcctctgactgtggatgaaatgcaaaattttgaaaaaggaaagagtattacaaccaatgccgatagaacccttaaaagaagcatgcgccgtaatttgcaacgatacaaattacggcgtgacgtgctaatcgagcttctgaaaaaagtcgggtttattacagataaaacgatcctttctgaacaagggaatagaaccacgttcgaaacttaccgtttgcgggcaaaggctgctgaagaagaagtctctttggaagagttggctcgtgtgttgttgatgataaacaagaaacgaggatataaaagcagtcggaaagcaaaaggagaggaagatggttctttgattgacgggatggagattgccaagaaattgtatgatgaggatttgactcccggacaattttatctgcaattacttgaatcaggtaagagaacttttcctgatttctatcgttcagatttgcaggatgaatttgataggatatggaattttcaaaaacaattcaatcctcaatctttttgtgatgcagccaaagaagaggttaaaggaaaaaataaaagtcagacttgggctattctggcaaaatactttacatggaccaaagaggttagtgtttggaacgagaatgagtccaaaacagaaaaccaagaaaaagaatataggcttgtcggtattaaacggacggtgaaaggggaggcattgaaaaaggaaaactatcgttggcgtgtacaagctcttaccgagcaattggatttggaagagatagctgtagtattacaagaaatcaatggacagataagtgcgtcaagtggttatttgggggctatcagcgaccgaagtaaagtcctttatttcaatcatcagacagttgggcaataccaaatggcagaattggataagaatcccaacatgagtttgcgcaatatggtattttaccggcaggattatttggatgagttcaatgtgatttgggaaaaacaaacggagtatcataaagaactgacaccggaactaaagaaggagatacgtgatattattatattttaccaaaggcgcttgaaaagccaaaaaggtttggttagtttttgcgaatttgaaaatagggaagtcattgtcgaaaaagacggcaagaaacaaactaaaattataggatgtagagttatacctcgatcacatccgctgtttcaggagtttaagatatggcagacattgaataatatagaagtgtttgtgggcgagaaaaggaaaaaacgcaagcaaacgaatgtttcctttggtctgtttgacaatacagtggatgccttggcgatggaaggcagacgttttctgtatcaagaagagaaagaaatattagccaaagaactttcttgcaaaaaagatttgacgaaaacggaggtgttaaaacttttattcgaaaatccacaagagttggatatgaatttcaaacagatagatggcaattgtacagggttcgctctgttttcagcatatagcaagatgattgaaaagtatggttatgaaccattggattttaagaaaccggctgatgaaataatcgctcaattaaaggctgtttttgtggatttgggatggaataccgatttgctttccatcgatttggataaagagggtaaggatttggaaatgcaaccttatttcaggctttggcatctattgtattcattcgagggtgataatacgcctaccggaaatggtaaattgattgaaaaaatcatgcaattgtgcagggttgagaaagaatacgccatagaattggcgaatatatcgtttcaagatgattacggaagtttaagtgctaaagctattaaaaaaattttaccctatttgaaagagggcagtcagtatgacatagcttgtgagtatgccggctatcgtcattccaaatcatcgttgactaaggaggagatagaaaacaaggttttaaaagacaaattggatatccttcctaaaaacagtttgcgcaatcctgtggtagaaaaaattctgaaccaaatggtgaatgtgatcaatgcggttattgatgcgtatggaaggcctgatgaaattcgtgtggaactggcgcgggaactgaaaaaaagtgccaaagaacgtgaggaactaactaaggttattgcaaagaatactcgtgaacatgatgaaatacgcaaattgttacaatcagaatttggtatgatacatgtgagtcgcaatgatatcatacgatataaactttatgaagagttgaaagaaaatggatataagacgttgtattccaaccagtatattccgaaagaaaaacttttcagtaaagaaatagacatcgaacatatcattccgcaggctcggctttttgatgattcgttgtccaataaaacattggaatatagggcaatcaatatcgagaaaggaaataagactgcctacgatttcgtaaaagataaatatggggaagagggattacaggaatatctcaatcgttgtgaaaatgtatgtaaggacaggaaagccaaactccggaaattaaagatagaacagagcgatattccggatggatttatcgacagagatttgcggaatacgcaatatattgctaaaaaagctcttgccatgctgaatgatatttgtcgcagagtggtggctacgaccggttctattacggacaagctgcgggaggattggcaacttgtggatgttatgaaagagttgaacctaccgaagtatgaagccttgggattggtagagagttttgaggataaggatggaagaataatcaaacggataaaagattggacaaagaggaacgaccataggcatcatgcgatggatgcactaactgttgcgttcaccaaagatgtgtttatccagtattttaataataaaaatgccgcttggaaatccgattgtaaggaacatacgaatatagtaggtataaagacccgttattttgagtcgggaaaggctgttccacctatgccattagggcagttcaggacagaggcaaaatggcatttggagaatctgttggtttctatcaaggctaagaacaaagtagttacgaccaatgtgaattgcatcaaaaagaaagggggaatattcaagaagcaccagcaaactccacgtggacaattacatttggaaacaatctacggaagccataaacaatatttaacgaagatggaaaaagtgaatgcttcttttgatgcagccaagattgcaactgtaagcaggcaaaattacaggaatgccttgttaaagcgtttggaagcttttagaaatgatcccaagaaggcgtttaccggtaaaaactcgttggaaaagaatccgatctatttggatagggcgcaaaccatgcaaatgccggacagggtacaaatagtcgaattggaaacggtttatacgatacgtaaacctattgatcctggtttgaacgtagataaagtagtagatacgaagattcgtactattttggaacaacgcctgaaagaatatggaggagatgccaagaaagcatttgtcaatttggatgaaaaccctatatggttaaatcgggagaaaggaataagtatcaagcgggtgagtattcgaggaatcaataatgcccaatcgctgcatgtgaagaaagataaaaacgggaatccgatattggatgaaaacggaaaacagatccctgtggattttgtaaataccggtaataaccaccatgtggctatttatcgtaaacccgtcttggataaaaaaggacaggagatgtttgatgaggatggcaatctgatgtatgaattggatgaggttgtcgtttctttctttgaggcagtaacacgggctaatttggggttgcctgttatcgataaagattacagaagaagtgaaggctggcaattcttgtttagcatgaagcaaaatgaatactttgtatttccgaatgaaaaaacaggtttcaatccaatggaaatagatttgttggatccgaataattatgcggtgattagtccgaatttgtttagagtgcagaagttttcttctaaatactatgtctttagacttcatttggaaacaacaatagaggataaaaaggagttacaagaaataacgtggaaacgtattacttcattaactaaaatagatagaatggttaaagtccgaattaaccacattgggcaaatcgtttcagtgggagagtactaagcctattagatattgaaataaaaaaggttgtatgctattttcaaaaaggttgtacccttttccaaaatagcatacaactttttcttaaatattttttatcccgattaataacagattaaaatcgaatggcttatgatcaagaaaaccctttattttggaaatcccgtttacttgtctttaaaaaatgctcagttggtaataaagttaccggaggtagtcaggaatgatacattgcctgaaagtttcaaacgaaactcggaagtgaccaaacctattgaggatatcggagttatggtactggatcataaacagattaccatcacttcgggagtattggaggctttgcttgaaaataatagtgctgttattacgtgcgatagtaaaagtatgccggtaggtttgatgcttcctttgtatgggaatacaacgcaaaacgaaagattccgtcagcagttggatgcttctttgccgttgatgaaacaactttggcagcaaaccataaaggcaaaaattgaaaatcaagcagcagtattgaaagaatactccgatacagaagtgaaatgtatgcatgtatgggctgccgatgtaaaaagcggagattcaaataacctggaagcccgtgctgctgcttattattggaagaatctgtttcgaatagaaggttttacaagagatagagaaggtattccacctaataatctgttgaattatgggtatgctattttgcgagcagttgttgctcgtagcctggtggcaagtgggcttttacctacttttggaatccatcatcacaatcgttataatgcttattgtttggcagatgacattatggaaccttatcgtccgtatgtagatcgattggtttgtaacattataaagcagggggtagattatgcggaactgacgaaggatttgaaggtgcgattactttctattcctacgttagaaacaaatattggcggaaaacgtagtccgctaatggtagctgtcgggcagacaacggcttctctatataaatgttttagtggtgaattacgtagaatttcctatcctgaaatgtaatatggataggtttagcgaatatcgtattatgtgggtacttgtactatttgatttgcctactgaaacaaagaaggataagaaaatgtatgctgatttcagaaagaatttgcaaaaagatggatttacaatgtttcagttttctatctatgtccgtcattgtggcagtagtgagaatgcggcagtgcatataaaaagagttaaatcttttcttcctgagtatggaaatgtaggcatcatgtgtatcacagataagcaatttgggaatattgagcttttctacggtaaaaagagtaaagaagtaaatgccccaggacaacaattggaactattctaaaaaggaaaatcctacaaaacagtaggattttccttttaaacaacaattatttttttattctaacttagtgtttaaatccttgattaatagcaaacaatgtaaattcagttgtttctaatagttcaaagatacaaaaatgaaagcaaatcacaacacatggaatgtttgcttgacgatgttcctagttgtttctaatagttcaaagatacaaaaatgaaagcaaatcacaacggaagtccaacccgtacacacgagccatgtgttgtttctaatagttcaaagatacaaaaatgaaagcaaatcacaacggcttggtggcaggaatgctgccgttgccagttgtttctaatagttcaaagatacaaaaatgaaagcaaatcacaacaccatcttgcactgtgactctttcggtgcagttgtttctaatagttcaaagatacaaaaatgaaagcaaatcacaacatcagcacgtcgagctcttgcgtgcccagggttgtttctaatagttcaaagatacaaaaatgaaagcaaatcacaacatgctgatcagtttatgcctttgcctgatgaacaatcaaggaccattacaatggcacagttttctgccattggaaatactatctaattttgaggttatacgtgtggttgaagaatcgtcccttatccgtatttaccttgacgaatcattcaaggcagaaggtatccgctactcaaaggagtttttgcggctcataaccaggcgttgtttctcaaatgccatacagacaatcgatagctttcacatacagaaacttgcttgtgatgctttgcaggaaatgcgcatcatccatagatggaataccacatatgtagaaacaatagcgaaaaaaaacgggggatcaaggcgtcccttgatttatatacccgtacaaaactctgtagtaaaagttttgttttctgttaaggttttggctcttccatagttaagggtggagggcatatagatgaactttaagcctccacaactatctttcggtacaaaggaacatattatatcacaaataataaaatttttttatcgttatttacaagatcatgtcggtcaatatgatttttaagactatatgaacttgattttttgccaaaaacgattgaaaaaggtgaaagctacattcctttgggactcggcggatgtccagaagaggatatacagtggcaaaactcaagtcggaaattttatgttccccaagtctcccgatccagattccggtagttgatagcttccgccaaatggcatgcttcgatattcggggctgcttccagatcggcgatcgtacgggagactttcagaatgcggtcgtaggcacgggcggaaagattgaggcgctgcatggcgaccttcaacaaagacaggccggcagcatcgggtactgcgtattcgtgaagcagcttggaggtcatttgggcgttgctgtaaataccttcatgcccggcaaagcgtttttcctggatggcacgggctttcatcacgcgctcacgtatcgcttcgctacattcggaaggatgtccgtctgatatcttctcgaaagggaccggcacgacttccacctgtatgtcgatccggtccaacaacggaccggaaacacggttcatatatttctggacggcaccgggagaacagagacacgggcgatcgggatgattataatatccgcagggacaaggattcatggaagcgaccaacataaagttggccggataatcgacagagaagcgggcacgcgagaccgttattgtccggtcttccaaaggttggcgcatgacttcaagcacgctccggttgaattcgggtaattcatccagaaacaagatgccgttatgagccaagctgatctcgcccggttgcggaaaagcgcctccaccgaccatagccacattcgaaatcgtgtgatggggcgaacggaacggacgctgtgtcatcagggatgtgttcagcccgatcttgccggcgaccgaatgtattttggttgtctccaatgattcctgcaaggtaaaaggcggcaagatggaaggaagacgtttggcaagcatcgacttgccacttcccggcggaccgatcaggatcaggttgtggctgccggccgcggctacttccatcgcacgcttcacattctcctgtccgcgcacatccgaaaaatcggcttcaaattgcaactgccgcgcataaaactcttcacgggtattgacaaccgtcggctccaattcccgttttcctgctatgaactcgatcacctcctttatgttcgaaacgccatatacttccaggttattgacaacagcggcttcgcgggcattctgttcggggacgataaaacctttgaacccctcttcgcgtgccttgaccgcaatcgggaggattccctttaccggcttcagactgccatctaaagaaagctctcccatcatcatgtagcgactcagccgagaggcatccagctcttcggccgcagccaggataccgattgcaagcggcaggtcatacgacgagccttccttccggatatcggcaggcgccatattgatcactatacgattacggggaaacttgtagctgcttacctgaagggcggaaatgatgcgctcatggctttcacggacagccacatccggcagccctaccaaaaagaattgaatacccttcgtgcagttcacttcgatcgtaacgaccgttgccgatatgccctgtacggcggcggcataagatttgactaacatagttaaagatttatgatttataatttttgatttatgagtccggataaatatgatttatggatagcgacattgcataaatcataaatctggaattataaaccaattaagttttccaacgtctgctttatctcgactccattgtccgttttcagaatgatcttcccttcttcatcgatcaggaaacagcggggtaaggcacttacattatacagatcaaccaacatggccgcctgtccggctgagtcggtaaccagattccagtcgatactgtcctttgcaaggactttcctcactccggactgatcgtcgtcgaggctgaccaacaacatatctaccttctctttcgggtatttcattgccacttcatccaaatacagatcctccgtctggcacatatcgcaccagggagccgtaaacgcaagcagcaaatatttcttagggaaagaatccaggctgacaggagtcccgtaaatgttcttcacattgaaatcgggcgcttcggctcccaaagccgttctttttgcgcgtgtactgtattcctgcaacttctttaccagataaaagtcgttcagtttcggactcaacacagccaacagttcgtccatttgacgggtatcgtccggatgattaaaataatgttgtatcaagatgacggacgcttcttcatccggatatttctttatggcggcggcagcctcttcattcaacagatggtttacatttgccaggcgcgaagccatatccgttccttctatcgagctgttgacattttctctgtttttcttattcagttgacggatcaagtcagcctgttccttcaatagaggagccatttctttttttattgcggaaagacggtcattgatccgccctcctctgacgcgcaacatggcgggataatctgcatctccggtgatcgtcaccttttctcccttttccagataggcggtaacccaatgtgtcttatctgcaaagaaaatcgtcacctccctgaaatccccctgtttctgttcgatcaagaattcgcccggcttttcgcaagtcaccgtatccacaacttttatatcttcattctcaaaaacggcatataaggtctgatcctccagattggtaagtttcccttctatccggtaagcaacatctccgccacacgatgacaaagaaacgataaccccaacgaccagtaataaatgtctaatcatgttacacctcacatctcgtatttacagataatttagggtaaaggtaggaatagattttaaaacatcctaacatttatgctaaatttaatgtatatatacaaaaaaagcgcagaaccggagttctgcgctttcatatagccattatgtatgttattacaatttcggaccagcggcaaccagtttcttaccggcttcgttgcctgtgaacttagcgaagttcttgatgaaacggccagccagatcttttgctttttcttcccactgagaagcgtcagcataagtatcgcgcggatccaggatattcggatcaacacccggcaattctgtcggtacaacgaaatcgaagtacgggataacttttgtcggagctttgtcgatagaaccgtccaggatagcatcgatgataccacgagtgtcgcggatagagatacgtttgccagtaccgttccaaccagtgttgaccaaataagccttagcaccggtcatctgcatcttcttaaccaattcttcaccgtattttgtcggatgcaatgacaagaaggcagcaccgaagcaagctgagaatgtcggagtcggttcagtgataccacgttctgtaccggccaattttgcggtaaaaccagacaggaagtaatactgagtctgttccgggttcaggatagataccggaggcaatacgccgaatgcatcggcagacaggaagataacctgttttgcgtgcgggcctttggaaaccggtttaacgatgttttcgatgtgatagatcggataagaaacacgtgtgttttctgttacgctcttatcagcgaaatcgatcttgccgttagcatcaactgtaacgttttcaagaagagcgtcacgtttgatagcgttgtagatatccggttcgctttctttatccaagttgataaccttagcgtagcaaccaccttcgtagttgaatacaccttcgttgtcccatccgtgttcgtcatcaccgatcaacagacgtttcgggtcggtagacaaagttgtcttacctgtaccggacagaccgaagaagatagcagagcttgttccttccttatccgtgttagcggagcagtgcatagaagcgatgccacgcagcgggttcagatagttcatgatagagaagatacctttcttcatttcaccaccgtaccaagtgttcaggatcacctgttctttagtcttcaggttgaaaacagtagcagtttctgagttcaggcctaattccttgaagttttcaactttagctttagctgcgttgaaagaaacgaaatcaggttctccgtagttagccagttcttcagctgtcggacggatgaacatgttagtcacgaagtgtgcctgccatgctacttccatgatgaaacgtactttcagacgagttgcttcgttagcaccgcagaaagtatcgacaacgaacaaacgtttgcctgacaattcttttactgctttagctttcagatcagcccaagcttcttcagaacaaggcttgttatcatttttatattcttctgaagtccaccatactgaatcttcgctggcttcgttctttacgaaaaatttatctttaggagaacgacctgtataaatacctgtcattacgttcacggcgcccagttcagttacctgacccttttcgtagccttccaaacccggttttgtttcttctgcgaacagaacatcgtaagacggattgtgaatgatttccttcacgtctttaattccgtacttgcttaaatctaatgtagccatcttgaaattaatttaattgattgactttatataactttttctctctactcaattacaaaaacacaaggcaaatcatcattatacttacttgctgctctttcgccttgttaatcgcggtacaaaagtaatacaaattttcatagcatatatcgaattaaggaaatttttcagtaataattattcttttccatgccattaacatcaaactctaccattttgtaacacatactttacaaatcaggctcttttatccaaagatagcatcgtgtttcccggcattcaagtcatcttggatacgatggagcacgataagcagaggggataaatgcagtcttaaaatattcacaatttcaataggatctatcgcggcgtattcgtgagaaatcagatttcgtagaccaaaaacgcttcgccatgctatttccggataatgtgtcagtagtttcccggaagtagccacatctatctgcttcaataattcacccactatctgtaagcgcatggtagtcgcatcgaacaagtccataccgttcggtgtgcataaaaaatcatttgcacaatacacattagaagtcctctcaagtgctaattctgctttctctgtcaagaaagacaaatgttctaatataaattctttagacgtagattgcatcttgttttatattattgcgcaacaacgtacgcatggtttcaaatattggtaccaaatctatctctgtatggaacagatgctccaactcttctttaatagccatacgaacaaaaaagtccggttttttcaaacgaatgcacacatctatgtcgctcttctcattctgttcaccacgagccacgctgccgaaaagccccaatgtctcgattccatacttttctgcggaacgggctttgtaatctctcagtatttctatgatttcggctgttgtcttcattgctatatccttttgtttcacaaagataggaatataaataagaaaagctgtaaacccttgcttcttttttcagggtttacagcttttcttatcagggagcggtttgccgccttactttacttcccagatttctccgctcatcagataatcatgcagagagcggatggggttcttggcccggacttcttcgatctgctggtgtacggcttcatcataagtcggagcatccacatcgcggatcacaccgagtgcgaccggcatgtcttcaccgcccatcatggcaagcatcatgtgcaaagtgttatctttttcatgtgcgtcatgtaccagaacatcatccaacgtatagccatcctggccgattgttacggctttcagtttcaggccttccagcacgatgcccttttcattgttcttgccgaacaacatcttctcgccatgacgaaggaaaatcgtacggtcggcacggaattccttgtcgacaatctttttatggatgccgtcgttgaagatcacgcagttcaccaacacttctgtcaccgaagcgcctttatggcgggcagaagcagccagcacttcagtcgtattcttcaggtccacatcgatcacgcgggcaaagaaattgccacgggcgcccaaagccagttcagccgggataaacggatcttcgaccgttccgtaaggtgaactcttggacacgaaaccacgatcggatgtcggagaatattgtcctttcgtcaggccgtatatcttgttgttgaacaagacgatattcaggtctacattgcgtcggattgcatggataaaatggttaccgccgatagccaggcagtctccgtcgccggtaaccaaccagacactcagatcggggcgagccgtcttcacgccggtagcgatagcggcgccacgtccgtggatcgtatggaaaccgtatgtgttcatataataaggtaaacgggaagaacacccgatacccgaaataacggccatattatgaggagccactcctacttcggccattgctttgtgcaagcagttcaacacggcatggtctccacaacccggacaccagcgtacatactgatcgctcttataatctttcggttgaaattttacttcttcagttgccatcttttaagcctccaatattttcgtgaattcctcaactaatctcgctacaataaaaggttgtccttttacccggttgaaacggtacgggttgaacccggccactttaccacgcaggtagttggcaaactgcccgttgttctgttcggcaacgaccaccttcttgtatttgcccagtacctcagccgtgttcttaggcagcgggctgatgaacttgaagtgagccagggcgactttctttccttgttcctgcatggtttccattgcttcgtagaggtgtccgtatgttccgccccatccgacgatcagcaggtcggcatcgggatctccgatcacttccagttcggggatataatcggcaatcttgtcgatcttggcctgacgggtcgtaaccattttctggtgattgatcggatcggtcgagatagcacttgtttcgtagtctttttcgagaccgcccaggcgatgggtaaaaccttcggttcccggaatagcccaatagcggaccaggctttccttatcacgacgatacgctttccatactttttcgctcgcatcgtagttggaaacataattcggtttgatttccggatattcggccaggttcggcagcttccatgcggaagaaccgttggcgatgaaggcatccgtcagcaggatgaccggagtcatgtgttcgagtgccaactttccggcccagtaagcggcatcgaaacagtctgtcggagtcgaagcggcgatcacgacagccgggctttcaccgttacgcccgtaaagagcctgcatcaggtcggtttgttcgctcttggtcggcatacctgtagaaggac

SEQ ID NO: 2124 - DNA, 24299 bp, synthetic construct
  source 1..24299: mol_type = other DNA
  misc_feature 1..24299: note = Synthetic
ctaaggtgctgcgtgagcatggtgttatgatgggtaagatcatcttcgacgacgaacctgagaatattcctcatgctgactataacggcgtgaacttcgtggaccgcgtgtcttgcaaggaaatcatccgttacaacaccggcgctcccaaaaaagtcgttttggtggactgcggtgtgaagcacaatattatccgttgcctgatcaatcgtggagtagaggtcatccgagtgccttggaactacgatttcaatgatatggagttcgacggcctgttcctggccaacggtcccggtgacccggacacttgcgaggatgctgtagtgaacatccgcaagttcctcaactcagacaaggtgcgtccttgcatgggtatctgtatgggtaaccagctgttgagcaaggcagcaggagctaagatctacaaactgaagtacggtcaccgtagccacaaccagccggttcgcatggtcggtaccaacaaatgcttcatcaccagtcaaaatcacggatatgcagtagacagcgatactctgggacaggattgggaaccattgtttgtgaacatgaacgacggatctaacgaaggtatccgccacaagacaaatccttggttcagcgcacagttccacccggaagcttgcagcggtccgattgatactgagttcttattcgatgattttgtaaaacttctttaattcttgactttaaatgattgacaaaaatattaagaaggtcctgctgttaggttcaggagccttgaaaatcggtgaagccggtgagtttgattattctggttctcaggccttgaaggctctgaaggaagaaggtattgaaaccgtattgatcaacccgaacattgccacagtgcagaccagtgagggtgtggctgatcagatttacttcctgccggtaactccgttcttcgtagagaaggtaatcgagaaagagaaaccacagggcatcctgttggcattcggtggacagactgccttgaactgcggtgtgcagctttacaagagcggcattctggagaagtataatgtgcaggtgctcggtactccggttcaggccattatcgacacagaggaccgcgagctgttcgtgaagaagctggacgagattgatgtgaagaccatcaagagccaggcttgcgaaagcatcgaggaggcacgcaaggctgctgccgagttgggttatccggtcatcatccgtgccgcttatgcactgggaggtctgggttccggcttctgcgacaacgaagaagaactgaacaaactggccgagaaagccttctcattctcaccgcaggtattggtggagaagagtttgaagggctggaaggaaattgaatatgaggtagtgcgcgacaagtacgacaactgtattaccgtatgtaatatggaaaacttcgacccgctgggtatccacaccggtgagagtatcgtaatcgctccgtcgcagacactgaccaactctgaatatcacaagttgcgtgccttgagtatcaagatcgtgcgtcacatcggtatcgtgggagagtgtaacgtacagtatgcattcgacccggaatctgaggactaccgcgtgatcgaggtgaatgcccgtctgagccgttcttcagctttggcctcaaaggcaaccggttatccgttggctttcgtagctgccaagttgggtatgggttacggtctgtttgagttgaagaactcggttaccaagaccacttcagctttctttgagccggcattggactatgtagtctgcaagatccctcgttgggacttgggtaagttccgtggagtagaccgcgaattgggttcatccatgaagtcagtcggcgaggtgatggctatcggccgtaccttcgaagaggctatccagaagggtctgcgtatgatcggtcagggcatgcacggtttcgtagaaaacaaggagctggagatcgagaacatcgacgctgctctgcgcgaaccgaccgacaagcgtatcttcattatctctaaagccctttcaaaaggctatactgtggaccagattcacgaactgaccaagattgaccgttggttcctggagaaactggccaacatcaagcagacttcacgcgagttgcacgcttgcaagaatatcaacctgcttgacaacgagctgctccgcaaggcgaaggttcagggattcaccgacttccagattgcccgcgctctgggtatggaagacgagctcgacattgacgatgccatcctgattgtccgcaatcgccgtaaggcagccggcattgttccggttgtgaagcagatcgatactttggcagccgagtatccggcacagaccaactatctgtatctcacttacagcggtgtagccaacgatatcaagttcgagcacgacaagcgcagcatcgtggtattgggttccggagcttaccgaatcggttcatccgtagagttcgactggtgcggtgtgcaggctctgaacaccatccgcaaggaaggctaccgctctgtcatgatcaattataatccggaaaccgtgtcaaccgattacgatatgtgcgaccgtctgtacttcgacgagttgacattcgagcgtgtcatggatattctggatctggagtgcccgcacggtgtgattgtatctaccggtggtcagattccaaacaacctcgccatgcgtctcgacggccagcacattccattgttgggaactactgccaagagcatcgacaacgccgaggaccgcgagaagttctcagccatgttgaaccgcatcggtgtagaccagccggagtggagcgccctgaccaatatggaagatgtaaatgccttcatcgagaaggttggcttcccggtattggttcgtccttcatacgtactttccggtgctgccatgaacgtatgttctaaccaggaagagttggaacgcttcctgaaactggctgccaacgtatcccagaagcatccggtggtgatcagcaagttcctgttgaatgccaaggaagtggaaatggatgctgtggccaaggacggagaaatcctggcatacgccatcagcgagcacattgagtttgccggtgttcactcaggagatgctaccatccagttcccggcacagaaactgtacgtggagactgtacgccgcatcaagaagatctctggcgagattgcccgtgagctgaagatcagcggtccgttcaacatccagttcctggctaagaacaacgacatcaaggtaattgaatgtaacctgcgtgcttcacgaagcttcccattcgtaagcaaggtattgaagataaacttcattgagctggctaccaaggtaatgctcggattgccggtaagcaagccgaacaagagtctgttcgacttcgattatgtaggaatcaaggccagccagttctcattcaaccgcttgcagaaggccgacccggtattgggtgtagatatggcttcaaccggtgaggttggctgtttgggtgatgataccgacaacgctctgatgcaggccatgctttcagtaggtcaccgtgttccggagaagaacatcctgctctctaccggaggcgccaagcagaaggcaagcatgctcgatgcggcccgcgagctgaaagagaatggttacaacctgtatgctaccggaggtaccagccgcttcctcacagaaaacggcattgaaaatacattggtatactggccaaacgaggagggacatcctcaggcattggatatgctgcaccagaaacagattgatatggtggtgaacattccgaagaacctcaccgaaggcgagatcagcaacggttacaagatccgtcgtgccgccatcgacctgaatattccgttgatcaccaacgctcgtctggcgagtgcctttatccatgcattctgcaagatcaagaccgatgacattgtcatcaagagttggtctgaatacaagtaataaaggatatgtatgaattttgaaatcatctttgtattgctatgtctggttgcaatggtcgttgctttaatcaacgaccgtatgcgaccaggcatggtccttttctcggtggttgtgctttttttgtgcacgggaatcatttctccgaaggagtgtctcgaaggattctccaataaaggcatgatcacggtagccctgcttttcctggtgagcgaaggtattcgcaagagtggggtattggaacagttcatttaccggctgctcccgaaggagaagtgcagtgtggccaagggcaacatgcacatgcttcctgttattgcctttatctctgctttcctgaacaacacaccggttgtcgtgatctttgccccgatcatcaagaactgggcccgacggaccggactctctgcctctaaattcctgattccgctttcctatgccactatattgggcggtatgtgtaccctgatcggtacttcaaccaatctggtggtcgacggtatgattcaggatgcgggctacgaaggttttacgattttcgaactcggtaaaatcggagtgatcattgctgtaatcggaatcacctatctggttttcttctccaagaaactgttgcctgaggtaaatgccaaggacgaagaactggaagatctcactgctgagagcaatgtggtttgtgtagaagccgttatcggagcacgttttccgggcaacggcaagactttgaaggaatttgactttccgcgtcactatggtgctacagtacgcagtctgcaccgcaatggtgtgcgtctggaaggcgactggatgaatatccgtctgtgtgaaaacgacaccttggtattggagaccgacgacaagttcattcctacctggggcgacagccgtgtcttcctgatgctttccgtgatggatgccgacatgcagatggagcgcaagaagcgctattttgccatgatcctgctgttgtttatgattgtgggtgccactgtgggcgaacttccctttgtggccaatctgtttcccggagtcaagctcgacatgtttttcttcgtgtgtatcaccacagtcattatggcatggacaaagatgttttctcccaagaactataccaagtatatttcctgggatgtactgattacgattgcctgcgcctttgccatcagcaaggctatggaaaactccggttttgcaacattcattgccaatcagataatcggacttaccgattcactgggaccgcacgccctgttggccatcatcttcctgattacaaatctgtgtacggagctgatcaccaacaatgccgccgctgcattggctttccccatagcactggccgtatcccgtcagttgggtgttgaccctacgccgttttttgtggtgatctgtgtcgccgcttcggcttcgttctccacaccgatcggttatcagaccaacctgattgtgcagggtatcggaggttacaagtttaccgactttgtacgtatcggtttgccgctgaatatcatcgtattcatattatccattatactaatccctatgttctggaacttctaaaacgaacagaagatgacacaagagaataacatatatcccatctatgacaagatgatgacccgtgccgacaaggaggccttgctcggtcagaaaggtatgatgatctggttcaccggtctttccggttccggcaagagtaccattgctctgagtctggaacgcgaactggacaagcgcggcgttctgtgccgcattctcgacggtgacaatatccgttcgggcatcaaccgcaatctcggtttctcggaagaagaccgtgtggaaaacatccgccgtattgccgaagtgggcaagctgtttgtagataccggcattgtgaccattgccgctttcatcagcccgaccaaccagcttcgtgagatggcagccgagattatcggcaaggacgatttccgtgaaatttatgtcagcaccccgctgagcgtctgcgagcagcgcgatgtcaagggcctttatgcccgtgcccgtcgcggtgagatcaaggactttaccggagtgagcgctccgtttgaggcacccgagcatcccgccctttcgctcgacacctccaaactctctttggaggaagccgtgaaccaggtgcttcagttaattttcgaatcaaataacaacaaataatattgattatggcagaatatagtttgagtcatttgcaggagctcgaggccgagtccatccacatcatccgtgaggtggccgccgagtttgaaaatcctgtgatgctttattccataggtaaggactcttctgtaatggtgcgtctggccgagaaagcctttgcgcccggaaaagttccgttccctttgatgcacatcgattccaagtggaaattcaaggaaatgatcgagttccgcgacaactacgccaagcagtacggctggaacctgattgtagagtctaacatggaagccttccatgccggtgtgggtccgtttacccacggcagtaaggtacacaccgacctgatgaagaccaaggccttgctagatgctttggcaaaatacaagttcgatgccgctttcggtggcgctcgccgtgatgaggagaagagccgtgccaaggagcgtattttctctttccgcgaccagttccagcagtgggacccgaagaaccagcgtccggagttgtgggacatctacaacagccgcgtgcacaagggcgagagcatccgtgtgttcccgttgagcaactggaccgagctcgacatctggcagtacatccgtctggagaacattcctattgtgccgctgtacttcgccaaggaacgtccggtggtcaatatcgacggtcagctcatcatgccggacgacgaccgtctgccggagaaataccgcgaccagatcgagatgaagaagatccgcttccgtaccttgggctgctggccgctgaccggagccatcgagagcgaggcagacaccatcgagaagattgtggaggaaatgatgaccaccaccaagagtgagcgtaccacccgtgtgatcgacttcgaccaggaagcatccatggagcagaaaaagcgtgaaggatatttttaaaacagaaagattatggcagttcaaaatattaaggaattcctggatcaggatgaaaagaaagacctgttgcgtttgctgaccgccggttctgtagacgacggaaagtctacgctgatcggccgtctgctgttcgacagcaagaagctctatgaagaccagttgcaggcgttggagcgcgacagcaagcgtgtgggcaatgccggtgagcacatcgactacgccctgttgctcgacggactgaaagccgagcgtgaggagggtatcaccatcgacgtggcctaccgttatttctcaaccaatttgcgtaagttcatcattgccgacactccgggacacgaacaatatacccgcaatatgattaccggtggctctaccgccaatctggccatcattctggtggatgcccgtaccggtgtcatcacccagacccgtcgccacaccttcctggtgtctttgctcggcatcaagcacattgtgctggctgtaaacaagatggacctggtagacttcagtcaggaagtgttcgacaagattgtgggcgagtaccgcaagctgaccgattacctgggtattgacgatgtaacctgcttcccgctgtccgcccttgatggcgacaacgtggtagagaagtccgaccgcactccgtggtacgaaggaccggcattgctcgacttcctggagactgtgcctatccacaccgaccgcaatatggacgacttccgctatccggtacagtacgtgctgcgtccgaacctcgacttccgtggtttctgcggcaagatcgcttccggcgtaatccgtaagggcgacgaaatcatggccctgccttccaagaagaaatcacacgtaaagagcatcgtgacctacgagggcgagctcgaagaagctttctgtccgcagtgtgtcaccattactttggaggatgagatcgacatctcccgtggcgagatgattgtcaaaagcgacaatctgccggagatcggccgtcatgtagaaaccatgctcgtgtggatggacgaggagcctatggatcgcaagaagcagttctatctgaagcacaataccaataccacccgtgccaccatcgatcagattgcctataaggtagacgtgaacactatggagcaaagcccggccgagttcttcaaactcaacgagatcggacgtgtgcagatcaccacagccaagaccctgttcttcgacgcttattccaagaacaaggctaccggttcattcatcctgatcgacccgattaccaacaacaccagtgcggtgggtatgatcatcggtcctacagatgtagccgacatcgagcacgaagatattccggaactgaacctgccgaaactgggcattgctccggagcattacgacgcgattgagaaggctgtgaaagacctttcacgtcagggtatcgccattaacatcatcaaataagagaggaggaaggaatgggactactggaattcagtaaattgccggtcaatacgcttgtaggcgcagactgggatacatttaagaagatgaccgacgggcagaatatcggttccaaatacaagaacaagtattatttgaccaagggcgtgtgccgcctgttgagcaccctcaagggtttgcaggacaagaagtacgaaaagctgctggcttcacagccgttgcagaacgaccccgtgttcatcttgggccactggcgcagcggaaccacttttgtgcacaacatctttgcgcaggacaagcatttcggttacaccactacttatcagactgtgttcccgcacctgatgatgttcggacaacctatgttcaagaagaccatgggctggctgatgccggacaagcgtccgaccgacaatatggagctggcgcccgatctgcctcaggaggaagagttcgccctgtcgaacatgatgccttattcttattatgacttctggttcttcccggagcgcatgatggagtattgcgagcgttacctcacttttgagaagatcacccccgaggagttgaaggtatttaaggagaccttcctcaaactggtgaagatttcgttgtggaataccggcggtacacagtatctgtccaagaacccgccacacactggtcgtgtaaaggccctggtggaactgttccccaacgccaagttcatctatctgatgcgtaatccctacaccgtgttcgagagtacccgcagcttctttaacaacaccatcaagccgctggagctccagccttacgatgagaacgtgatggagcagaacattctcgatgcctatacacagctgtatcgcgcttacgaggagcagaagaagttcatccccgaaggcaatctctatgaggtgaagtttgaggagtttgagcgtgacgctttggccaccaccgaggatatttaccgcaagctgaatattccgggatgggaagaagcccgtccggccattgaggcttatgtgggcaagaagaaaggctacaagaagaacaagtatgaatacaagccgcgcaccgttcagctggtgaacgacaactggggctatgccttgaaggactgggattacccggtgcactaagctgagcatggcttgacgaatattattgtataaaatggctccgtccccttttccgagcgattcgggagaggggacggagttttttgtatatcggattcttttctatcgttgattttcaaatcttctgaaaattagtttgtattaaataatatatctgaacggaataatcaatgagataaatatagggctgtgagattatataaataaaaaatcccccgttaaaggacgagggaacctaatgttttcacaacggataaaccttattgtgatttgctacattttagtattgcaaaaataatagatgtagattaataaaacaatattttgtttgtttttttatagatatatttattatatttggcttattgttctgtttatgaaatagaaatatataaaatacaataagcaatgaaaaagatattaggacttgatttaggtacgacaagtatcggttgggcattggttaatgaagctgaaaatcctcaggaggagtcaaatataataaaagctggtgtaagagtgaatcctctttcttctgatgagattcaggattttgagaaaggtaaaagcataaccacgaatgcggcaagaacccaaaaaagaagtgccagacataatctgcaaagatataaatacagaagagatattcttattcagattttgaaagagcatggcttcattaccgattctgatattttatcagaatctggtaataaatctacatttgaaacttatcatttacgggcaaaggctgtttccgaagagatatcattgaaagatcttgcaagagtcttgctgatgataaataaaaagcgaggatataaaagttcgcgtaaaatcaaaaaaacagaagaagatggcagcctgattgattccatggacatagctaaaaagctttatgaagataatctgacacctggagagctctgtttggaatatttgcgacaaggacgaaaaatcttgcctgatttttaccgttctgatttacagaatgaattaaatcgtctttgggattttcagaaaaccttttatccagatgtattaacggatattcttaaagaagggttgcgtggaaaaaataaaacccaaacttggactaaacttgctgaaaattttgtttggcaagaaactgttgaagtgtggaatgaagaaaaagcagaaactcaatatgtaataaaggatttacatttatccggattaaaaagaacaacaaaagggcaggaacagaaaatagaaacttatagctggagagttcaagcacaaagggagaaacttccacctgagatgttggccattgtgattcaggaaatcaatggtcagattagttcttcgagtggttatctcggtgcaattagtgaccgaagtaaggaattgtacttcaatcgtgaaactgtcggccaatatcttttgagaattatccaagagaatcccaatagaggtttacgtaatatagtattttaccgacaggactacatggatgagtttgataagatttgggaaacacaagctaagtttcatggggaactcacggaatctttaaaaaatgagataagagacgttgttattttctatcagagaaagttgaagagtcagaaaggacttgtcagtgtgtgtgaacttgaaagggaaaaacggattcttcctgatggcagagaaaaaataataggagccaaagtaatatcacgctctcatcctttatttcaggaattcaaaatatggcaatgtctcaatgatatagaggtttttgttgtagataagaatacaaaaagaaagaaaaccaagaaaccgcagacattatttgaagattatgaggatgctttgctgacaaatggtagaaggcctctttatttagaagaaaaggaaatattagccaaggaactgatgatcaagagcagtcttaaaaagtctgatgtcttgaaactgttgtttgatgaaagcgatttgaatctggatttgaatttcaaatcaatagaaggtaatcgtacggggtttgctttattctctgcatttagtagagctattgaaacttatggttatgaacctgttgatttcaagaagtcttctcaggaaataatggatatgcttttccaaatttttaccgatttgggttggaatacgaatttgttggtcatggatttgggcgaaagcaataaagaaatggagcgcaaagattttttccggttatggcatctgttatattctttcgaaggggataattctcgtacaggaaacgaaagtctgatacagaaattgatgagcttgtgcggcatggaacgcgactatgcgcagtccatagctaatgttacttttgagggtgattatgcaagtttgagtgccaaggctattcgtaagattttgccttatatgaaagaaggaaatcaatatagtgtcgcttgcgattatgccggatatcgtcattcaagatcatcactgacaaaagaagaaatagccaataaggtcttaaaggacaaactgcagctgataccgaaaaacggtttgcgtaatcctgttgtagaaaaaattcttaaccagatgattaatgtggtcaatcagattataaatgaatatggaaggcctgatgagatacgtatagaattggcacgtgaactcaaaaagagttctaaggaaagagaggaattaataaaatccattgcttcaaacactaaggaaaatgagaagattcgtgagattcttcttaaagagttcaatctgtcaaccgtaagcaggacagatattatcagatataaattgtatgaagaattgaaggagaacaattaccatactttatattcaaataaatatatccccagagaacttttgttttctaaggagatagacatagagcacattattcctaaagcgaggatttttgacgattcactttccaataaaactttggaatatcgttctgtaaatattgaaaaaggactaatgactgcgtatgattttgttcagtctaagtatggagaggaagaactagaagcatatgtgaaccgctgtgaaaatatcttcagaggaaagcccaccaaacttagaaaattgaaaatgagtgcccttgaaattcctgatggttttgttgaccgtgatttgcggaatacacaatatatagccaagaaagcgcttgagatgctgaatgagatttgtcgcagagttattgccacatcggggtccataacagaacaattacgccaggattggcagcttgttgatgttatgaaagaactgaatctttcgaagtatgaagcattgggagaagtggaaacttatcaagaccgagacgggcggactgtaaaaagaattgtgaactggacaaaaagaaatgatcatcgtcatcatgccatggatgcgttgactgttgcttttaccaaagaagcttatgtgcagttctttaattatagaaatgctgcgtatgattcagaacataaagaacacagcaatattatggctattaagaacaagtattttaaggatggaagaataaatcctcccatgcctttaaataaattccgtgccgaaaccaaacgtctcatggaaagcctgcttgtttctgtaaaagcgaaaaataaggtcgttaccaataatgtgaaccgtggtaaatttaaaaatggagaaaggagtaaaatccagttaacaccacgtgggcagttacatttggaaactatttatggtgtgtcaaagcgtcgaattttttctgaagaatgtgtcaacgcatccttcacgcaagaaaaaattatgcgtgtcagtaacgaaaaatatcgaaacgcattgttgaagcgactgggagagttcgatggaaatccaaagaaagcctttaccggatcaaattcgctggagaaagttcccttgtatatagatgaacggcagcgtgaacaggtgccggaaaaggttagattgtcagattgggaaatactatatacggttcggaagcctataagtaaagatttgaatttggagaaagttgtcgatccttcaataagaagagttctggaaaagagacttgctgagttcggaggaaacaaagataaagcattttctaatttagaagagaatccaatatggctgaataaagaaaagggtatctgtataaaatgtgtgaaagtcgaagggccaagcacggttgttgctttgcatcataaaaaagataaggatggccaagcacttttggacgaaaatggtgatatgataggctgtgactttgtgtcaacaggcaataatcatcatgttgctgtatataagaaaccaaaacaagacaagaatggacagataaaattagataaagaagggaatatagaatatgaaataacagaaaaagtggtgcctttctttgaggtggtagaaagggttaatcaaggtttgcctgctgtagatcggaattataaaactgatgaaggatggcaattcctgtttacgatgaaacagaatgagtattttgtttttccgaatgcaaagactgggtttgatcctgccaatatcgatttactcaatccagataattatagtttgattagtccgaatttattccgtgttcagaaaatatcatatagaaaatatgttttcagacaccatttagaaacgactattgataatagttctaccaaaatgaaaggaattacctggactgattttcgaagttcaaaaggattggataaaatagtcaaggtcagagttaatcatattggcaaaatagtttctgtcggtgaatattaatgactaacattattaccatgatcaagaaaacactatattttggaaatccggcatatctctcgttgagaaacaatcagatggtaataaagcttccggaggtgcagaaatgcacctccgtttctgatagtttcaaaaaggcttctgaagtaaccaagcccatagaagatatcggtgtggtggttattgataatagacagattacaataacatctggattattggaagctttgcttgagaataattgtgctattatcacttgtgatcataaaaatatgcctgttgggttaatgcttccgctttatggaaatacaactcaaaatgaacgctttagaatgcaattggatgcttctgttcctcttcaaaaacaattatggcaacaaacaattaaagcaaaaatttataatcagtggaaggtcttgggaatttattgcgatcatgagattcggtgtatgcgagtatgggtagatgaggttaaaagtggtgatgcagagaacatggaagcccgggctgcggctttttattggaaaaatctgttccccataaaaggcttctgtagagatagggaaggcatgccgcctaataatctgttgaattatggttatgcaatactgcgtgcaataattgcaagaagtttagtatcaagtggtttattacctacgttaggaatacatcatcataatagatataatgcttattgtttagcggatgatattatggagccttatagaccatatgttgataatttggtctatggaatttggaaaaccgaaatgcttgccaacccttataacaatgattttgaactgtcaagagatttgaaagccaaactattgtctattcctaccttagaggtcgtaattaatggtaaacgtagtcctctgatggttgcagcaagtataacaacatcgtcattatacaaatgttttgcaggagaattgcgcaaaatatcttacccggagatgtaatcatgtttagcagtaatgattgtgtatgaaagacagacttagtgaatataggattatgtggttgcttgttttctttgatttgcctacagaaaccaaaaaggataaaaaggcttatacaacatttcggaataaccttttaagagatggttttacgaaatttcaattttcaatatatatcaggcactgcaacagttgcgagaatgcggctgttcatgttaaaagggtaaaagcatttttaccggagttcggaagtgttggaattctttgtataaccgataagcagtttggaaatattgaacttttttatggaaaaaaaactatagatgtaattgcttctgagcagcaactggaactgttttaaaagaactgttggtaagtagaaatgataaatcctgtaatgctactggatttatcatttctatagctttgcttttttaaattgaaggagtcgaactaattgcttgatataatgtttgttatagcaagtctgttgtttccaacaagtcaaagatactaaaatgtaagcaaatcacaacttacttgccgcttccggagcgtggaaatttcgttgtttccaacaagtcaaagatactaaaatgtaagcaaatcacaacgcaatagcagcatcaccaaactgagcagtagttgtttccaacaagtcaaagatactaaaatgtaagcaaatcacaacattacctttgtgagttcgaaggaaaggaaagttgtttccaacaagtcaaagatactaaaatgtaagcaaatcacaacagactttcttcgaatgctccgtgacacacagttgtttccaacaagtcaaagatactaaaatgtaagcaaatcacaacctgcctaagaacgtacaggaagagatacaggttgtttccaacaagtcaaagatactaaaatgtaagcaaatcacaactcgcccagtgggcacaggtaacggccatgagttgtttccaacaagtcaaagatactaaaatgtaagcaaatcacaactgatgaggctgggaatgtggacgcaaaagccaagtcaaagatactaaaatgtaagcaaatcacaactgaacggcctgcacagcttcaggagtggcgttgtttccaacaagtcaaagatactaaaatgtaagcaaatcacaactttggatgcttcggcgatgcagtcctctagttgtttccaacaagtcaaagatactaaaatgtaagcaaatcacaacacaattgccggagttattgttggatacggagttgtttccaacaagtcaaagatactaaaatgtaagcaaatcacaacaatggtaagtgcgatgggcggataccagaggttgtttccaacaagtcaaagatactaaaatgtaagcaaatcacaactaatctttgttattgtactgcatatcatttgttgtttccaacaagtcaaagatactaaaatgtaagcaaatcacaactattaagcttagatgtactcccagaaacaagttgtttccaacaagtcaaagatactaaaatgtaagcaaatcacaactataatagctttccactgcttcttccggttgttgtttccaacaagtcaaagatactaaaatgtaagcaaatcacaactctgataatgcagttcctccagccggttttggttgtttccaacaagtcaaagatactaaaatgtaagcaaatcacaactctgcaggagcatcttcagattttcttccagttgtttccaacaagtcaaagatactaaaatgtaagcaaatcacaacaaaggggcagtacaacaagttcggaaagtgttgtttccaacaagtcaaagatactaaaatgtaagcaaatcacaacaacaggtccagtcagccgattccatccgtggttgtttccaacaagtcaaagatactaaaatgtaagcaaatcacaaccgtgtctcctaacattaccttatacgtcgtgttgtttccaacaagtcaaagatactaaaatgtaagcaaatcacaacgatacgtgcagccttgtccattttgtcgcgttgtttccaacaagtcaaagatactaaaatgtaagcaaatcacaacatctagctccattcttgtctatcactatcagttgtttccaacaagtcaaagatactaaaatgtaagcaaatcacaactctgttagcggctggcgctgactcaactaagttgtttccaacaagtcaaagatactaaaatgtaagcaaatcacaactctgttagcggctggcgctgactcaactaagttgtttccaacaagtcaaagatactaaaatgtaagcaaatcacaacgcgggacaactcgacgcggacaaaaccaaagttgtttccaacaagtcaaagatactaaaatgtaagcaaatcacaactgatatcgcagtggattgtcaccatgatgcgttgtttccaacaagtcaaagatactaaaatgtaagcaaatcacaacgtacactaccgaccgcattatcacggaagtgttgtttccaacaagtccaagatactaaaatgtaagcaaatcacaacctggaagccttgccttatctggcgcaggcggttgttttcaacaagtcaaagatactaaaatgtaagcaaatcacaacaacctactatcttagcccaagattcaagatgttgtttccaacaagtcaaagatacacattatattattattcaattaaacttttattaatatttatagttatactggagtatcaatatgataggaaacttgcattaagtgatatatttctttatgtttttaatgagaatctctttctttcatattctaagattatatacaatccagcagaaaatctacataatcatacattcccacaccacatatttcctgcatatatgcggattttatgcgaaaagttccacagaaaaagaaacgagctcccacaaggaatgaagagaaacatcgtggtgatggcaacaaatcaccacggcaactctgaaaagtcatcaaaggaatttgaaaaagaggggagaaaaggtgtttttaaagatcagataaacgtagtttaaggcgtagcaggaatgtagaaatagcgtgtattccatttatcaacagacggatatgccggaaagcaatccctgaggtttgaatttttggaatatcctgatcttccggacgcatatccgccagtctcagagcgcataaatatcataatgtcattctgtaaaaaaggaagagccccgctccggagcataaagacgctttccggagcggggttctttggttggtatcgtaacgtgtgcggtgattagcgcaacacaatcttgcagtcgctcaagtcttctacgatggcaaggctctctaccttgatattctcatcgtccatcaccttacgtccgccctggaaggccttttcgatgatgaagcccataccttcgatagtggcgccgctctgtttgcacaagtcaatcacacccttggctgcatttccgaaggccaggaagtcgtcgataaacagaatgtggtcgtcggcacaaaggaagttgctgctgatgcacaccgtgtagtcgcggtctttcgtgaaagagtgtaccacagaggtgagcatgttctccatcgtcttaggctgttttttcttgatgaacaccacgggcaggtgcatcagataacccacgaagatggccggagcgataccgctagcttcgatggtgacaatcttgttgatggggcggtccttgaagcgcgccatgaattcttttccgatttcatacatcagggtcgggtccatctgatgattgataaagctgtccactttcaggatgccaccggggaaacattttccatcctgaagaatgcgttttttcagtaattccatagggataaatgcagttgaattgattaattcctgcaaagttaatatcttttttcttcactgcggcattttctgcgccacatatttacatcaaaatgtatcttttttgaccgctttacagccttgtaaaggaccaaaaagagagaaaatccgaaaaaattgcacaaaacattcttgaaatgtgcattttttagttacctttgccggcgtttagataaattaataaggactattaactgaataaagaatattatggcttacaatttattgaaaggcaagcgtggtatcatcttcggtgcgttgaacgatgcttcaatcgcttggaaggtggcagaacgtgccgttgaagagggcgcgcagattgtattgacaaatactccggtggcatgccgtatgggtactatcgccgaactggctgagaaaaccggcgctactgtgattcctgctgacgcaacttcagttgaggacctgaacaacctgttcgtacaggctcaggaggctctgggtggaaagatcgacttcgtgctgcactcagtggctatgagcgccaacatgcgtaagaaacgtacttatgatgatctggactataacttgctgggcaagactctcgatatctcggctatctcattccacaagatgattcaggtggccaagaagctggatgccatcaacgagaacggttctatcctggcattgagctacgtggctgcacagcgtactttcttcggttacaacgatatggccgatgccaagtctttgctggagtctatcgctcgtagcttcggttacatctacggtcgtgagaagggcgttcgtatcaacaccatttctcagtcacctaccttcactactgccggtggcggtatcaagggattcgacggactgtatgatttcagcgaccgtatgtctcctctgggcaatgccagcgctgacgagtgtgcagactactgcgtggttatgttctcagacctgaccaagaaggttactatgcagaacctgttccacgacggtggtttctctaacatgggtatgtctttgcgcggtatgacccagtatcagaagtcattcatcgacgagaaccgtgacgagaacggtaacatcatctacggataattctcgaatttatatcataatttgattcaaggctgtcggcggtttcgccggcagcctttttttcgttccggtcgctttatcgaaagaatctgtttcggtttcaggattttttcttatctttggcagaataatatggcaatataaacaaacggaatatgaataaactcttattggccctgaacaagttttcgggcattgatatagaagctctgctggccagacagcaggaactgaaccgcgagatagagtctttgaagcagaaactggctgcttcttcggaaaggaatgaagaactggagactaaaatccagagtctggaagaacagatagccgaactgaatcgggtttcggaaggactgcgtgcggatttggagaaaaggagtctggacattgtggccttgcaggatacgaatgcgatgctgaacacggcaaaaacagaactggaatctgtcaaggttgctttggagagcgaaaagaaggacttgtcggtccgtctcggcgaagctgaagcaaacggcaaggcattggatgccgccaatgcggaactcaaaagcactaatgtagaactgaaaaaaagcaatgaggaactgaaacaggcgaaagcagagctgactgcggaacaaacagctttgaccgccgagaaagtggcattggaaagtgagaaaacggctcttgcggcgcgcctcaacgaagcggaagccgatggtgccgcgctgaaaaatacgaatgcagaacttgctgccgccaatgcggctctgactgccgagaaggaagagcttaccgcagctaatgcgaatctggttgccgaaaaagaggatcttagcgctgcaaacacaactctagcggccgaaaaggctgaactgacggcggttaatgaggctcttgttgccggaaaatcggatttggagtcggaaaaagaggcgttggaaaatgagaagtctgcccttacgctgcgtctgagcgaagcggaagtgaacagcagcgctctgaaggaagaaatcaagtctttggaggagtctgtacgccagtttgaagcccgccagaaagagctgttgcaggaattggagaatctgaaggctcgtcagagtgccgaagaagcggaattgcaaaagaactctgaaaaggaaagccagtggcagcagaaagagcaggaatatatggcccgcttgcaggaagcaacagaagaactgcaacgcaaggaagaggccttgcagcagaaagatgccgtgctgaaggagaaagagaatcttctggccgagaaggaaacggtgatttcgcaaaatgcggaaacgcttcaggctcaggatctgaaactcaaggagcaggaacagaatctgttggctggcaaagaggaaatgggccacatgcaggaattgttcaaacagcaggagatgtcggccggattgttgcatcagaaggtgcaggacctggacgacaaactgaaaaaccgtactgcggaactggagcggatgaatgctgattgtgagcagaagaaggtggccatagcacagcataagaatgaattggagcaacaaacaagtttgctgaatcaaaagaccgcacaactgaaggcttcggaggaacagttgcgccagaaagaggagttgcttacggcttctcagacggaaatcaaaaacctgaagcaggaactggaaacctggcgtaacaaaaagcagcaggagcaggaacaggtgaaggaatcggagaacctgagccaacagctgatcgaggcgcagtcggagattgcggccttgcgccagaagtttgtgcagatggagacagagcgtgtggaactgttgcagcagattgccgctctgaaacagcagccggcagtggcaccgaaaccgcaggaaccggaaaaaccgatgttggtagagcaggggggcaaccgtctggtgcgctatggacaggcggtggctctggattatcagggactgttccgcggacataccgtggagcaggaggacgaagaccgttatccgtactctcgtgaaccgttgttccaaactgaagtggctcgctggactgaacgtgaagatctgccggtgggactggccggaaaactgttgcagaaaggactggccgtgctggagcagttgggagccggaatccgtgtttctacacgtgccacactgcctgtggccgacacggaatggggattgcatccggatgtgctgatcgaatggcccgaaaaggaactttgcgtggcggtgcttgtggatgcgccttatgatttgcgtaccggagcggcctggcatagcgtaccgtcggcaacagacagctggatcaactattactataccaactgcggtgcatgcgtggtgcgcgtagccgaggaacaactgatagaagattatgaacaggtgctggcttatctgagcaactatctgtatgagcagacgggcgatcaccgcctgatgcagcaggtggcttggggtgtgtctactccgctgtggagcgctgagggcgttcaggcggctgcggcgcatcattatcgcgagcagtatttgggacgtgacctgttgcgtgaaactttggcgctcgagcagtctgtccgtccggctggttgggagcagctgccgtttaccgtagaacagttgtcggcggaatataagaaggtgcttgcctttaaggaggcggcagcacggaaatacatcgtggtgcgcacccgtccttatggcagtcaggtggtgttccgcaaggatcaggttcagggcaaggggctgtggcttgcaggcgtggatcagatcaagaacgaaacggtggaattgcctttctggcaaattgaggagattgccggtgcggataatatcgacaagccgatcgagggaggcgcacagctcagcatggagcgtctgcaggccatactggccgatgccgtgtgtcagtatcatccggtagcggtgcagtatcgtggcgcggacggcaactggcagcagaccgtgctctactggcttacctttgcgccgttgcagagcggttcggtatcgttgccttacggcggtctgttccaggacctgatgacggattccgtagatccggagagtattgtgggtatgagtgccttgcatcaccgtgtggtgcgtgtggctttgcgcgacatccgcagcatccgtgtgctcgacgtgttcgttaccgagcgcgaaggcatcggtgctttggtaaacggaatctattgcgcggtgctctatcagcaggcaccgctggccgaactgctttacaacagtctgccggaggatgtgaagctgatgccgtacgctcaggccaattacgcccatctgtgtatgttgaaacaggagtacaagaaggcgtatgccatttatacttccattgatccgcagcagccgatgcaggagaacatgacttgggaggatatgatcagcaacgactttacggaactggtgaagaatgatgtggagccggagctctttatccgcatggcacacgacctgaaccgtgctggctggcattttgaataatgagaatactaaaccttataataacgaagagatgaaaagaatacagtatgtttgcctttcctgctgtctggccggtatgggcgctttgatgttgccttcgtgctcggacgatgcaccgggtgaatatgtaaaaccgtgggatggagccgccgatatgaacacatcggtggcggccggaaatgatttttatcgttacgccaacggcggatggctggcccgcacttcgctgccgcagggctggcaagagtggggaccctggcagattacggaaaatgatgcggatggaaaactgcgcatgatgtatcagagcagtacgaatgaactcattcagaaatatacgttgatggcacaggacaaactgaaccgtgccgagcgaagcgcggatgccttgcgctccctgcttacggagattcagcgtgttacgacgcgcgaccgtctgatgtcggccatcgcttccatgcagaaggcgggttacagtccgttctttgagatcggtgtcactccgcatgagttcaacagcagagtgtttttgccgattctgaaggtgacttccacttatttcgatgccagccgctatcaggatgccgccttcaaggctgcctatcgcc

SEQ ID NO: 2125 - DNA, 24299 bp, synthetic construct
  source 1..24299: mol_type = other DNA
  misc_feature 1..24299: note = Synthetic
gaaatcatcgatcccaaaacattcgaaccattgtcgccgggagagtcaggagaattggtatttacaacgataacgaaagaaggattgcctttgcttcgttatcgtaccaaagatttatgctctctcatatatgataaatgcgattgtgggcggaccactgtgcgtatgagccggattaccggacgtagtgacgatatgttgattattcggggagtaaatgtattcccttctcaggtcgagagtgtaattcttgaattggaagaattcgaacctcattatatgctgattgttgaccgtaaaaataatctggacacactggaagttcaagtagaggttcgggagcaattctattcggatgagatcaacagaatgatggagctgaaaaagaaaataggacaccgactgcaaagtgttctcggtattgctgccaatataaaattggtagaacctcgtagcatagaacgcagtcagggaaaagctaaacgagtgattgataaccgcaagattgattaaaaaacaatacgattatgattataaaacagctatcggtttttcttgaaaacaagaccggacgtattaacgaagtaacccgtatattgggagaagaaggtgtaaacctttcggcatttagtatggctgaaaccgcagatttcggcattcttcgtgttattgtttctgacccggataaagctttggaagctttgaagaaacaccatttcggagtctctttgaccgatgtcgtctgtcttaactgtccgaatacaccgggagctttggctaaagcattagggtatctttctgatgagaatgtttttattgaatatatgtatgcatttgcagccggagatgttgcccatgtcgttattcgtccggataatatagagaattgtattcgggtattgaccgaacatcggctcgaattgatggctgcgcatcagttgtataaactttgataaaaaatttgatgaatatagaatagtgccgtatatttgttttcataagacggatatacagcactatttcgtatatttggagacatgtgaaaattcaaatggattttgaagtgtcggtctgaattttgcgtagaggctctcaaacttgatgactcaaaacagtttcttaatccgttaaaattcatttttttgttttcgttattcaatcagtttatctacatttgcacattatttgtctatatgaagaagagaattttatatttatttgtatcggtattatttcttgcttcgtgcagtgagtataataaaatacttaaaagtaccgattatgatatgaaatatgaatatgccaagaaatattttgaacagaaaaaatatgctcgggcatatactctgttaggagagttggtgacaatatataagggtacagataaagctgaagaatccctttatctattggctcgtagtcattatatggcgaaagattattcaacatcggggcagtattttacaacatactatacaaactatcctaaaggccagtttgcagagctttcccgtttttatgccggttatggttattatttggattctcccgaaccggaactcgatcagtcgggaacctataaggcaatagatgagatgcagatgtttctggaatattttccgagaagcgaaaaagcaaaggaagctcaagatataatctttgctttacaggaaaaattggtagaaaaagagtggttgaatgcacaattatattataatttgggcaactatatgggtaacaattatgatgcggctgtgattactgcacagaatgctctgaaagattatccctatacaaagagaaaagaagatctttcgatgttgatcttgaaatcgaaatatcaagaagctatacagagtgtggaagagaaaaagatagaacggttcagagacgtgatcgatgaatattatagttttatcaatgattttcccgatggagcaaatgcaaaggatgctaagaaaatttttaatgtagcaagtaaatacgtaaaagattaatcaatacaataatatggattacaagaaaacgaatgcaccgacaaacactgttacccgtgatatgatcgctttgtcatcggatacaggaaatgtttatgagactgtttgtattatagcaaaaagagctaatcagatttctgtagaaatgaaaaatgatctggaaaagaagttacaggaatttgcttcttttaatgataatcttgaagaagtattcgaaaacagagagcagattgaaatctcaagatattatgaaaagttgccgaaacctacactgatcgctgctcaggaatatcaagaaggtaaagtatattacagaaatccggctaaagaaaaagagataatctaaattccttttgaaataaaacaaagaaaaagacgactccgaaaaaaaatttcggagtcgtctttttctttgtttgaaattctgcttgttcgggttctatctcagacaattttgatttgagtattttatcggattggaacatagccgttatctttgattatgctctgtccttcatcggatagtaaatattgaataaatggagagatcgttttctcattttgtttattatagtagtaataaagcgggcgaacgatcggatacaattttcgggaagcattggaaactgaaggtaatgagtaatttttgttgtcgtatgatatagctaatgtcttgattttaggacttacgtatgctaatcccacataccctatagcgcctttagtttgacttaccgactgaattacagctccggttgccggcatagagagtgttccgctcatataatttttattttttagaacgctttctttgaaaaattcataagtccccgaggatgtttcccgagtatatactactatcttttgatctttaccgcctacctgtttccagttttttatttttccccgaaaaatatcttccaattgttttctcgtgagtttatttaccggattgtctggatgaatgataacggcaagagcatcgtaagcgataataacttcttgaatattttgtttcgcctctttcaatttcattttttcactgaatttgacaggacgcgatagcattgctatatcggtagtattgtccattaaggaggatattccgacaccgcttccacctcctgtaacggtaacatgtgctttaggatatttttttatgaaattttctgctgcttgttgtgaaacaggcagaacggtatcgcttcctttaatacgttgtgcatataatgatgatgtggcgaggaataaagaaataatcagataactttttgttcgtttcatatttttgttttattcgcaaagaaatagagatgatattacaaaaggtttacaatggtgttatttgacagttacaaaacctctctcggatatttttgtaatatgaatgtaataattctgaaacagtttattcaaatctcctttacacgatcttaatatgagtttcattcctttgtgccaacaaacagaaacacgatgaaaaaagtttttgaaaagattgtagaaggtatcctcacttgtagcggatatataacaagtattactattttgcttatcgtagctttcctttttacagaagctttcggtttatttagtaacaaggtaatagaggacggttatgttttggttttgaataaagaaaataagatcggaaagttaagcagcagagagataaaagatattttcgatgaggaaatcgttaattggaaagaagtgggaggaaaagatttgcctataaaactttttagactggaagatctgactgcttattattctgaagttgaattgggagaatcttatgaatttgcatcatctaaaatagagactctgattaaagatgatcccggaatcatcgcttttataccccggaaatttgttgagaatcctcagaacgttcgtgttttagaagatcaaacgatttcattaaaagaggtatttgccgggacagagtggttccctacggcaacgccggcaccgcagttcggattcttgcctttgattacgggaacattatgggtaagtttctttgccatacttatagcattgcctttcggtctatccgtatctatctatatgtctgaaattgccactccgagagtgcggagcatccttaaacctcttattgaattattgagtggaattccttcggtagtttacggatttttcggtttgatagtcatcgttcctataatacagaaagtgtttaatttaccggttggagagacaggtttgtccggaagtgtcgttttagcgattatggctttacctactattattactgttgcagaagatgctatgcgaaactgtccccgcacgatgcgcgaagcaagtctggctttgggggcttctcgttggcaaactatatataaagttgttattccgttttcgatttctgggattacatcgggagtagtcttaggaatcggtcgggctataggagaaacgatggcggttttaatggttaccgggaatgcggcggtaatccctgtttctattttagaacctttaagaacgatacccgctactatcgctgccgaattgggagaagctccttctggaggagctcattatcaagcactttttatgcttggtgtagtgcttttctttattacgctgataataaactcatgtgtagaatacgtatcatcaaaaaacaagtaaaaacatgaatatccgaaatatttatccagccgggtatgaggtccggaaaagacgttctcaacactttgcattcggaatcttttctctgctgagtgttctggtagtagctattctgtttgctattttgggctttatcatttacaaaggaatcggggttattagctgggatttccttaccgaatctccgacagacgggatgactgcgggaggtatatggccggcgatcgtagggacattttatttgatgatcgggagcgctctatttgcatttccggttggtgtgatgagcggtatatatatgaatgaatatgcccctaaaggaaagttggtgcgttttatacgggttatgacaaacaatctaagcggaataccttcgatcgtgttcggtctgttcggtatggcgttatttgtaaaatatctgaatttcggggatagtatcatagccgggtcattgactttaggtctgctttgtgtaccgttggtaatccgaacgacggaggagtcgttgaaagccattcccgacagtctgagagaaggcagccgggctttgggagcgaccaaattgcaaacgatatggcacgtgattttaccgatgggaatgcccaatatcattaccggtttgattcttgcgttaggaagagtttcaggagaaacagcccccatattatttacttgcgccgcttattttttaccgcaattgcccgaaagtatttttgaccagtgtatggcgttaccttatcatctgtatgttatctctacaagcgggacaaacatggaagctcagttaccgctggcatacggaacggcattggttctgatcgctattattctgtttatcaatttactggcaaatgccttgagaaagtatttttcaaataaagtaaaaacaaattaatataaaaagaaaatgaataagatcgatgcccgagacgtaaacttttactatgggaattttcacgctctcaaagggataagtatgcagatcgaagaaaaatctgtcgtggcatttataggtccgtcgggatgtggaaaatccacatttcttcgattgtttaatcgtatgaatgatttgattcccgatacacggttgaatggagaaatcttgatcgatgggaaaaatatttatgataaggatatacaggtcgatgaattgcggaaaaatgtaggaatggtttttcagagacccaatccctttccgaaaagtatattcgagaatgttgcttatgggttgcgtgtcaacggagtaaaggataaagaatttattcggaatcgcgtagaggaaacattgaaaggtgcagctttgtggaatgaagtgaaagataagttgaaagaatcggcttttgctctttcgggaggacagcagcagcggttgtgcattgcacgtgctatggcagtttctccttcagttttattgatggatgaacctgcatctgcccttgacccgatctctacggcaaaagtagaagagttgattcatgaactgaaaaacgattatacgattgttatcgtcacacataatatgcaacaagcatcgcgtatcagcgataagacagctttcttttatatgggagagatggttgagtatgacgatactaaaaagatatttacaaatccgggtaaagaggccacgcaaaattatattaccggtcgctttggttgatattattagaaatagataaggttatggtcgaatttatagaatcgaagttagtccgtcttcgcaaagaagtggatgaaatgtgggagctggtaagaacgcagattgataaatctgggaatgcagtgcaaaatttgaatagggaagatgcacagacggtcattgtaagagaaaaacatgtcaatgcctttgaattgaaaatagacagtgatatagaggatataattgctttatatagtccggtggcagtagaccttcggctcgttctggcaatgctgaagatcaattcgaacctggaacgaatcggagattttgcagaaggaatagctcggtttgtaattcattgtcctgaaccgttaaatgaagcattgatggaaaggttgcagttaaagacgatgtttacgacagttcttgatatgttggatatggctaaacgagctttggatgaggaaaatctggatttggctacatctgttcttgctaaagacaatttattagatgatataaattcggcggtaacgcctattcttgccgattatttgggagaacatccggatgatcggttgacttgtctgaatttggtcagtgtatttcgtaagttggaacgtgcgggagatcatattacgaatatggcagaagagataatcttttttgtaaatgcaaaagtattgaaacatcagggaaatacggacgaacattatatttgatttgcccaaaaaaatatatttaagagggaatgagcgattttaacatagttcattcccctgtttttttataattatacctaggcatgttatagttttcttgagaaattgagtcgttacttttttgattttaccatattcccgatattaagctatttattaattttcaattaagttcgttttccgaaaattgttaagcggtcattcctatatttgtttatataaagatacattttatatattaatcattaacttttaaaatcatgaatgcaaaaagaattaccgtatttgttttgtgtgttatcgtttcgatcggaatgttacaagctgcaacgaataatgagaatcaagaaagagatactgaccgtacggaatggactgtaacagcatctaattataaatttgattttcaaaatccttctaaaactgtcgatggtgatctcgattctcgttggacattgggaaaaccgcaagttgcgggagattggattattgtcgatatgaagactcctcagaaatttagtgtgatcgaattacagcaaggccgtagtgcaaatgatttccctcgaggttatgccgtgtatctttctaaagatggaaaagattggggaaatccagttattacgggagaagggattaaaggagatgcaacggtaataactcttccttcatctgtcgaaacgagatatataaagatcgcattgactaaagatgtttcgacttggtggagtattcatgaatttcttgtaaaataatgtaatgattttatggcagaataaaattggaataagatcatgaataaattattatcaataaagcagatagctgttattgccggagcatatcttttatgtagttgtccggtaaaagccgatattcgtatgccacgaatttttggcgaccatatggtattgcagcaggactcgcaattatccatatggggatgggccgatcctggagaaaaggtggtcgtgactcttgccggaaaaaaaggaaaggcggttgccggacaggatggtaaatggaaagtttctttgaaacccataaaaacgaaatcgaaagggcagaccctcacgataaaaggaaataataaaattatatatgaggacgtattggtcggagacgtgtgggtcgcttcgggacagtctaatatggaatggggtattaataaaaatcattataaaaaagatgtagatgcttcggcagattccttgttgcggctattttttgtcccgagaaatacctcgcttgatcctctgtccgatatttatatgcccgaagatacccagaaccccgaatgggctgcaaaatgggttttatgtacacctgaggcattgaggaaaataaacggacagggatttgcaagtgctgcttattattttgcccgggacattcgtcaagcgaatgaccgtcctttgggaataatacaaagtgcatggggaggtacacgtgctgaggcttggacgagtctgtctgctttgaaggctgaacctaagttgaaacgttatgtcgatctttatgaaaaaaatatcaggataaatcctgaagttgtcgctaattataaacagagaaaagccgagtttgacgtagcgataaaaaagtggaataatactgtgggtaaagagtgggacgaggcacaaaaggaatgggctattgaggtaaagaaggctcaggcggccggacttcctattcctgaaaaaccgaaaccgagttctccccgtccttcagatccgcctaaaccgaatggaggaaataacggaccgaccaatctgttcaatgcgatgatcaatcccttaattcccttgtcgataaaaggagtgatatggtatcagggagaattcaattccggaggatcagggaaagaatatgctacgctgttcccttgcatgataaatgattggcggcaaaaatggggaataggagatttcccttttatatacgtacagttaccgaatttcggacctgtcgatcagaaaccttcagaagaaggacaaggctggcgttgggtgcgtgaaggacaattaaaagctcttgctttgcccaatacggctatggctgtgactatcgatgtcggtgatcctttcgatctgcatccgatcgataaatatgacgtaggacatcgtttggcattagcagcaagaaaattagcatacggcgaaaagataattgcttctggtccattataccaaagcatgacgatagagggggataaggcgattattcatttcagtaattgcggaagcggattgacaatagcatcttctccctatacacctaaaggagaaaagcctaaaaattccgagaaacttaccgggttctgcattgccggagaagaccgtaaatttgtttgggctgatgccgtgatcgatggagatcaagtgattgtctcgagcccgaaggtgctgaaacctgttgctgtgcgttatggattttccaacagtccggtttgtaacctgtacaataaagagttgcttccggcatctcctttccgtacggacaattgggaaaaataattagaatagcgattattgaggttttaccaacccgataatcgctatttgttttttattgttttataagattgattactgatagatgtgaataataagaatagatagtggtaatatagacagaggttcagcttgtatttgcatttttttcgctggtatatgaattgttattacgttgaaaaattttgattataagcatttttaattttttcaaaatcttcccccatatcaattgcattaaattgtgctgtttatttttaatgctcttttttgaatttagtttattgaaggtagtagcaggtataaaaaatcccccgcagaagggcgagggaacctaatgttttcacaacggaatgatccttattgtgatttgcttcattttagtatgacaaaagtataaaataaatggtttatgtgcaaatatttttaaaataaaatttttatatttgggaaagttaaaacaaatatatcatgaaaaagattttaggtctggatttgggttcgaacagtatagggtgggcattggtaaatgaagctgaaaatagtgatgaggcatcatcgatcattaagttgggtgtgcgagtgaatcctttgactgtcgatgaaatgcaaaattttgagaaagggaaaagtattactactaatgcggacaggactcttaaaagaagtatgcgccgtaatttgcagcggtataaattgcggcgcgatgcattaataaagcttttaaaaaaagttgggtttataacggatggtactattctttcggagcaaggaaacagaacgacatttgagacttatcgtttaagggcgaaagctcccgatgaagaaatctctttacaggaacttgcacgtgtgttgttgatgatcaacaaaaaaaggggatataaaagcagtcgaaaaataaaagaaaaagagaccggaactttgattgacggaatggaggttgctaaaaaattgtatgatgaggatttaactcccgggcaactttgtctacagctactcgaatcgggtaaaaagtctttgcctgatttttatagttccgatttgcaggaagagtttgatagaatatggaacttccaaaaacagtttaacccgaaagccttttgtgataccgccaaagaagaaatcaaaggaaagaataaaagccagacatgggctattctggcgaaatactttatttggacggatgaaatggttgtttggaatgaaaaagagtccaaaacagaacgtgtggaaaaagaatgtaaacttgtcggtcttaaacggactgtcaaaaaggaggaacaaagaaaagagaactatcgttggcgtgtacaagctcttacggagcagctcgacttggaaaaagttgcagtggtgttgcaggaaattaatggacaaataagtacttcaagcggttatttaggagcaattagcgaccggagcaaggtcctttattttaatcgtcagacggtaggtcaatatcaaatggctgaactggaaaagaatcccaatacaagtctgcgtaacatggtgttctaccggcaggattatttggatgagtttgataaaatttgggaaaagcaggcggaattccataaggagttgaccgtggagctgaaaaaagaaattcgtgatattattatcttttaccaaagacgcttgaaaagccaaaaaggtttgatcggtttttgtgaatttgaaaaccgagaaattatggtggagaaaaatggcaagatgcaagctaaggtggtgggatgtaaagccatacctcgttcacatccgttgtttcaagaattcaaaatatggcagacattgaataatgtagaagtatttgccggtgaaaaaaagtgtaagcgaaagagaacggatgctttccccggattgtttgacggtacggaggatactttgatggtagaaggatggcgatatttatatcaagaagaaaaagagatattggctaaggaactctccgtaaaaaagagccttaaaaaagaatgtattttaaaacttctgttcgacaatcctcaggatttggatatgaatttcgaacagatagaaggaaatgatacggggaatgtcctcttttcggcatacagcaaaatgatcgaaaagtatggctatgaaccgttggattttggaaaaccgacagatgagataatagaacggttgcaagatatctttaccgatctgggatggaatacagatttgcttttcgtagatttgaataaagagggtaaagatttggagaagcagccttatttcaagctttggcatttattatattcatttgagggagacaatacaccgaccggaaacggaaagttggttgaaaagcttatggagctttgccatgtgggcaaagagtgtgccttagaacttgtgaatatttcattccaaaacgattatggaagcctgagtgctaaagctattaaaaagattttgccttatttgaaagaaggcaaccgatatgatgtggcatgtggatatgcaggctatcgccattccaaatcttctctgattaaagaagagatagaaaataaagtattgaaagataaactggatattcttcctaaaaacagcttgcgtaatccggtagttgaaaagattttgaatcaaatggtgaatgtgattaacgcaatcattgacacttatggaaaacctgatgaaattcgagtagaattagcgcgtgaattgaagaaaagtgctaaggaacgggaagaactgactaaagctattgcaaaaagtacccgtgaacatgaagaaatacgtaaagtcttgcaggaagaattcggcatgataaatgtgagccgtaatgacattattcgctataaactttatgaggaattgaaggataacgaatataaaacgttgtattccaatcagtatatacccaaagaaaaagtgttcagtaaagagatagatatagaacacattattccgcaagctcggcttttcgatgattcattgtcgaataagacattggagtataaagcgattaacattgagaaaggaaataaaacagcttatgacttcgtaaaggagaaatatggagaaaaaggcttgcaacaatatcttaatcgttgcgaaagtttgtttaaaggtcatagaacaaaactccggaaattgaaaatggagcaggaaaatattccggaaggatttattgatcgggatttgagaaacacacaatatatagctaaaaaggctctcgctatgctgaatgagatttgtcgcagagtagtagctaccaccggttctataacagatagattgcgagaggattggcagcttgtggatgtattgaaagaattgaacttgcctaaatatgagactttgggtttggtagaagtgtatgaagataaggatggacgaaaaattaaaagaataaaggactggacaaaaagaaatgatcatcggcatcatgccatggatgctttaaccgtagcttttaccaaagatgcgtttattcaatactttaacaacaaaaatgcggcatggcaggttgactgcaaagagcactccgatataataggtataaagactcgttattttgagaatggaagggctttgcctcctatgccgttagtgcggtttcgtgcagaagcgaaaagtcatttggaaactttgttggtatctattaaggctaaaaataaagtagttactaataatgtgaattgtacaaaaagaaagggcggagaaaataagaagttacaacaaaccccgcgaggacaattgcatttagagactatctacggtagccatagacaatatgttacgaaagaggaaaaagtgaatgcttcttttgactcctctaaaattgcgacagtgtgcaaacaggcttatcggaatgctttgcttgaacggttggcggcttttggtaacgatcccaagaaagcgtttaccggtaaaaactcgttggaaaaaaatccggtttaccttgatagggaacaaacggcacgagtaccggagagagtacgaacggttgagttggaaactgtttataccatacgtaaacctgtcgatccgaatttaagtgtagacaaggtggttgatgcaaaagttcgttctattttggagcaacgtttgagagaatatgatggagaagccaagagagcatttgttaacttagatgagaatcctatatggctgaatgaggagaaaggaatagctatcaagcgagtgactattcgaggtattaataaagtgcaatcattgcatggtaagaaagataaaaacggaaatctgattttagatgaaacaggaaagaaaatccctgtggattttgtgaatacaggcaataatcatcacgtggctatttatcgaaaacctgttttagataagacaggacaagagatgcttgatgctgaaggtaatcctgtgtatgaacttgacgaagtcgtggtttctttctttgaagctgtcacacgggtgaatttaggtttgcccgtcatagataagaattataacaaaagtgagggctggcagtttatgtttacgatgaaacagaacgagtattttgtgttccctaatgagaaaaccggattcgacccgaaagaagtggatttgttgaatccggaaaattatgcggtgatcagtcctaatttatttagagtacagaagatttcgacaaaaaattatatgtttagacatcatctggaaactactgtcattgataataaacctttaagaaaaattacatgggagcttattcaaacgcctaataagttggatggtatagttaaagtccgagtaaatcatatagggcagattgtctcagtaggagaatattaaaaatagattatttatgaggaattccttagggcctgtctcaattttgcttgggttgggtttgagagtgcttttcgaggatgtttttctgattttatgaggaggatagcgggatatctgacgagtgaaaacggggaagaagaccggaagaaaacacaaaaataacctgatagtatttttattggaaagtttagacagctcttagaaacttaatgactaaaatctgtatattatgattaagaaaacactttattttggaaaccctgcttatctgtcactaagaaatgcccaattaataataagattgccggaagttgttgataatgacactctccctgaatattttcaacaagtatcagaagtgtccaaaccgatagaggatatcggtgttatagtgttggatcataaacagataactatcacttcaggggtattggaggcattccttgaaaataattgtgctgttctgacatgtgacagtaaaagtatgccggtaggtttattacttcctctacatggaaatactacacagaacgagaggtttaggcagcagttggatgcttctctgccattgtcgaaacaactttggcagcagacggtaaaagctaagatagagaatcaggcagctgtgttaaaagagtgtaccggagaagagataaagtgtatgagagtgtgggcggccaatgtgagaagtggagatccggataatcaagaagctcgtgctgcagcttattattggaaaaacttgtttcggatagaaggctttacaagagacagggacggtattccgcctaataatttattgaattatggttacgctattttacgtgctgttgttgctcgtgggttggtggcaagtgggcttttacctactttgggaatacatcaccacaaccgctataatgcttattgcttggcagatgatattatggagccatatcgtccctatgtagatcggttagtttatgacatggttaaacaaggagcaaattatgctgagttgacaaaagatttgaaagtccggttactgactattcctacattggaaaccactattgccggaaaacgaagtccgttaatggtagcagtcggacaaactacggcatctttgtataagtgctttagtggagaattgcgtaaaatatcttatccggaaatttgatggaccgatttagtgaatatcgtgttatgtgggtacttgtactatttgatttgcctactgagacgaaaaaggataaaaaggcatatacagattttaggaagaatctgcaaaaagacggttttacaatgtttcagttttccatttatattcgtcattgcgccagtagcgaaaatgcagaagtacatataaaaagagttaaatcttttctcccggagcatgggaatgtaggaattatgtgtattacagataagcaattcggaaatattgagcttttctatggtaagaaaacaatgtcggtgaatactccgggtcaacaattggaactgttctaaaaagaaaaatcctgccattgtgcaggatttttcataggaaataacatcaatttttttattctgatttgttttgtaagtcattaattaataaaatcttacaaagatcgtgatgtttccgatacttcaaagatactaaaatgaaagcaaatcacaacaccccaggtgtttatgagcagtatggtcaatgatgtttccgatacttcaaagatactaaaatgaaagcaaatcacaactaagtcttatttcaggcgaatagttggttgatgtttccgatacttcaaagatactaaaatgaaagcaaatcacaacgttataatcgtcctctgacatcgcattttcgatgtttccgatacttcaaagatactaaaatgaaagcaaatcacaaccatatttgagcttgtaacatttgcctttttgatgtttccgatacttcaaagatactaaaatgaaagcaaatcacaactataattgatcactcgtaaatctcacactgatgtttccgatacttcaaagatactaaaatgaaagcaaatcacaactataattgatcactcgtaaatctcacactgatgtttccgatacttcaaagatactaaaatgaaagcaaatcacaacaaaacgcaagggctcgaaagcaaagagaaagatgtttccgatacttcaaagatactaaaatgaaagcaaatcacaacaaggtaggctttttagctattgtttccgtggatgtttccgatacttcaaagatactaaaatgaaagcaaatcacaactgcaaagacctattttgattacgaaaaatgatgtttccgatacttcaaagatactaaaatgaaagcaaatcacaaccctatatgtaaagggcgagctttataagtgatgtttccgatacttcaaagatactaaaatgaaagcaaatcacaactacgtattcgttcgtacgtgtgaaaatactgatgtttccgatacttcaaagatactaaaatgaaagcaaatcacaacctgtccgggattctgtctggacttctgtctgatgtttccgatacttcaaagatactaaaatgaaagcaaatcacaacgaatacgccgttaatattatattttggcagatgtttccgatacttcaaagatactaaaatgaaagcaaatcacaactaaaatctttaagttgatttctcttatcttgatgtttctgatacttcaaagatactaaaatgaaagcaaatcacaacgaacttttcaaagcctgttttgtaacgtatgatgtttctgatacttcaaagatactaaaatgaaagcaaatcacaacatattggaggaacttagtttaaatgactcggatgtttctgatacttcaaagatactaaaatgaaagcaaatcacaactcacgttggcaatttcgttcagcttgtgaagatgtttctgatacttcaaagatactaaaatgaaagcaaatcacaaccagatgaatcaggcagaattagataaagcagatgtttctgatacttcaaagatactaaaatgaaagcaaattacaactctttgtctcttttgtaatgctctttttcttcattgatatatttatctgtatagtttaacaatctgtttaaatattccccttcataaatagcaaaacttaaacctaatgccggaatcattatattagtaaacttttttataaaaaatcggaatgtcttataactgaaaaacgggcatatcgctataaataagacaatcaaaaaaaaatatcctataataaatatcgctaaaagaatcattaatgtattcatactttaagttttttataatatcctcggcaaagtctttgtccaaattaaagtacctgtattatatcgtcttattcccgtcataaatgcacaacagatgtttccgatacttcaaagatactaaaatgaatacaaaattctgtataaaggattaataaattgagaatgtaagattatataataaatgttgatcatactcatttctataaaagtagagaaaagtgctattatgatattaatatagatgtagttagactgaagagatcacagtgtaaagaagaatatttgataagttgtaggaataatagattttatttttcccctcaaatataaattaggctgtaatattttgtattacagcctaactgatattgtaagattaaagggggttagtcctcgatagcagcctgggcggcagcgacccgtgcgataggtacacgataaggactgcaactcacgtaattcatgttgagagaggcacagaacttgacagatgatggttctccgccgtgttcaccgcaaataccgactttcagtttcggtttggtagcacgacctttttctgttcccatacgtaccaattgtcctacaccttgttgatcgaggatggcaaacggatcgttttttaatattcctttttcttgatatattttcaggaacttaccggcatcatctcgagaaaatccaaatgtcatttgggtcaagtcatttgttccgaaagagaagaaatcggctacttccgctattttatcggcagttaatgcggcgcggggaacttcgatcattgttcctactttatattcgatttgatcgttgcgttccgagaacactttttctgcagtttgatgaatgatagcagcctgcattttcaattcttcgactatgcctaccagaggaaccatgatttcaggaatcacttttgctcctttggcttttgcatcgagtgcagcctcgataatggcacgagcttgcatctcggtaatttcaggatatgtacatcccaatcggcagccacgatgtcctaacatagggttgaattcttccagagaatcacatgcaagttttacttcttctatagaaagtcccatctctgcggccagttctttttgtgtagctaactggtgaggtacgaattcgtgcaaaggaggatcgagaagacgtatcgttactccgaaaccgtccattgccataaagataccttcgaagtcctgacgctgcataggaagcagtttcttcaaagcttctctgcggccttcttcatctttagaaagaatcatttctcgcatggctttaattcgatcaccttcgaagaacatgtgttctgtacggcaaagtccgataccttttgctccgaatttacgtgcaacagtagcatccttaggcgtatcggcattggttcttacatccattttggtgtatttttccgccaactccataatttttgcaaaatctccgcttaaatcggcatcaacggtgtttacctgtccgtcataaacttctccggtcgatccgttcagagaaatccaatctccttctttataaatgtgaccgcccatttccaaagtgcgggctttataatctacttttatttctccagctcccgatacacagcatttccccatgccacgagctactacggctgcgtgagacgtcatacctcctcgagctgtcagaataccttgagctacgttcattccgcgtaagtcttccggagacgtttcgatccgtaccaaaattacttttttccttttttccgcccattcttcagcatcatctgcaaaaaatacgatcattccggttgccgcacccggagatgcaggaagtcctttggctactactttagcctctttcatcgcttttttatcgaataccggatgtaataattcgtccagtttttgcggttccattcttttgagtacggttttctcgtcgatgacaccttcccgaagcatatccatggcgatttttaccatagcagctccggtacgttttccgttacgggtttgcaataaccataacttaccgtcttgaatcgtaaattcaagatcctgcatgtctttgaaatagtcttcgagtttctgttgtgtttcgatcaggtctttagcacaagcaggcatcgcttcttccagtgaaggatatttgcttgcacgttcttcttccgatataccttgcaatgcagcccatctgcgagatccttcgatcgtgatttgttgcggagttctgattccggcaaccacgtcttctccttgtgcgttgatcagatattcaccgttaaatatatcttctccggtagcggcatctctcgtaaatgcaactccggtagcagaagtttcacccatatttccgaataccattgcctgtacgtttacggcagttccccattcttcggggatttggttcatgcgacgataatagatagcccgttcgttcatccaactatcgaatacggcacaaatagctccccatagttgttcccatggagaatccggaaaatcttttcctgtgcgttcctttacagcagctttgaacttctttactaagagtttgaggtcttcgacttccagctcggtgtcgttttttacccctttttgttttttaacttcgtccattacctcttcgaacggatcgatatcttctttacttttgggtttcattcccaatacgacatctccgtacatttgaacgaaacggcggtaagagtcccatgcaaaacgagggtttcccgatttttttgcaataccttctaccgcttcatctgtcagtcctaaatttaataccgtatccatcatacccggcatagagactcttgctccggaacgaacggaaactaataagggattttttgcatcaccgaattttgttcccatcagattctctacatgggccatcgctttttctacatcagccttaattaattttacaactgcatctttcccttctttattataggctgtacaaacttcagttgtgatcgtgaaaccgggaggtacaggaactccgatcagattcatttcagcaagattggcaccttttcctcccaacagattcttcatgtcagaacggccttctgctttgccgttcccgaaagtataaacactcttcatagtataaataaaattattaatatgtctttgttcttaaaataaatgtaacaaagggttaactctttacaaaaatatgagttatgattaaatatgcaaaaattctgagaataattttgacctgtcattgatttttggaatatccgtatagattgtttaagaaatatgcttaactttgaccaaatttgtttttgttttaaaagtactattttggcacgtaaaaagaaagagcttcctgttatagaacaggtcgaaattacagatgtggctgctgaaggcaaggcgatagctcggattgacgatttagtcgtttttgttccgtttgccgctcccggagatattgtcgatttgcaattatatagaaaaaaacatcgttatgctgaagggcggatattgaagtatcataagtattccgaaatgcgtgttgagccattttgttcgcattttggtgtatgtggaggatgcaagtggcagcatatcccgtatgaaaaacaaatagcatataaacaacagcaggtttttgataacctttctcgaatcggaaaaatcgatttaccggaaatttctgcgataaaaggctcggagaagactcgtttttaccgtaataagctggaatttactttttcgaataagtcttggcttactcaagaagaattgcagtctacacaaacttttgattctcggaatgctttaggattccatattcccggaatgttcgacaaggtactggatataaaaacttgctggctgcaggataatatctctaatgacattcggttggctattcgaaaattcgctcttgatcatgattattctttttttgatctgagagagcagcggggattgatgcgtaatatcataattcgtacggcatcaaccggtgaggttatgttgatcgtcgttttttttgaaaatgataggtctaagattgacgctatgatggaatatcttgcggagacctttcctcaaattacttctttattgtatataataaaccagaaagctaatgatacgattaccgaccaagaggttcatgtgttcaaaggtcgggattatatattggagtcgatggagggattacaattcaaaataggacctaaatctttttatcagaccaattctgaacaggcgtatgagttatataaaatagctcgagattttgctgggcttaccggagaagaacttgtttatgacttatatacgggaactgggactattgcaaactttgtggcctgccgtgcccgaaaagtgataggaatagagtatgttccggaagcgattgaagatgcaaaggtaaattctgaattgaatggcatcagtaatacattgttttatgccggagatatgaaggatattcttacacaggattttataaatgaacatggccgacctgacgttattattaccgatcctccgagagccgggatgcatgatgatgtcataaagaccattttgtttgccgaacctgtaaaaatcgtttatgtcagttgtaatcctgcaactcaggcgcgggatctgaatctgttggatgaaaaatatcgtgtcgaaaaagttcagccggtagatatgtttccacatactcatcatgtagaaaatgtagtattgttggtaaaaaaataaagggggagataacgttatctctcgtattcggaataaataaggaaaatggaaagctcagggggactttttgctttccgtttctttttgtgtattgatacttgaaaaataatttaaaataagaagatggaaaaggaaagaactttaagagattctgttctcgtgcgttggtctgcgttgggaattgtcgctttcaccatgatggcggcatattttgtaaacgacattatggctccgctgaaaactatgttagaagctaatttagattggaccagtcgtgattttggattctttacgggagcatatagctttttgaacgtatttttgttgatgttgatttggggcggcttgatgcttgaccgtttcggaatacgattgacaggaaaaattgctgcgattttgatggtgttcggtacggctttgcagtattatggcatgacagcgaatatttcgacagaagcaacgtttttcggttacaagcaaggtgtttttatggcggcagccggttattctatttttggagtcggagcagaagtcgcagggattaccgttactaaaattattgcaaagtggtttaaagggaaagagctcggtactgcgatgggaattcaagtagcattggctcgtataggttctcaagtcgcttattcggtatctattcctttggcaaagagtttttctatatcgactccggtacttttaggtttggttttgttagttgtcggattggtgacgttttttatatatgctgtgatggatcgaaagcttgataagcaagaagattatgcagaagaggaagacgagagtaagttcagtttcaaagatgtaaaaaatattttgattaatccgggtttctggttgatcgctttattatgcgtattattctattcctgtgtattcccgttccagaaatttgcttccgaacttatgatcaataaatacggaatcagtgataatttggcaggtacaattgccggcctgccggctttgggagcattaattctcactcctgtattcggtatttatctcgattgcaaaggaaaaggtgcgagtattatgatgttgggggctgcaatgcttatcggagttcactgtatctacgcgttacctttcatcaccaattatctcgtggcgataatcctgatgattattttaggtattgcattttcccttgttccgtcagcgatgtggccgagcgttactaagattttccctgcccgtcagttgggaacagcgtatgcacttatcttttttattcagaatataggtttgtggggagtacctaaccttatcggatgggtattggataattattgtgttgtcgggaatgaaaataatgcaaatctttatgattatacgatacctatgtttgtctttaccggttttgccactttatcgtttattgttgcctatttgctgaaagttgcagataaaaaatacggctatgggttggagaagccgaatatgaaagactgctaaaagtcggaacagtattgttgtttatctgtctataaggaaatatgaaagtacgaggtaatcggaattttaagtgatgcttataagttagacgagttaaatattatccgattatagaaaaggttcaaaatgatctgcaccccaaaagtttttgtctaacttttggggtgcaaatcattttaaccggttacctgtatttttatatcttattttttgagatcaaactaaaggaagtggctgtaaaccttgcattaatttttttattagaaaaatacaccgataccgattttaaatccgtattcattcctttggtcggtgaaactgtatttccaataaacgtctggttctattgcgacattttgagatacgaatatcgaatatcccaaatcagctccgaaataaaaataatctctttttcgggtaatattcgaactgtattctctaagccataccttgtcgtaccccaattctgccgacaaatataatttcgaaaaaagataatatcgcaatcccgtgtttaagtttatgcta

SEQ ID NO: 2126 - DNA, 24296 bp, synthetic construct
  variation 17468..18673: note = n is a, c, g, or t
  source 1..24296: mol_type = other DNA
  misc_feature 1..24296: note = Synthetic
atcataagtatgcaaatatcccgtaaaatgttcaccggtatcgttcgtgatcagaattttagaaaaaccggtatcaataaatcttttgcgaatggtttcaatgctatcggtttcggatacaaactcaaattcattacgtggcgtcatgatttcttttacttttacctttggaaacgacaaggcgttttttaaaatttcaaactcgttttctaactgttcttgttggttgcttgactgaatttgctgtgaaatgtatgtgcctaaatcgccggtgctaagcaggttaaattcggtatctttggcatgaggatattttttatataacgatttttcggttatcgagataaaaaattgtgcaatattgccgaacaatttcagtataacttgaataaaaggttttgctgccagaatgatttcattggcaaaaggcttaacgaaggtttgagggataaattttgagataatgtatagagcaatcaggaaaacggctattttccacaaatcatctgtttcgtatgaatgtaaaaaagtagtaaaaaacagtaaacttaatacggtaataaaaatgctgttacccacttttaatgaaccgataaataagcgaggctgttcggtaactgtttttagataatggtttttgtcttcgttttttttagattctaaattcaggtaaattttatttgcattagaatacgcaatcattaaccctgaacagatcagtacacaaatgctgaaaaatatgaatccaaaggtgatcatttattgtttgttttgcggaaaacgtttaatgcttctcaacctaaagataaacataaagattgctgctgctgctaacaataaatttattagataatcttcattgtttgtataagctgcgtaagcctggtaaataaaaaataaaccaaatactaaataaaaataggctataattttataaattttcattgttcacttcttttaattcggcacgattttgctgtgcatttacaattttaaaattttgatcgaaatctactccgattccatcaaaaaaacttttgtttttatcggtcaccttaaaataatgttcagtaaaaaaccagctgtttttttgatcgtaatacatttggttggtctctaatactttaccgtcgtgtgatgtaattttaacatcaccaatcaaatgaataattccggttttgttgtaaacagttgcttgattggcaactatgtaatttttatttttgttgctgtcgtaaacagttactttaactcctttgggaaaatggttaaacggatattttgccttgccgtaatctaacatcttaaccgcgtacatttcagcttttatttttgcagaatcggtgtactttacgttaatagaatcggcttcgccggaggcaaataattgttttttacttaagttctgaatgtcttttaattcgttgttgcaagcagtcagaacaaatgttaaaacagtaatatgagcaaaatatcgtttcaattaattaaattttctgcgtttaaaccaaacatcgctgaaagaaaaacctacgttaatgccgtaatagttttctttaatcaatcccatattggtattacctctttgaccgtattcaaaaccaatgttgacgttagaattactcatcattgttctgctaaaaggtacaggtaagccgatgccgatatttgcatttaaacctttaatttcttcattatttatcactaaaccggtgttttcgtaattgacacctgcacggtaagtaattttttcaaaataagaggctatagaattatatttgggtatgtaaaaaccacctacgccaattttcatataatcgttgtaatgagcgttgtcatacttataaaacgagttgtattttgatgtttgtgttgatgtatattctgcaccaacaaaccatttaaaacgattgccaatacccacgccaattgaatagttcattggcaataacatcttttcgttttcagcaatttcgttagacgaatcaatctcatcaagactgccgctgctgtttaattttaccgtatttcttattttttcctgatcgttttttaacttcatttcagggctaaaagtagcacttgcgaacaacgttagattcttgtttaacggttgttcgtaatttaaaccagcattaacggtaagcccgctgtaattattaagatatttgtaacgtgtacctcggtctaatgccacaccttcgccgttatcggtgataaatttggtaaggctggtttcggtatcgccaaagatataagcaccatcaacaccaatactgaaatttttgttgattttataacccaaccccaaaaaagttctgtttaaaccaccttcacctatatattggcgggcttcagtcattcctttatcgttaatgcttgtattctgtatattgtatcctacaaaagaataaggcatgattcctgcaactaccgtaagatcgccggcagggaaagctaaagacaaataatcaaatgagccacttgtggttttttcttttccgttttggttttccagattgttccctttgtaagacgcacccattgaaaaagtagtggtttgcaacttggcatacgacgcagggtttagtgtgttaatgtgtaaactatcactgaaaaccgccaaagcacccattgattttatttcgtttgagcctttaaagtgtttgtcaccaaaaccataataagaatatggagaagcagtaccttgttgtgcaaaactgtttgaaatacttgccaaagcggctgccaatattatttttttaatcatttgatacgatgtgttgatgtaacaaaaataaactttctaataaaaagtttggattggcaaagatgctattttttaaacggtttaccaaaaattcagaatttccgcctgttaaaattactgttaaattctcatcttgatgtttaaaatgatcaataaaagcttcaatctcagcaataacaccgtttaaaacccccgattgaatagatgccgaagtggaatttccaacaaaagaatgcagctctgaaattttttctaaaggcagatttgcagtataatcgtgcaagcttttataacgtaacccaattcccggagaaatagctccgccgtggtattgatcctgattattgataaaatcataagtaagacaagtgcctgcgtcgatgatcaacctgttttggttgggatatttcaaagtggcaccggctgctaaaacaattctgtcgatacctaaagtggcaggggtggcatataaatttttaaaaggaataggagattcgtgtgttacaataattaaattacctagttttttgaggttttcaataacttcagaaggtaaatttccaacagaagaaaggataatatcaacacaattttctattccctgaatttgtttggatatattttttattaatttttcgttgttggtaatcaccaattgttgtaatgtaccgttttcatatacagcgactttggttctggtgttaccaacatcaatacaaataatcataatttatcgggcatataagaacaaagatagttaaatttttttttgaaaaagttaggaaaagtttaaaaaaagcttctatatttgcaatcgcttttgagaggttgtttatctcgcaaaacggtaccttagctcagttggtagagcaacggactgaaaatccgtgtgtccctggttcgattcctggaggtaccacaaaaactgtttcaatctttgagacggtttttttttgtaatatgtcttactttttactaaacggggcggtcttttcatcacaatctttttgcttatacctaacaaaaaggattttttttggtttcaaaatatagcagaacttgctaaaagtaatcccttttataaatggctgttaaatgtaaaattactgttctaaaaaatagaagataatttggatattaatgttatttattcagtaatcaatttttttattacatttacagtataagtaactgaaaaatattgttttatgaagaaaataattactttttttgttttttgctttacttctataatgttttgccaagcgcaatacctggataccaattttggaaatcaaggaagtgtttcagaaatttttacaggaaaacaatcacgtccagaagagattatttatcttgatgatggtaagtttctcatattatcgttcagatatgatttttttgctggaatgtggtctaattttgatttttatctttcaagatatcatgctaacggaaaaattgatacatcgtttggaacaaatggttttttggtttattcatctccaagtacttcccaaagagctccgcttctaaatatgtttaaattgaacgatggtaaaattatggtgcattgttatcatgacaatagtaccagattaatacgattttcaagtataggtgtaattgatagtagttttggaacaaatggtgaggtaaatctttcaacaggtgagtattataaaatagttcaaacagcgaacaataagtttcttttgttaggacagtattatgatggttataacaatatgtatcaatttgcccgattaaatacaaatggtacttttgatacaacttttggtacaaatggtacaaaaatagttgaccctacagcataccgatttgatttaatatccgatatagcatatactaccgatgataaaataattactattggtatgtcatatgacagttcaacaacaactaaaggggttattgcacgatttacttcattaggagttttagatacgagttttggaacaaacggtttggtaacattagatgtgaatacaccaggaaataatgcgcttttaaaaaatgttgcgatacagcaaaataatgggacaattgtaatttgtggtgatgcaatgtcacctggtggtacaggtggtttttatggggcacaaccttttttagcaaagataaataagaacggaacaatggtgaaacagtttggaacaaatggtataaaatattataatacaatttttcaggcaaacgattcttttacaggtataaatttccataacaataccattttaatatcgggtacggcatcaaagccttttccatatatgcaaaccttttattacttacggttggttaataatgatggcagtgatgtgattgattttggtaataatggtattatgttattaaatttaggcacaacaactcctgatgttgtaaatcatttcaataaaacgcttattgtagataatcaaatttatggtttaggaatgagtacttacataaaaggattagattatgctactacattttttaaactaaaaaagggaactttaagtaacaacgagcaattagctcaacaatttaatatgtaccctaatcctgcaaccaatatagttaacataactaatagtgaaaatttaatggttaaaaaagttattgtttacgatatagcaggtaaacaattgagtactcatatatttaacaatgaaccaaacatacaactaaacatagaaaatttagcaagtggcaactatttgttgcatttgcataccagccaaggtgttgcggttaaaaagttgattaaattgtaatatttcagatcgaaaaagaaatgaattttctttgttttaagttgtttcaagttcgtaatttattaactgtgaaattgttttaaattatgatttatctaagttaaaagaaaattacttagaagctatagtttgataaaacaaaaaatcggttatgaaaccgatttttttgatttattcaacaccactgaaagtgcaatataaaaagcaataattaccggaatagcttcaaatctaaaaaataagagcaacaatgcacaaatacctaaaaatagtagagttattttgttatcacttaaatttttattttttgtttttaatgaaaacaacgggatttcagcattcataataaatgcactgaaaaggcttataaataccaatacataggggttactgaaaatagtgaatatcaaatcacttgacgtagtgttggttatcattggaatgcttaaaataaataatgcattggcaggtgtgggcaaaccaataaaactatccgtttgacgggtgtctatattaaatcttgccaagcgcatacaagatcccaaggtaatgataaaaccaataaacggaaccagtttcatataaaaagtttcatcggtaacagcatattgatcgtagttttcctgaatatgtgccagcatttgatacatagccacaccaggaaccacacccgatgttaccatatctgccaaagaatctaactgaacacccaacggactggatacttttaaaacgcgagctgcaaatccgtcccaaaaatctaagaaaattcccatacaaacccacaaaaaagccatttgcaggttatcgtcaaaagcgtaaaccaatgcaattaatcccgataataaatttaaaagagtaattgcattaggaaggtgtttttttattgtcatcaattttatatttttattgtaaaaacaaaagtaaacaataagttgtaagtatttagagttcatatattataaaattttataatctttgtaaaaaataattacgtgaaaaaacgtttatatatattgtcgctgttattatgtactgctttaatgcaggcacaaacagcaagaaaatattccaatgaatttttaaacattggggtagatgccgctgcgtttggtatggcaaacagtgttattgcacaaacaggcgatgtgaattcgggttattggaatccggcgggattggttcatttgcaggataagcaaatcagtttaatgcacgcaagttattttgccaatatcgcacaatatgattatgcagcttttgcaatgccgattgatgaaaaaagtgcattggcaatttcagccattcgttttggggtagatgatattatgaataccaccgaattgattgatcaaaacggaaatatcgattacaatagaatttcgttattttctactgccgattatgcttttaatatttcctatgcacgtaaattatctgtcgaaggattgtcgttaggagccaatgctaaaattgtccgcagggtaattggcgattttgcaaaatcgtggggatttggattagatgttggtttacaatatcataccgaaaattggaagtttggattaatggcacgcgatataaccacaacctataacgtttggaatattaacgaagccgaatacgaaaaaataaaagatgccgtagaaggacaaaatcaaacagtgcctgaaaccaccgagcttacgttgccaaaattgcaattaggtgtagcacgtgattttgcattgaccgagaaatttaatctgacagcagcagccgttttacataccgaattttacgaaaccaatgctgttatttcaacatcagcgttcagcattcaaccatcggcaggttttgagtttggatacaacaaaatggtgttcgtacgtgccggagttgggaactttcaaaacgaattgcaaattgacgatactaaaaagaccacttttcagccaaatgttggtttaggattcaagtacaaaggtattcaggtagattacgccttaaccgatattggagacaacagtgccgctctttactcaaacattttttcattaaaacttgatttaggaatttttacaaaatcaaatgaataatagtatcctaaaaatgaaacagcaaatcatgttaatggtttgttgtttttcttttttatcttcttttgcacagccacaaatactgacagaaaatgccgagataagtgttttaacgtgtggaactgctaatgaaatgtacactctttttggtcacacggctttgcgggttaaagacaacgatcaaaatttagatgtggtgtacaattggggaatgtttaattttaaaacgcccagttttttacctaaattcataaaaggcgatctgctttattatttagatgttgatcgttttgatgattttttatatgcttacaccaatgataaccgggaagtttttgaacaacaattgaatttatcgtatgatcaaaaattaaaagtatggaatgaaatcaaccgtcagttaaaaagtaatgaacgcttttatacgtatggatttatcagaaacaattgtaccacaaaggttgtcgatgttataaataaggtgatcgataaaccattgacagttgattttccgtcaaacaatcattcgtataggtatattttgaacgatggattagaaaatcattattttgaaaaattgggcatcaatttattgtttagctatccaaccaacaaaaaagctgatttaatatttctacctttaaaatttaaagatggaattgcatttaataaatcgattttaaaatcagaaaaaaaactaaatacggttaacgaaaaagaagaaaaattcagttttaattccatttataccttatggattatagtgattatttttgcattaggaattttaaatgataaagcccggttgttgtattttggattcacagcaatctttggtttgttcttgttagcagtaagtctttataccaatcatgccgaattacatctcaacgtactgacattgttttacaatccattgtttttagtggcattattgctgaaaaataaaaaagtgttaattgccgccgctgtattaacagccattggtttgatttttatggggatagagttaatgatggttgctgtaccattgatcgttctgcatattttatatgtattggcattgtttttgaataaagcagcgttgaagtaaaaacttagaaaataataaaatgtttggtttttttaaaaagaaaaaaatacttgaagatataattccagatggtttggtagatatccattctcatattttatatgggttagatgacggtgcaaagtcgctaaaagaaacccaagatttaattagtgatttaaaatcgtttggttttagtaaatttatagctacaccacataccacgccgttggtttgggataacaccaaagaaggtattttaaatcaatatgaaaaagtaaaaaacgaattgggtttcacggataaaaacctgcgggtagcatcagagtatttaatggacgattcatttttaaaacgtcttgaaacagagaaactcttaacacttaaagatcattttgtattggtagaaatgtcttatttaaatccgccgattaatctgtatgaaattattttagagttgaattcacaaggatataaaccggttttagctcatcctgagcgttacaacttttataaaaatgattatgaaagctttaaaagattaaaaaaggcaggctgtttgtttcaaatgaatttattgagcagtgtagggtattacggcagcagcgttacagaaattgctgattatcttttaaaagaaaaaatgtacgattttgtgggtagcgatgttcaccaccaaaagcacatacaggctttttctgctgaaatcaggttaaaacacatcaatgaatttgaatacgtgatagaaaaaaataattttttcgcttaaattcaaaggaggttttcttagtataaggaaacctctaattttttacttctaaaatacaaaagcaacttactcaccttaaatgatttcgcttacaattttattcattgatacagtgagatctataaataaaaacgaggcaaactttcaaatgccccgtagtaaatgttttcacaacggaataatccttattgtgaattgctttcagatttatgatgcaataataagaatattttttaatatataaaaatataagtgttaatatttttttatattagtggttcttataaaaatataataatatgaaaaaaatacttggattagatttgggaacggatagtactttattgagaaaaaaagaccgctcagtaatagagcgatctaataaagcaattcacaatactataatctcaaaatgacaaagattatagttgtttacaaaaatatagaataaatatagattatagtgagtttttttaaattttaattttgttatatttgcttgagtattaaacgctaatacttacccttatgaaaactaataatattctcggattagatttaggtgtaacctccataggctttgctcacgttacagaaagtgataactctaatgaatcagaaataaaacaaattggagttcggataaattcgttaactgttgatgaacagacaaattttgaaaaaggaagacctttttccattaatgctgacagaacattaaaaagaggggcaagaagaaaccttgaccgttaccaggacagaagaaaaaatctgattgaagttttgacgaattcaggattgataaattcagaaaacaaattgaccgaaaacggaaaaaatacaactcattccacttggtgtttacgttcaaaagccgttacagaacgaattgaaaaagaagaatttgcaagagttctattggcaatcaacaaaaaaagaggatataaaagtagtcgaaaagcaaaaaacgaagaggaaggacaagctattgacggaatggctattgctaaaagattatatgaagaaaacctaacgccgggacagttagcttatgaattattgaaagaggggaaaaagtccattcctgatttttatcgttccgatttacaggctgaatttgacaaggtttgggattttcaaaagcaattttatcctgaaattcttacagacgagttttataaagaattgcaaggaaaaggacaacgtgctacatcagctattttttatacaaaatatggtttcaatacagctgaaaacaaagggaacagagatgaaaagaaaatccaagcctataaatggagaagtgaggctgtttctcaaaaattagaaaaagaagaagtagcttacgtaattaccgaaatcaacaacaatttaaacaactcaagtggttatttgggagctatttctgacagaagtaaggaattgtatttcaataaacaaacggttggtcagtatttgtacgaacagctaaaaaacaaccgacatacacgattaaaaaatcaggttttttaccgacaggattatttggatgaatttgaaacgatttggaatactcaggctcaatttcattcggagctgactaacgaactcaaagaagaaataagagatattattattttctaccaacgaaaactaaaatcccaaaaaggtttaatcagtttttgtgagcttgaaagtaaagaagttgaaataaacggaaaaaagaaaactatcggattcagagttgctccgaaatcttctcctttgtttcaggaatttaagatttggcaatttttgcataatcttgaacttcaaaacaaaaatgaaaacacaaaaagggaactcgaagaagaagaaaaagagttgctttttgaagaattaaatttaaaaggaaatttatcctcaaaaaaagctcttgaattattacttaaaaaaactcaaggctataattttaagttttttgaaaatctggaaggaaatcggacaaacaaagttttatatgaggcttacttgaaaattattgatattgaaggatataacgtaaaagaaattctaaaagtaaaatcaaataaagatgaggttgaattagatgatttaaaagtttctgcaatcgaaatcaaaaatatggttcgggatatttttgaaaccctcgaaatcaataccgaaatccttgactttaatgcagaattagaaggaaaaaaatttgaaaaacagccatcttatcagttatggcacttgttgtattcgtatgaaggagatgagtcccaaagcggaaacgaaaaactgtatgaactgttagaaaagaaattcggttttaaacgggaacattctcaaattttggctaatataacgctctctgatgactacggaaatctttcaaccaaagctatgcgaaagatttatccgcatattcgagagaataattacagtacggcttgtgagattgtcggttacagacattccaaacattctttaaacaaagaagaattagagaatagaaaattagatgatacgttagaactactgaaaaagaacagtttacgtcagcctgtagttgaaaaaatcctcaatcagatgattaatgtagtgaatacattgattgaaaaaaacagcaaaaaagacgaaaacggaaatataatcgaatatttcaaatttgatgaaatacgaatcgaattagctcgtgaattaaagaaaaatgcagaagaacgtagagaattagactcacaggttagagaaggaaaattgagaaacgaaaaagtttacaaaattcttcaaacagaattcggactgaaaaatcctacacgaaacgacatcattcgttatcgtttgtacgaagaattaaaaagcaacggttacaaagatttatatacaaatgaatatatcccgagagaaattttgtttagtaaacaggttgatattgaacatattattcctcaatctaaattatttgatgatagtttttccaacaaaacggttgttttcagaaaagacaatttggaaaaaggaaatcagaccgcttttgattatatcaaaaataaatatggagaagcaaaactaaatgaattcattacccgagtcgaaagcctatacgaatcaggaaagaagaaaaaagaagaaggaatatcaaaagcaaaatatcaaaaactcttaaaacaagaatccgaaatcggagacggattcatagaaagagatttacgagaaagccagtacattgctaagaaagcaaaggaacttttgtttaaaatcacgaaatcagtagtttctacttcgggaagcattacggacagacttcgtgaagattgggatttggttaatgtaatgaaagagttgaatttaccgaaatacagaagtttaggtttaaccgaaattcaggaaagaaaattcggtaaaaaagtggaagtaatcaaagattggacaaaacgaaacgaccatcgtcatcacgctatggacgctttgaccgttgcttttacaaaacataatcacattcagtatctgaattatctgaatgcccgaaaaaatgaaaaccataaattgcacagtaatataattgctattgaaaatttggaaaccgaaagcaaagttgatgacaaaggcaataaaaaacgagtttttaaagaacctattcccaacttccgtcaggtagccaaagagcatttggaaaatgttttgatttcgcacaaagctaaaaataaggtcgttacaaaaaataagaataaaaccaaaaacaagaaaggtgagaaaattaaagtagagcttacaccgcgtgggcaattacacaaggaaacgatttatggtaaataccgtttttaccaatcaaaagaggagaaagtgagtgcaaaatttgatttggaaacgattgaaaaagttgccaatccagcttataaaaatgctttgcttcaacgtttgtcagaaaacggaaatgatccgaaaaaagcattcgcaggaaaaaatgctttgaacaagacggcaatctacattgatctggaaaacgacatcaaagtacccgaaacggtgaagttggtttggttggaggaagattattctatccgaaaagatgtaacaccagaaaactttaaagatgaaaaaagcattgataaaattttagacgaaggtgtaaaacgcattttaaaatcccgtttaaaagaatttggcggggacgctaaaaaagcattctctgatttggataaaaacccgatttggctgaataaagaaaaaggaatttccgtaaaaagagtccgaataagcggagtgaaaaatgcagaaccattacattacaaaaaagaccatttcggaaacgatattttagacgaaaaaggaaagaaaattccgattgattttgtaagtacgggaaataatcatcacgtggcaatttacagcgagccggcttttgataggaaaaatcagcccattttggatgagtatggaaaccaaaaatacaacttacaagaaaaagttgtttcgttttttgaagcggtggagcgagtgaaccaaggtttacctataatcgacaaaacgtgtaatcagcatttaggttggcagtttctttttacgatgaaacaaaatgaaatgtttgttttcccgaatgaagtaacgggatttagtccgagtgaagttgacttgttagacccaaaaaacaagaaaatgattagcccaaatttgtttagggtgcagaagattgcgactaaaaattatttttttagacatcatttagaaaccacagttgaagaaaaaaaagaattaaaagatattgcatataaacctcaattaggactaaatgctattaatgggataataaaagtccgtatcaatcatttgggagatattgtaggtataggagaatattagataaaaaaagcataaaccaatgaatcgttcagagtttttaaaatcgttagggcttggtgtaggaggtttggtattgcccaaaacttcgtttatcagcagtcagcgtatcaaaatttacgataattatgtgaggggtttgtactattataaattcaaggaggttcagcaccaattaaaagaaggagatgctttaatattgattagaaatcgggaaaatgtccacgatttgtatgctattgaagtttattttcaagactttaagttggggtatatagcagcttacgaaaatgtggttttggcaaatatgatggatcaaaacgcatcattgtttgcacaaataagtaagttaaacaccaaagactactcacaaggcattgcaattgagatatatacggagttgattttgccttcagaaaaattattcacaatgatggatttcgaacttcgggcagatgatgcaacagatttatacagaggaataaaaaagtaaataacaaaaagataaacaatatggcacacaaactaaaaattgttttacagggaccggatcccaaaattaccagaacagtaattgtacctgaaaaatttaattttgaacagttacacatcgttatacaatgtgtaatgaactgggaaaatcagcatttatatgaatttaaccttggtgctccctatgcaagtgattctattagtccagaggaagccgatgatggttttgcagctttcactgagtcgagatttaaaaaatatgatgcagaacaaacacatttatcggagtttttcaacggtcaaataaaaaagatgaattatacttatgactttggagatgattggattcactcaataagtgttttaaagaaacctactgaagaagtgttgtttccaaagtgtgttaaaggagaaaacgcagcaccaatagaagacatcggtggtatttggggcttttatgaccttttagaagctatcgctaaaaaaagaaaaacggcggaagataaagaaatgcttgaatggtatggaatcccgaaaggcaaagcctacaacgaagtatatggttttgatattgatgaagttaaccaacggttaatagatgcttttcgttaaaaatcttcagcttttccgaagttttaaattttggaaaagcctgttaagttaaaagtaaaattattaatatgctgattttcgaaaaatattaccatatctataatcacgctaacggagatgaaaacctgtttcgtgaacagaaaaactatgaatattttctccaaaagtatatacagcacatcagtccaatagctgaaaccgtggcttggtgcctgatgccaaatcactttcatctgttggtgaaaattaaaagcgaagaagaaatagtttcagcttttctttcttcaacttttccaaagtttagaactttggaaaagttagagttagaaaagttagagttagaaaaatttaagcagttagagaaatttaaaaaattagaaaccttagaagccaggtccaacttcctaagcaagcaattcgctaatttttttagtagttatacgcagtcgttcaacaaagtttacggaaggagaggttcattatttttaaagaatttcaagcgaaaagagattttagatgaaaactatcttcggaatttaattttatacattcatctaaaccctgtgaagcacggatttaccaatgaaatttcagattggaaatggagttcttatcaaacatttcctatcgaacacacggaaatgctccgaatgttgtttgcggatgaagagaattaccaatacgtgcatcaaggaaaacgatccaattttaaagaatatgaaagtttagaaatcgaattaacttaaatattatgctcaaacgtaccatttacatcggcaatccggcttacttgaagttgaaagacaaccaactcaaaatagaagatcctgttacaaaagaagtaaaaggttctgtacctgtggaagatatgggctttttggtgctggacaacccacagattaccttatcgcaccccgtgattttggcgttgcaacaacaaaatgtagcaattatcagttgcgatgaaagtcatttgccgttagggttaatgttaccgataagcggacacgttgagcattccgaacgattaaagcatcagatcaactgttcggaacctttgcggaaaaacttatggaaacaaaccgttgaagccaagattttccagcaaaaagaagtgttacgaaagttggatttggattatactccgctgattaaatatatgaatgaggtaaaatcgggcgacagcaccaatatggaaggcattgtggcacaatattattggggtaaattgtttgatgattttacacgggagcgaaaaggcgatgcacccaataattttcttaatttcggctatgccgttttgcgaagtatggtcgcacgggcgttggtaagcagtggattgcatcctaccattgggatttttcatcggaacaaatacaatgcctattgtctggcagatgatattatggaaccgtaccgcccgtatgttgatggattggtggttgattggatgaaccacccggagtcgacacatattttagataaaccggcaaaggcacatttgttgcagttggccacaaaagacgtttacattaacgggttacaacgcccgttaatgaccgctttgagcattaccacaagttcgttgtgtaagtgttttacaggagaaagcagagtgattcactatccgatgatgtaatgagttttagtcgctataatgcgtatagaattatgtgggttttggtgttttttgatttgccaacagagaccaaaaagcaacgaagtgttgctacacggtttcgtaagtccttgttagatgatggttttaatatgtttcagttttcgatttatctacggcattgtccaagtaaagaaaatgcagaggtgcatataaaacgagtcaaaaaaaatcttcctgccgaagggaaagttgggattctatgtataaccgataaacaatttgggcagatggaagttttttttgccaaaaaagaaaccgatttacccactatgcctcaacaattagaactcttctgacagaaataaaaaaatgcttgattcaataatctgatcaagcattttttaattttttgttttgtaaacttccttgtaaacccttattctcattgannnnnnnnnnnnnnnnnnnnnnnnnnnnnnnnnnnnnnnnnnnnnnnnnnnnnnnnnnnnnnnnnnnnnnnnnnnnnnnnnnnnnnnnnnnnnnnnnnnnnnnnnnnnnnnnnnnnnnnnnnnnnnnnnnnnnnnnnnnnnnnnnnnnnnnnnnnnnnnnnnnnnnnnnnnnnnnnnnnnnnnnnnnnnnnnnnnnnnnnnnnnnnnnnnnnnnnnnnnnnnnnnnnnnnnnnnnnnnnnnnnnnnnnnnnnnnnnnnnnnnnnnnnnnnnnnnnnnnnnnnnnnnnnnnnnnnnnnnnnnnnnnnnnnnnnnnnnnnnnnnnnnnnnnnnnnnnnnnnnnnnnnnnnnnnnnnnnnnnnnnnnnnnnnnnnnnnnnnnnnnnnnnnnnnnnnnnnnnnnnnnnnnnnnnnnnnnnnnnnnnnnnnnnnnnnnnnnnnnnnnnnnnnnnnnnnnnnnnnnnnnnnnnnnnnnnnnnnnnnnnnnnnnnnnnnnnnnnnnnnnnnnnnnnnnnnnnnnnnnnnnnnnnnnnnnnnnnnnnnnnnnnnnnnnnnnnnnnnnnnnnnnnnnnnnnnnnnnnnnnnnnnnnnnnnnnnnnnnnnnnnnnnnnnnnnnnnnnnnnnnnnnnnnnnnnnnnnnnnnnnnnnnnnnnnnnnnnnnnnnnnnnnnnnnnnnnnnnnnnnnnnnnnnnnnnnnnnnnnnnnnnnnnnnnnnnnnnnnnnnnnnnnnnnnnnnnnnnnnnnnnnnnnnnnnnnnnnnnnnnnnnnnnnnnnnnnnnnnnnnnnnnnnnnnnnnnnnnnnnnnnnnnnnnnnnnnnnnnnnnnnnnnnnnnnnnnnnnnnnnnnnnnnnnnnnnnnnnnnnnnnnnnnnnnnnnnnnnnnnnnnnnnnnnnnnnnnnnnnnnnnnnnnnnnnnnnnnnnnnnnnnnnnnnnnnnnnnnnnnnnnnnnnnnnnnnnnnnnnnnnnnnnnnnnnnnnnnnnnnnnnnnnnnnnnnnnnnnnnnnnnnnnnnnnnnnnnnnnnnnnnnnnnnnnnnnnnnnnnnnnnnnnnnnnnnnnnnnnnnnnnnnnnnnnnnnnnnnnnnnnnnnnnnnnnnnnnnnnnnnnnnnnnnnnnnnnnnnnnnnnnnnnnnnnnnnnnnnnnnnnnnnnnnnnnnnnnnnnnnnnnnnnnnnnnnnnnnnnnnnnnnnnnnnnnnnnnnnnnnnnnnnntgttgtaatcttacacagtaaatctacaaaattttttgaaagcaaataataacaacatttttgataaaatttttgagtaaaattgtaaattcatacaaacaaaaatagttatggacgaacagttaaaaaaagaacggcttaaaaaacataaattattagcaaccggattgtttattttaatggcggtgatatattgtgtaatgatgtatcttttaaaacaccattcgcaaaagtggatggagtatatacgtgccttttcagaagccggaatggttggtgctttagcagattggtttgcagtcactgctttgtttaaatatcctttgggtattaaaattccacatactaatttaatcacaaataataaagatgccttgggtgaaaatttaggcagttttgtcagcaataattttttaacaaccgatacaattcgtccgtatattgataaactatcggtaagtgaatacttaacaggttggctatctaaaaaaaagaatattgaacttattcatgcagaatgcagtaaaataattgaacagattgttgataatttaaatgacgagtcaattgccgaatttttggctaaaaaggggtttgaacttactgcagaaatcagacttgaaaaattagccgcaacatcgcttctttatcttttagagcaaaatgaacacgaccgacttttaaatatcattttgccacaggcacagcaatatgttgaaaataacagagaattgatttataaaaaagttgttgaaaagcaacctgttttgggattgatcggcggaaaatcggttactaatcaattaatttcgggtattaccacgtttttacaagaaatagaacgaaatccggagcatgatatccgcaatgctcttaccgtgaaattatatcagattgttgaagatttaaatgaaaaagatggttggcacgataaatttgatcaaattaagaacgaatttattaccaaggaaaaattgtacggttatacaaaagatatctggttgcgtttaaaagaagacctggtgttaaaacttcaggatgccgaaggaatgattaaccaatacatcagacaaaatatagatttaatggttcaaagatttaaagaagatgaagaaatgcagcagaatatcgacaaatatgttcggcagtatgtctataaaatggtgctgaaaaacagtaacgaggtaggaacgatcattaccaataccgttcaaaaatgggatggcaatgagttaagtgataaattagaattagaagttggaaaagacttacaatttatccgaattaacggtacattggtgggtggtttggttggcttgttaatacatacactcacacaattatttttgtaatgatgtataaaatccggaatatttctaactattaatgaaatgtaaagttaataaacaatcctcgtgttttcatagattctatatcgcctgtccacgggctgttagggttcttatcacggatcagctcatcttgtaaaccaaatactccacgaatagatggcgtaaatttaaaatgttcaaaataaaagtcaattcctaagcctaattcatagtttgaagtccattttttcattctaaaacgcccctggtaattatcttctttagatgtttcgttactgcttaaattcaatgattgagataatccggctaaaatatacggacggatatttccggcacgtaatgcggagaattttaataatagtggaaaatggatatatgtagaagatacattgcgtatgcgttgatccgggttttcgatatgcgggtaaatcaaatttcttttagtgtaatataatcccggttcaaaacgtaaatctaaatattccattaagcgtaaatttccaaccaaccccacattaaatccaaaagtaggttccaccagaatttcattgcttccgtttttttcataaaaacttttagaataatcaaacttaaaattataagagctgaatcctaaaaaataaccataatgtacacgttgctgatcccagtcctgctggtttttatatggatttttaccaaacattccctgtgcaaacgtatttgcagttaaaagtaaacaaaaagcaataaacagttttttcatattttattttgatgccgaataaatggttgccacgcccattgtttgcggattgtgtttaacatttttaaacccaacagttcttaaaatgccgtttaaggtttctccgtaagggaaattcttagcagattcagaaagatattcatacgctttctgatcttttgaaaacagcttacccattaaaggcataagggttttcatataaaaattataaccttgtttgtacggaaactttgttggaaccgaggtttctaagataacaaaaattccattaggtttcaacactcttaaaatttctgctaaacctttttccaatgtttcaaaattgcgtacaccaaaagcaacggtaattgcatcaaaagtattgtcctgaaaaggtaaattttcagaatcgccctgaatcatttctattttatcctgtaatcccaaagcttttactttttctttgcctacctcaagcatacctgccgataaatctaagcccacaatgcgtttggcgtttgattttgatagtaaaatagctaaatcacccgtacctgttgcaatatccaaaatagattcaggctgggtgtctgtcaccatttttaaaacatttcgtcgccaaccttggtcagttcccaaagaaatcattcgatttaaattgtcgtaatttcccgaaatagtgtcaaacatttgttcaacttgctgttttttacctaattcagaatctttatacggattgatttgatctgccatttttaatgaaatttttacaaatatagggatattcgcaaaaagggtatttgtttatttgacttgattttctctttaatggaaactttgattttttttataaacccacacacagtcttcttcaattaaaaccgatgttgttttttgaaaatccattagtttcggagcaaaaattcctttattcaagattacagaagttttaaaaacacgggcttcgtcccagattccggcatcaataaacgattgcaaagtctgtcttccaccttcaataataacggattgcaggttttgttcaaaacaaaaatcgcagatttcctgaaccatatttttaaaaggaatcacaacatctttttccgattttttgattttggtaaaccgatacgttggtgcttcctcgtttaaaatctgaaacgaattgtcgattccattatttgcatcgatgaacaaacgcaccggattttttccttcccaacttcgggtagtcaaacttggattatcgtccaaaactgtttgttttccaaccaaaatagccatttcttcactacgccatttgtgggttaattgccgggaataggcattggataaccaaaccggctcatgcttgtctttttctatcggagcgataaaaccatcggcagattgtgcccattttaaaataatatacggtcgtttttttaaatgaaatgtaaaaaaacgtttatgtgattgttggcattctttttccaaaacacctgtgatgacttcaatgccgttatctttcaaaatttgaatgccttttccggcaacttttgcaaacggatccacacagccaatgactactttcgggatttttttttcaacaattaagttggcacaaggaggtgtttttccaaaatgactgcaaggttctaaggtaacgtacaaagtactttcatttaacaatgcttgatttttaaccgaatttatggcgttaacttctgcgtgcgaacctccaaaagccgaggtataaccttcgccaattattgtatctttgtaaacaattacagcacctaccgacggattgggcaaggcatttgccaaaccaattttcgccagttgcaaggcacgctgcatatattgtttgtaaacagacataaaaaagattttttacaaaattaagaaaagatgacggtaaacggctataaaaaacgatttctaaaccaacttcctgctttttatgatgaaacagaacgtttgagtttgttttatctttcaatggaatttgtgttgaatttcaataaaaccgattgtgttttgaatggaaatgaatcaatttctattgaaaatcagcaacaaatagacgaagttttcaatcgtttacaagataatgaacccatacaatatatcacacaacaagcgaatttttacggttacaaatttaaagtcagtcccgcaacgttgattccgcgtcgggaaaccgaagaattagtcgaatgggttttgtctgaaatgaaaaatgaaccacaaaaaaaatggagggttttggatattggcaccggttcgggttgtattcccataaccataaaaaaggaatttcctttggcagaagtttttgctatcgatgtttccgtggaagctttggctgttgctaagaaaaatgcggaaaacttaaatgtaccaattacttttattgaacaagacattttaacaaccgagtatttggattcctatgatatcatcatttccaatccgccttatgttagaaatctggaaaaagccgaaataaaaaacaatgtgttgcattacgaaccgcatttggcactttttgtagaagacaatgacccgctgattttttatcgaaaaattacgcaattgggtcaaaaaagcttaacagaaaacggaatgttgttttttgaaatcaaccaatatttaggaaatgaaatgaatgaaatggtttcagaatattttaatatggttgaattaaggaaagatttacaaggaaatgaacggatgatgaagatagagcgttcagtaatcaggtaacagcttttcagatttatgactttaaaactttacaacattcagactataactactatatttgcataaactaaaagtcctgcaaggtctatatgaccttgtaggtatcaattcaaaagaaagcctacaaggtttcaaaaaccttgcaggatacttgatataaaaaacaaaaattaaaatggcacaaaaaccaagcattccaaaaggaacccgcgatttttccccgcttgaagtagcaaagcgtcaatatatcatttccaccattaaaaaacattttgaactgtatggttttcaaccgattgagacaccgtcgtttgaaaattctgaaaccttgatgggaaaatacggcgaagaaggcgaccgtttgatttttaaaattttaaattccggggattatttagtaaaagctgacgaaacgcttttaaaggaaaaaaacagtttgaaattaacggctcaaatatccgaaaaagcgttgcgttacgatttaaccgttccgtttgcccgatacgtggtgcaacatcaaaacgaattagaatttccgtttaaacgttttcagatacaacctgtttggcgtgcagaccgtccgcaaaaaggtcgttttcgcgagttttaccaatgcgatgccgatgtggtcgggtcaaaatcgttgtggcaggaagtggaattggtgcagttatacgatgctgtttttaccgatttaaaagtagaaggcgttaccataaaaatcaacaacagaaaagtattgtcgggaattgccgaagtaatcggggcaagtgacaaactgattgattttaccgtt

SEQ ID NO: 2127 - DNA, 24296 bp, synthetic construct
  misc_feature 1..24296: note = Synthetic
  source 1..24296: mol_type = other DNA
gttaagaagacaaccgaatacttttttatagggacaggtttcgcattggttgctttaggttctgtttgttatcttataacggcgattaaatcccacggtaggataaaggagcagaatgatgtattcgcaaacaagcagagggagattgaaattgcttctttatgtaaaatgcaggagaacgaacaacttcacattcatcgtatgcaggaagagcataagcggatgtcaacaggtacaaactgacagaatatgaagagcgataactgtataaaacggaataggggaagtccagcggtaataacagatttaagatactcgtggggaatctttcaaaaaacgaccggaggttcccacttatcgaagaaggtccgggttgtgatcgtaacagacaaccgaattgataagattagaaatacttttagaaggaatcaattatgaaatataaaacaacaacaatcgtatcagtatttggacttggcataacagccgcaggttttattagtgtatgggtctgtgaccgatttgtcaagagacgtaagcagacaaaaaagatgtctatcgtatttaacgatgtggtgaatgataccgaaacagttatgccgttgcaaacgcctatttctcaaaaacgtacgagagccaggattacgtccggtatgatcaggaaatggaatatgatggcgaaaaagggaatgtcccataaacagattgccgccgggtatggtgtgtcattggttagtgtagacaggcatttggccaggtcaggtagaaagaagaccgccaaaaccgataaggcctattctacagtcccgatgattaacagtgaagttaaaaataacagattattaattaataaacatgagttatgagtaataaagtaaaggcaatgtcccactctataatcgatgtaggaggtaaaattggactagggggagttagtggacgctacaaaggtactgcttcaactctttggaaaattggtggttgccttattggtataggtgtaattggaatatacgttttacccgaaataaagagaaagcttggacaggttaagattgacgaaaagaaaaagaaaaacgaacttgaaaatgacaaggcaagggaagtgagcagacttaaaatggaagaaaaagatcatcagtgtgatctggatatcaaaaaagcgaaagagatcagtcaggtaaagactgatgagatatctagagttattacgattcgtcaggattttggtctcatgggaaaaaaaacggttggcgaacaaacgatagataaagaacctgctcttggtgagtggttacaatggttcgatactcagttccccatgccgggttactccgctattcctcacatcagcactattctgaacggttgtcctggtggcttcaggcctgccatgcttctacatctgcttgggacttatggtgcactttgtttctcgaatgtgcgtgcgcaatatatggacggacggtctcattctcccagtttgcaggttgtgattgtaggagcgcagggttcgggaaagagtatctttaaaaatgtgtatgaacaggatctctttcatcgagtggttatggaggaccgagagaaggccaggagtaacaagcctgaccagattatccaaacgataggcagcgagatctcaaaagcgagattattggagcttatagctggtaatcatgatgtatacttctattcgatggagacagagatcgataccgtgcgtcaatctttcaccaaaggtggcggactttctagtgacttgttacgtaaagcattctccaacgagagtatttctttggacaacaagcatacccctaatgaatgtcgcggtacatttctcgtgtatttcaattacacctttaccgggactcccaaggctgtcagacgtttctttaaagaggaggagtatgaagatggaaccgcctcgcgtgtttgtttttgtgcaattcccgaactgggtcattcaattccggagtttgacttaccggagggtgaagaactggagaaaatgcgtgaccagattgacaagtggcgtgaacagtattgcttcagaagaacaaaagagggtattgatattcctgccaacgaacaccggacagatctctcttatgtattcggtactctgaagcactggatcgagaaacagaaggagatgggtgacgagacaagaaaagaagtttcccttcgcatggccactgtcgccttccatggtgccatagtgctgcatatgctcgccggtgaacccggggaagacgtcccgaagacacgtagggcgatttgtaagttgaccgaatatcttgccaaccactgcatggagcgttttctctgccagtattacaagggagtgtatccgaagatggatataccaaccgaaccacggttgggacggagattaacagacgaggaaattgaatgctggtatcctttgtggaaaactctcgatgaaaatggcaatcagctgggttatggaaggatagccaaactgattggagtgagtaagaatgatgtgagaaatgcttttagaaagcatgaaaaagaaatcggattgagttaatacagataaggaggacgctacacaccggtgttctccttttttttaggggtgtaaatgccgtttcataggggtgtaaatgctgaatgtatgagtatttgattaattctgcatattataacgaattgtgttgaaatccagctatttatacataaaaaaaaactttctatccttagagggtgtaaaacgttgcaccctgaatatgataatggatgtgatgacaatagctcatacgctcttaatctagtagtcaaaatagagtttgtctttcgtcgagtaaagtcttcttaatctgatttccacactagtgtagttcaataataaacttatatatctttacttgtttcgaaacagcactaaaggttcttgctcaagtgtatattaaggtacactaaccgatttttagtacattgtcaatgacacagcctcgatttcataagtaccagatctcattagtcctactgtgttttcttgaaaacacctaagataactatcgaaactaatttcccccctgatactcactgagatctcatcttcatcaactcccttttgtattatgagcaactggactctgcaatatttctctgcattcaaactaccctttaaccagtctacaggatgcaattttttttactctaaaacatatcctatttaagtaatattgctgattttatgaaaaaaaaatgcactaaaatattgtcttcgttagttgtaggcaaacgccgtgtgagtgattattataataatggttgtagtatatttactatatatcttgccttcggttaacctgtaagttatcattcttaaagattgaatcattgtaattcatgggtaatattctcctaagtaccttcctgatgcgggatatacttgcaatcgggaagcgtctatggtagataagtctgtccattacttccctttagcaaaactgaatcctttatcattatatacgaaattatctgtgtaatatatgatattagatgttcgtgcatggaaataattattcccatttttatgatagcaggctgtatacctgtgagagtcatttttttcttcggaataattactttccgatgaataactgttgatacgcgattactatctctgctgactgtctcaccttaagctttgataatcttatacctgtcaagaagaaaaaaagaggacagtatcgccctgttatgaactgaacgcactgcttctttagatttcccggatttctataaaataccccctcttgcctttctcattcgtcctctgcctctctatgacggggagatattgtgccagctctttagccttggctgttttcccggtcagcccgatgctgtcatatatcttctggagcattccctttacctcctgcctggagtatgaaacacccgccttgaatgtccgcctgcaggcatcccttatcgtctcttgcgcgcataccgtattgtaagccctttccatatcggtttcctgaaaaccaagctttgataactcctcatagcccagggtatcataccagtgatgaaattccatcttaatgaacgggttttgcaggaccaggctgtcatactgggggtattgttttctaaaacgggcatacccggccagtctgtctttttgaggcgcattgtagtaccaactctcaaactgtttcagttcctccggtttctggcacatcctgaccgcatcctgaatacttgttaagagccggcaggaattattgtaatagtagtttctctggtgccacctgttccaccgggctaccataaccagataattgaaaccgattgtggtgtgcccgttctcccggataagatcaatataatcatccacaaacctcctgtccgttgctttgtcccggtaaagctcgataaacatttctctggcattgtccggcgcattgttatatgtatcgaggatcatttgtgactttctctccatctcgctctgtttccgttcaaactcctccttggttaccctctccggcatcgtcttgtaatatatggttgcatcgtaacggaacgggttcatgtcaagcctctgccttcccagtatctggggtatgtccagcatgatatcgagtgtctgccattccttgcccgcattgataaagatataggtgctggcattggtcgagtagaagtccacaccttcgaatgaggcttttgtacagaatgtaaaagtcttgtttaccggattattcctgtcggcacataatccgcctgccacgaaacctttcggcagttctgaagccttgctctccgaacacagtatggtcacttcatccggtttcaggttgttctgcccgatgatgttcctgatggaccttacttcattgaggaatatacaggcttcacgggaatatacgacatttccctgcaggaccttcctttcaaaatatccgttctccctgtatcgttgtattaagcgggcgcatagtttctccgcactttcaccactcttcatccttacctcctttagtgtaggctcctcaatgacctccgggtcccattccagcttataatagggaatacctgcgaattgtggtatattatccaggaatatgtcgggaatgggtgttgcggagaggtaacagattcgccgtgcttccctgtcaaggtataccaggaaattcatgtccgtacttcctttgaacgtcgcatctcccataaggcactgaaactcatcgaccacaaacaggaatgtatctgtcattcccctcgacttgagtacggaaagtaccttgtccgatgaatccagtgtgactagtattctgggtggccttgataactgcccgaaaggcaaatttccctggtgacagtccaggtatacgcctaaatcctgcattttctctcttattgcttccgccctgtcgttgcacagggggatatggaagagaaaagtgtcgggatgctgtttatgcttttccttgagcacctgaatccgtggcgaaataatcactaccggcagactggaattgatgaacattgatgtccctccgcaacctgttatcgtcttattgagaataaattttctgtctatgggtagaatccccttcaggagcctgtcgtagtcactcatatacctgcatttctcaggcatatcaatttgtatcatattcatatttatactttgtttataaaaggtttgcaatattttcctaccctccatttaatcgttgaagggtaaacggaacgcaacatttttttttactctaaaacatactatttataagtaataataccgattttagggaaaaaagttgcactaaaatagtgttattcgttagctgtaggcaaacgccgtgtgagtgattataatatagttatcatatcatttataatagttatcatatatcctgccttcggttaacctgtaaattatccttctgcagcatttccttcgaatccccttcagtccttaatatacattgaactccaatgtcccgaagttattcttctcagccctgtatgcgtttctcacatgccctagtatttcctcttcgctcatcgtaggacttttccatccttcagtgaaatacccgatagccaggctctcatccactccccatttgcacatcagacaggccagcttaaagatgctctccgccctgttcccctctttccagtattccgggttattcttcttccagagagagtttataatattgataatgcttttgtccgacacctttctttctgcatggggttgtatcactttgccctgcgcccttacggtggggatataatgaaacgttaccggattaggattcatccatatgtcaggatcatagctgagatagtttctccttgccatatccttgcaggcgctatccttaccggccacgttgaatttgtccaatagttgtgtgtataagtccctgtgcctgtccgggtcggtattatcatgcagtatcagtgctttcaacccccttccgcctggagttacgaatacacataagacacatggagttcttatcagccagtttcgcagatctgtcatttcatcctgtgtccctatatggtcaaagtccattgccgtcacatttgaatacgatatcagatgcgtactgtcaatttctgaaaatgtaccgttataggctacggcaggcagtagtctggctttccagtactgcatttcattctccggttgtttccttatatgttctatggcctgtgccagggtatatttaccgtactgactgtcacacagcaccatgttaccatcacggatcatgcctgtaacccgtgagagtgtcggatagctcagattgtaccttgtatggttgattctatgtgctaatgtgatataactatccatgattgtccggcattatttcttttttatccatctgaggttccgggtggagttattggacatgtccccgtcaatatgttccacttccgtataaagctccgggttcatgttcggcaggaacgttcttgcaaccaggaagtccggataaaccttcttattatttatgatgatattttccctgttctttactttacgtgaatacaggccttcatacaaattacagaggatctccacgctttcatatatttccaatgcatacgctttctcaaaccatttgatggctatcttataatctacaggagctccatacatacctccaagatgtatcttccctattgtgaaagcagccggcccctcaccagagacagcgtgccgtagtaactccattcctttttcactatcctgagggcaacctttcccttccagatatatacacgccagattaatctttgctacaggtaccttgtctgcaatgctttccagcagattaatagtcttgtcaacatccggggttactaccagaccttccaggtagtacatggcgacattgttgatcccatccgccagtccctgcattgcggctttgttataccagaagaaagcattgtcaaagtttccttcgttttcataatcctgtgctagcaggtacatggtttccgcatcacctgccgctgcttttttaataattcttttttttcgttcttcatttttattcagttttagtatgccttccttatttagcgtacatgtataaggatttcagggttttcccaagacggtatttttttttaataaacatgtcaaggttatctgtggggttgacggttgtatatgtatatagtgagtaaaagagggcataactgtattgaacccgatgaggaattattgctaattcgtattctcaggtcggataacttttgaggcattttgaagctttgacggcttccttcgtcacctcccagatctgcatatccaatcatatgaaaaatgttttgaactgtacatgtccattcattatatgaggtctggagctctttataaacaggtttagtgtcataaatttataaaaacgctgttgtcatcacccctcatcctgataaatgatgaaagataataataaatcatgtttgaaataattataatgttaaagcaagcagaaaagtggtttcctgatttgggaactatggtttccgggcatctcctgatttatgttatttcagctaaagggaaccatgagcggattattcccggagtcattctgttttcaaccggactctgcattgaatggttgttgaaaacaggtctgtgcagcccacctatgacttatttacgaaaagtatggaaatccggacaggttattgaaacagataccgatggacgctatacaggagggaatgcgcaatatgtaatatttgtagaaacaactgaaaaccaatccggaagatatcttttaaattgtctgaatactaatatgaatagttatataaaatcaaaagaaaatgatgaataaaaacgataaaaaactgccgttcgaaaaagagatcaacggcagaaaaatgagatattgtggaatatataatatctgggtaaaccgtgaaggtacatatgtttatagggaatataaagacccagcctggaaccatgccttgcaaatccatacccgtctggatggaagcaaatacctggacacgaaaagccatggagaaatacctcttgatgaagctgtggccatctgtttcagtcctatgccccgggatggcaggaaatatataccggttcataaggataatgatccgggcaattgtcatgccttgaatcttgcatggaaacaggtcctgaagtattctccgaccgacaaggaaagaaagctggataacggactggtggtacggtcggatggtaccatacttgataaaaggaaaaaactgtttgtagtcacggtaattggtgacagcgatacggaccgactggtttctgtggatccttatgtatgctattatcgtaagaaccgttatggctctattgacgagagacgtgcgcgtgttgatgctcttatggcggaagccgaatttgtagccggtgataactccctgatgagcaggccgcgggtactgcataaggatcaggattacctgaattacaactcctccaatcttgaatgggcagaagaggacagtccggagtatcaggcttatatgtggcagaaaaaggaagatctggaccggttgaccattcaggagaatccgaatcatcccaatcctttaatgaaacctctacattaatgccagttataaaaaacatgtcttatggatgagaaggcaactatttcccggagagccgtggggaaacatattattgtcagactaccaatagtatcagtaggagttattataaataaaaataattatacatataaataccaacggaaatagtttatttgaaagacacttattgccagtttcggagtaagagagagtatccttgtcgaaatagcattttgatatcggagaggatcctataatggattactcggtatcttttctatatggtatataaagttgtaatagtctgggcagatcatgttaatagaattattgggaattatggataggatattaaatggtatgttaagattgactaagtattagaaatttatggacttaaaattatgtgaaatgtgattagaagaataccgattaagatgaggtgtataaaaaaagtaaatcaactttatttaatagattaaatgatcttagtttataaaaaaacagggaaacagactgtgtgcagtcgttttggcttttcctttttaatatgataggggctcaataatttatctaagcaggatagactcgatcctttttataaattctatgtcaataggtgtttttctccaatatgtaattattagtctgctttattctatctatcggttatatataggcaggattgtttgtttttataagtaatacaaaaaggcgaggcaaatgccccgcccttaatgttttcacaacggaataatccttattgtgatttgcttcaaattagtgatacaaagataggaaattattttcataatagtatttatttatagaaaaaaataatatatttggggtattgtaataaaactggtcaaatatgaaaaggattttaggattggatttaggctcaagtagtattgggtgggcattagtgaacgaggcggaaagcaagaatgaaaggtcgtcaattgttaagcttggtgtgagagttaatcctttgacagtagatgaatcgatcaactttgaaaaagggaagagtattacaaccaatgcagatagaacacttaagagaagtatgcgtcgcaatttgcatcgttacaaacttcgccgggaggctttaatagaggtgctgaaggaatgtaagtttataactgaagatacaatactttcggaaaatggtaatcgtacaacttttgagacatatcgtttgagggtaaaagcgctaacagaggaaatttcgttggaagagtttgcgcgtgtattgataatgattaataaaaaacgtggttataaaagtagtcggaaggcgggaggagcagaagaggacacgttgattgacggtatggatatagccaggaaactttatgatgccaatcttacccccggtgaattatgtctgcaacttctttctgcagggaaaaaggtattacctgatttttatcgttctgacttacagaatgaacttgacaggatttgggaaaaacaaaaagaatattatcctgggattcttactgctgcattgaaagaagagttgagaggtaaaaaacgtgatgctgtttgggccatttgtgccaatgcttttgtttggaaagaaacctatacagaatggaataatgaagaaagcaaaaacgaacaaatagaaaaggaacataagttggaaggtatttatagcaaacgaaaaagggatgaggcaaaaaaggaaaatttgcaatggagggtaagtggtttgaaagaaaagttatcattggaacaattggttattatattacaagaaataaacactcaaatcaataattcaagcggttatctaggtacaatcagtgatagaagtaaagaattgtactttaacaaacaaactgttggtcaatacctaatggatattttggataacaatcccaatgcaagtttacggaatattgtgttttatcgtcaggattatttggatgagtttaatgtgctttgggaaaaacaagcagaatttcataaagaattgacgggagaactaaaaaaagagatccgtgatattatcattttttatcagcgcaggttgaagagtcagaaaggattaatcagtttttgtgagtttgaaagtcgacagatagaagtaaagatagatggtaagagaaaaattagaacagtaggtaatcgggtgataccccgttcttctcccttgttccaagaattcaaaatatggcaaatactaaataatattgaagtaacagctgttggtaataagaataaacaaagaatgcagaatggttcaaatgaaccggacgatacggaacaattggagttgaacggcaggcgttatttgtatcaggaagaaaaagaattgcttgccaaagagctttttgttcgtgataaaatgacgaagttggatgttttaagattattatttgataatccagaagaattggacttgaattttaaaacgattgatggtaataagacgggatatctattttttcaagcatatagcaaaatgattgaaatgtctggtcatgagccagttgacttcaagaaacccattgagaaaatagttgagcaggtaaagtctgtttttgttcttcttaattggaataccgacattttgagttttgactcaaataaagagttggataaacaatcttattataaactttggcatttattgtattcttttgaaggtgacaatacgccaacaggaaacgggtgcctagttcaaaagataatggattcttatggtcttgggaaggagtttgcaaagattttggcaaatattacttttcaagaagattatggcagtctgagtgcaaaagccattcataagattttacctcatctgaaagaaggcaatcagtatgatgtagcttgcgagtatgctggatataggcattcaaaatcgtctttaaccaaagaagaaatagcaaacaaggtgttgaaagataagctagaggttcttcctaggaatagtttgcgcaatccagtggtggaaaagattctgaatcagatggtaaacgtaatcaacgcaattattgaggcttatgggagaccggatgaaatccgtgtcgaattggcacgtgaattgaaaaagaatgccaaagagagggagaagttaaccaagtccatagctgaaactacaaagacacatgaggcacataagaaacttttgcaagaggagttcggtttgaagaatgtaggccgctcggatatcttgcgttacaaactttataaggaattagagtcacgtggttataagactctttattccaatacctatattccaagagaaaagttgtttagtaaggaatttgatattgagcatattattccacaagcgcggctttttgatgacagcttttcaaataagacacttgaagcacgtaatgtaaatattgaaaaagggaataggacagcttacgattttgtgaaggaaaaatttggtgaaagtggaactgataatagtttagattgttatttgaataatatcgaagtattgtttgtctcagggaaaatatcgaaaactaaatatactaaattgaaaatgacagagcaggatattcctggtggttttattgaacgtgaccttcgtaatacgcaatatattgctaaaaaggctctgtctatgttgaatgaaatttctcgttgtgtagttgccacaagtggctcaattactgacaaattgcgcgaagattggcaactggttgatgtgatgaaagaattgaattgggaaaaatataaggcgttaggactggttgaatattttgaagataaagatggaaaacaaataggcagaatcaaggattggtcgaaacggaatgatcatcgtcatcatgcgatggacgctttgacggttgcgtttacaaaggaggtattcattcagtattttaataacaaaaatgccagtttgaatcccaacacaaatgagtatgcaataaagaacaaatattttcaaaatggtagggcaatagcacctataccattgaatgagtttcgtgcagaagctaaaaaacatttggaaaataccctaatttcgataaaagcgaaaaataaggtaattacgaacaatattaataaaacgaagaaaagaggtggcgtaaatacaaagaagcaacaaaccccacgtggacagttgcatctggaaacaatctatggttgttgcagacaatatttgacaaaagaagagaaggtgaatgcttcgtttgatgtgtcgaaaatagcgacagtaagtagctctgtttacagggatgcattgctaaaacgtttgcaggaacatcacaatgatccgaaaaaggcatttgccggaaggaactcactagataaaaagcccgtttggctggataaggagcaaataaggaaggtaccaaagaaagtaaaaactgtaacatttgaaactatttatactatacgtaaagagatttctccagatttgagggttgataagataatagattcaggtgttcgaaaaatgctaacaggcagattaaaggagtatgggaatgatgctaaaaaagcattctccaatcttgatgagaaacctatttggttgaataaagagaaaggcatacccattaaacgagttacaatttcgggaatcagcaatgcgcagtcattgcatgtgaaaaaggataaggatggcaaaccagtattggatggaaatggtagaaatattcctgtggattttgttaatacaggcaataatcatcatgtagcagtttatcgtaggcccgttatagataagaacggtcaaatggtaattgacgagaatggcaacctaaagtatgaacttgaagaggttgtagttactttctttgatgcagtaacaagggtaaatcttggtcaaccgattattgataaggattataaagcgagtgagggctggcaattccttttcagtatgaagcaaaatgagtattttgtatttccaaataaaaagactggctttaatccgaaagagattgatttacttgatgcagataattatggattgataagcccaaatttgttcagggtacagaaatttactcataaaaactatgtttttagacatcatttggaaacaacgatcaaggatacgagttctattttgagaggtatcacttggatagattttcgtagttcaaaaggattagactctattgttaaagtacgtgttaatcacattgggcagattgtttcggttggggaatactaattgaataatacataataaataatatatgtgtaaaaacaatgatgatccttgatgctttgactcctattattacaaatatagagatagataggtgaaagttgaaatctatatttttgacgaaatgtttgggttggcgcaaggcaaaattacttgactgtttagagtactgtgctccgcagttgcaaaacatttcaagaatatctttgtagacagtgagccaattgaagatttttggaattagctgccactgatggtaaaatgtatcagatgaggttatatcatctgggcatcattctatctgtgggttactgcattgatgaaattcaaactacatattttgaatatgggtaaacagcgtactgaaaaaatgtttgattgaggtacttgggtatgaatgacagacgattaaagaattcgcagaaactgtttagagaaaattattttaagtaataatttgtttgtatttgtgacattcgtagtagcgaacgttgtttccataagagaataatcggtatttatttgcaaagtgatgctgactgtggagcgaatggtgatgtgatgaagaggtttaataaatagaaactgcttggaaaaatgtatctaacgaggtgatgtataaaccggaagttttttcctattgcaaaaaaaatctgaataatacagagttgtatgatttgagtcgcattctttcaatatctttagattatgtaaaaaatccggctaaaaagaacatgtttgtatgtgaaagatgaggtgaaaagtaggatttattttgataattcaatggaaaggttgtgttgtatacactggaagagtgagttacgaagtggtcatgccattatggaacagaaatatgatcgatttcatactaaatgattttatgattacaaatctgattttgaaacactttaataaaagaatgaattatgattaagaaaacactttatttcgggaatccggtttatctatcgttacgaaatgcacagttaatcattaaactgcctgatgttgaaaagacaatagctttgcctgaagtcttgaaaaaacaggcggaagtgacgaagcctatagaggatattggaataattgtgttggataacaaacaaattaccattacttccggtgtgttggaggctttgcttgaaaataattgctcggtaatcacttgtaatagtaagagtatgccggtcggactaatgcttcctctttatggaaataccacgcagaatgagcgttttcgtaaacaattggatgcttcacttccattgaaaaagcaactctggcagcaaactattcaagcgaagatcaacaaccaggcatctgtactcaaagattgtatgaacgaagaagtaaagtgtatgcgtgtgtgggcggctgacgtgcgtagcggtgatcctgataacttggaagcgcgtgctgcagcgtattattggaaattcttatttgctggcattgactgttttacgcgagatcgtgagggtgtttctcctaataacctattgaattacggatatgctattcttcgtgcagtagtggctcgtgggttggtaataagtggtttgcttcctactttgggcatccatcatcacaatcgatataatgcttattgtttggctgatgatataatggaaccttatcgtccttatgtggatgaattagtatttaacttgacacaggagtatggaaaagatgtggagttgacaaaagacataaaagcacggttgctgactgttccgacattggaagtggtaattggaggtaaacgtagtccgttgatggttgccgtaggacaaaccacttcctcactttacaaatgtttcaatggagaaattcgtcgaatagcttatcctgaacgataatggatcgctttagtgaatatcgtattatgtgggtacttgttttttttgatttgccgactgagacgaagaaagaaaagaaggcttatgcggactttagaaagaatctgcaaaaggatggttttactatgtttcaattttccatttatgtgcgtcactgtgctagtagtgaaaatgctacagtacatataaaaagagttaaatctttcctcccggagtttggacatgtcggaatcatgtgtattaccgataaacagtttggtaatatagaacttttttatggaaagaaaatgcagaatgttaatacgcctggacaacaattagagttattttaaaaaacaaaatctcgcattaatgcgagattttgtgctggaaacagactttttttcttttctaattttctttttaacttgttggaaatcattttgttatataaaatatgttgtttccaatggttcaaagatactaatttgaaagcaaatcacaactctgttgagtatacactccttacataccagttgtttccaatggttcaaagatactaatttgaaagcaaatcacaaccactgattagacgtcttactttgatgtcaagttgtttccaatggttcaaagatactaatttgaaagcaaatcacaaccacttctttcttcttttctctttagtttctgttgtttccaatggttcaaagatactaatttgaaagcaaatcacaacctattaatcttatattatttgtttgtattgttgtttccaatggttcaaagatactaatttgaaagcaaatcacaacccattccataaattaatcctggacttagtgttgtttccaatggttcaaagatactaatttgaaagcaaatcacaactaaaggggttttcttcgtttttttgaaaatgttgtttccaatggttcaaagatactaatttgaaagcaaatcacaactacgtcgtactgctatccatgttgctaatagttgtttccaatggttcaaagatactaatttgaaagcaaatcacaactgggagcagtatcgtgattttgtaggtaatgttgtttccaatggttcaaagatactaatttgaaagcaaatcacaacacgaaaggttacgttatgtaacagcagcatgttgtttccaatggttcaaagatactaatttgaaagcaaatcacaacgttgacgaagatggctctaagtatggattggttgtttccaatggttcaaagatactaatttgaaagcaaatcacaacgaagcccctgcgcaagctcctacacctcgggttgtttccaatggttcaaagatactaatttgaaagcaaatcacaacgctaaaggttctcttcgtattaaccccgaggttgtttccaatggttcaaagatactaatttgaaagcaaatcacaacgttatgacggataacgctagcatcgaggcgttgtttccaatggttcaaagatactaatttgaaagcaaatcacaacgcttatgaagtccggctttatgcggatcatgttgtttccaatggttcaaagatactaatttgaaagcaaatcacaacaaagcattggttttgccctataatgtgcaagttgtttccaatggttcaaagatactaatttgaaagcaaatcacaacttttgctgtatagattattggtgcggtgtcgttgtttccaatggttcaaagatactaatttgaaagcaaatcacaactaggtctatttttattcctagtacgtatagttgtttccaatggttcaaagatactaatttgaaagcaaatcacaaccttagcgactagcaccatagtatcggcgaagttgtttccaatggttcaaagatactaatttgaaagcaaatcacaactgtgtcgagcctccttgtcctcccattccagttgtttccaatggttcaaagatactaatttgaaagcaaatcacaactaatactccttcagttgcgttagttccagtgttgtttccaatggttcaaagatactaatttgaaagcaaatcacaacttggtaataatagtgataaacagataaagagttgtttccaatggttcaaagatactaatttgaaagcaaatcacaaccggatcatctcttggttctgatactcaaagttgtttccaatggttcaaagatactaatttgaaagcaaatcacaacgcggatggaactgctgttactcgtgagttggttgtttccaatggttcaaagatactaatttgaaagcaaatcacaacccaaaaacaccaaaccatcgtattagacggttgtttccaatggttcaaagatactaatttgaaagcaaatcacaacccaaaacaccaaaccatcgtattagacgcagttgtttccaatggttcaaagatactaatttgaaagcaaatcacaactggactacatttcgtgccaaaactggacaggttgtttccaatggttcaaagatactaatttgaaagcaaatcacaacccaaaacaccaaaccatcgtattagacgcagttgtttccaatggttcaaagatactaatttgaaagcaaatcacaactggactacatttcgtgccaaaactggacaggttgtttccaatggttcaaagatactaatttgaaagcaaatcacaacgaggaacgcgtaccgcctctgctagagaccgttgtttccaatggttcaaagatactaatttgaaagcaaatcacaactggcgtggagtggttgatcctgcaagcacgttgtttccaatggttcaaagatactaatttgaaagcaaatcacaacgtccgcctgttcctcttcttcgctttccacgttgtttccaatggttcaaagatactaatttgaaagcaaatcacaacttcttctcgttgcaaatcatcgaacaccatgttgtttccaatggttcaaagatactaatttgaaagcaaatcacaactttccttctggtcttcctcgtccttgcggggttgtttccaatggttcaaagatactaatttgaaagcaaatcacaacgtagattagtatttgaattttttacgcattgttgtttccaatggttcaaagatactaatttgaaagcaaatcacaacagactggatgcaatgttttaatataaaaggttgtttccaatggttcaaagatactaatttgaaagcaaatcacaacgccgacttcgaagaatacacggacgcggttgttgtttccaatggttcaaagatactaatttgaaagcaaatcacaaccttgctcggttacagtcgtttttgagaaggttgtttccaatggttcaaagatactaatttgaaagcaaatcacaacggtgcattcttgatagcctgtaatgagtcagttgtttccaatggttcaaagatactaatttgaaagcaaatcacaacccatactgctgattcaacgcagacagcgcagttgtttccaatggttcaaagatactaatttgaaagcaaatcacaactgaccccttacggatcaagtactctgtttgttgtttccaatggttcaaagatactaatttgaaagcaaatcacaacaggctacagatgaacgacctgatttgcgcgttgtttccaatggttcaaagatactaatttgaaagcaaatcacaactgttacgggtagacgatggtacttacaacggttgtttccaatggttcaaagatactaatttgaaagcaaatcacaacttaatggaaaaattgtcaacctcaaaccttgttgtttccaatggttcaaagatactaatttgaaagcaaatcacaacgatttgccgaatgatcttcccccgtactgcgttgtttccaatggttcaaagatactaatttgaaagcaaatcacaacttaatcgcaatgaactccgatggcgttaccgttgtttccaatggttcaaagatactaatttgaaagcaaatcacaactcagtttgcccgcattggaataaaattgtagttgtttccaatggttcaaagatactaatttgaaagcaaatcacaactccatatacttgataatatattgtacgtgcggttgtttccaatggttcaaagatactaatttgaaagcaaatcacaacatcgtgctgtttggcacgctgaattttatagttgtttccaatggttcaaagctactaatttgaaagcaaatcacaactgcttggacggtatctccgacttcggcaaggttgtttccaatggttcaaagatactaattaaaagttgaatataacatggatgtgaaaagcataatgatatatggcactgaataaaagtaccgggaacatgtatgccttcgtttcacatacatataacccgatgaaaggcgaatgtgaacactcttgttcatattgttttatgagacgtaaacttctcctgcctcccttgcgtctggagctgaaggaactgaaagtgaatctgggtgaaggcaactttatctttgtaggcagcagtacggatgaatgggcggctaatgtcccgtcagaatggattgagcagatactggactattgtgacggttttgataacaagtatctcttccagtcaaagaatcccgcccgttttctgaaatatctggagcatccggttatgaagaaatccgttctttgtacgaccattgagacgaaccgtttttatccggatataatgcggaatactctggtacctcaagaacgtgcggctgctatgcaggagatcgccaactatggaatccccacctatgtaacttgtgaacctctaatgaaatttgatccggcagaattggtggaactggttcgtatgtgttccccttggcaggtgaatatcggtcgtaactcacggtatgatattacccttcccgaaccgactgcgaatgaagtgaagatgttaaaggcggaactggagaaatttacaaaagttgaggttaaggcgaatgcttattgctggatgagatagattttaatgttttgtatgaagaagaggtgatgttgtggtgacatcgccttttttatttgttatgtaatataatataatgtttcctccgctcctttttatcctttattccgggactctaacggagtcatctttgtgagttgttttaaaataattactaaaaagaaatatttggaaagttcagtgaattggagatctgttgtatggaaagggttgggagtataaaaaacaagaattagttattaaaataaggtaaagcagtaagttatttcgattattgtatgttctgtagtgaggaaatagtgaaatgtgaataatgagggagtgattattgtttaattcagataaaacgttttattcgggtcattcaatatctataagttcacgtttgattatatttatttagagaaataattttatatggcaacagtaaaagttaaattccgtgcatcttccgtcgcaacgaaagaaggcacgcttttttatcaagtgattcataaacgtatagtaagacaaatacataccggatacaagttgtttcctgcggaatgggacgcggtacattcggagattgttctgtcctcagtaaccagtgaaagtcggagagattacttgctttctttgaagaattctctgttggaggatagtgtaaggctgaagaatattataacccgtcttgaacgttcgggcattgcttatacttcagatagtctggtgaagctttattgtgcatccacagagaataatggttttgtatcctttactctaaatcttatcaaagagttaaatcaaatcgggaaacaccgtactgctgaaacttatatgactacattaaacagcttcatacgtttccggaaagggaaagatgtcctgttggaggaagttgattccagtttgatgatgaaatatgagagctatttaaagtctaccggtatttgtccgaataccacttcttattatatgcggaatcttcgggctatttataatcgtgctgtggagaaggacttgacggttcagcgaagtccttttaaatatgtatatacagggatagacaagacggtcaaacgtgccattccgttagaggagattcgtcgcttgagggagcttgatctaacaaggagcccttctctggcttatgcgagggatattttcatgttttcattttatacccgtggtatgtcattcattgatatggcttttttgagaaagaaagacttgcagaatggtattttgtcctatcgccgacagaagacggggcaacagttgttcatcaaatgggaaaagccaatgcaagaaataattaataggtatgatactcaggggagcccgtacctactacctattatacgagatctggaggcggacggaaggaaacagtacaagaaaactgctcatttggtgaatctaaaactgaagaaacttgggatgcagttaggattatctatacctttaactacatatgttgcccgccatgcctgggctagtatcgccaaaagtaaaaatgtagccttatctgttatcagtgaagctatggggcatgattcggaaaatactacccgcatttatctagcctcattggatacttctttggtagacaaggcaaacagtcttattcttaattcattgtagaaatgagataatctaccatatagccatgaaactgtaaatcggaaatatgtatcaaggggtatgtatgatttactgttgtttttttacatattaaaactttcctaaagtaagggcataacaaagttaaacgggaatccggaacggtttaatagtcattatgcatcattcttaattctataatgatatcgtactggttattaaagagaaactacaagaaaggataatattgatataagctaaatttgtttagcaaaatatagttctctctataagagaaatactaacgggtacaaaggtacgtaatttattggaaataacagcataaaacataatgtaattttgagtaattgcttcttctagagaaggacttactcaacaaatgtttaattattatcgattatataatgattataattatctgatatctatgtgattaaattaaatattacatcctgttatttatcttatagagagaaataaaaagtaaggttgtaaatagaccttgaatgcatcttgtatggtgaagatgagaaagtttaataatagtggggagggatctctaacttttgtgaaatatgatgataactgcttgatatataacgctgtatgtaatcaggtaggattagaattattgtcttgaggttttatggcgctcctgaaagatgaacaacgaatgcattggtatgtgatgcgtgacctcaaacgccctaatgctaagttacctgcttataagcagcttagtgatgaacatctagaagtatttactcctatgcaatggcggttgaagttaaaaaatggtaagcgaattcgtgaagaagtaccgtttatgcaggacctgctttttatccacgatacaagagaagttctagatctgtttgttcgtaaaataccgacccttcaatatcgttaccagaaaggtggcggttattgtcagcctatgattgtttccgatttggatatggagcgttttatacgtgctgtcagaggttcggaaaatcctaaatattatttacctgaagagataagcgatacgatatatggtcgtatgatccgtattattggaggtccttttgaaggttatgaaggccgtctgcttactacccgtggctctaaagtcaaacgtcttcttgtcgaactgcctaatttcttttcggtgggtgtagaagtaaatcctgatttgatagaaataatataattatgtacgatttatactattattctagttgcttataatcagcgttgtaagaatatatgataattaattgggggatttaaattatgaaacacgcatttgaccgttttattcactatttacagaaaaactactttagctattgggttgtattgggaatcgatacattcatagctttactgtgtacttgggtgtcatttattggcattcattatattacggaaacttccaaagaaatagtttcgcttttccatatcttggcggtttcagttatatcgagtgttttgggggctactctatttcatacttatcgtaatacgattcgtttttcccagttgaaggaattatggaggttggcgggaagtgtgctcataaag

SEQ ID NO: 2128 - DNA, 24296 bp, synthetic construct
  source 1..24296: mol_type = other DNA
  misc_feature 1..24296: note = Synthetic
tttcagtaaatgctgttgcggagaatttactattatttgtcttggaatgcacgagggaaatttcagaatctttgattattatatgatctgcccattctccacccagatcatctaatactatgaaatcactatttttgaatcgttcctccacatagttaaatgcagagtttttgttaaagaatttggagctttttgacaaatttcctttttccgttgtaataccattaacggaaccttcatctataaatatactgagaaactgttctatacttcccaaaagcatgctgtctttgaataattttcgattcgcataagtataatcgcactggtcaaaatttataaaaaaggtgcttctattatttgtgaaatccatgaaagaaatagacgtgtcattatttcttaaaagatctagatttctcaggcggtttgaataaattcgtatgctcttttcgccaagttttacttttaaatctttataaatgggattttctggatttactaccagataagtatagttatcttcacccaagtttaattttaaaaactgacttaatttcgtgattagcttgttaatattgatttttctgggcaagtagtctttgtatttatattgagctccttctatagtgccattttcgatttcatcaagtaaacgagtgaataaaatagttaaggaaataggagttaaattatctctctctttagagtattcgtaaggcttagcaaataaatctaatggagtttctttttcaataaagttttcaattagagaaatcaagtgcgatgtccagtcgacgagcttaattattgatgttttttcacctgatttcgcaattcttgatgtgttgagtgatatagtaaagcgatcgttctcattgttcagtcttaaaaaattcaacatatatgtatttgcccctacataattaaaactatctttaagactctcagaaacaactatacgggccttcattgcagtactactggtatcaaggttatccatagacaatttttccagcaatgatttagttgtgaatagaactccgcttattacttcatatggaatagattccactgtttgcattatacttctaagccctgaaatatttttctttgttattatgaggtaattaccaaaatctattaaaaaaaggtaggctaacttgacctcctcccaatattttattggttcagaaataaatgatgcttccgtatgatacttcaatattaatgctgacaatttataaggcttaccgttcagacttactccttctttcaattctaatttatctaaaattatacaagacaaatctgctttttcacctttagattgttgaaaaagatttgttattgctcttttggagtaaaatttattactaagctttttataaatatagacgttttcattcagtacaatcttagcgaagttctctgttgtttttttgctcataatattaactatttcatagtccaacaaattccgacgcatttatagcaacggctttttcaataattgcttgaagacttttgcatgttgttttaagattaataagcgcctgatcagagctttttttaggatgccataacgtggtatttggtaaaacgtatgtctttggatcatttgtatttttaaaatgatcatggtaccctaatttttccatatctgctttaacttgcgaatacgatttattaacatcgtatgatattaataagtttccgatagttgttcccatagtattatctttaatttttgtaaatgtatactgttgacagtattaaagaatacggttttccgtaactaacgggaatcgatatgaattttgatatgtgtttcaagatgttgaatgataggtgtttgtgctttttagtataaaaaatcaattttcattgaaattttcttgaacccattgggaatcaaatcttgttcgaatgttagcgtttaaataatatgcgatatggttctaattctactcaatacatcaatcacgatttattatgtgcgtttttaatttcgtggcataaatattaatttttggttattatactgtagatcatagtattggtatgcgaggattatcttcaacattaatacctatagtgcagttgtttaatttttatcttgaagctagatatcaggcttagtctgttttttgtatttataaattcgtgttttctggacccatttaattttctcattttataaatagagctcatggattagactggtgctattctaacccgattttataaaatttctatgttttacggttaaccgtatttaatagcactatataattaacaatttgcattataatattagtctttttaataaaactattatggcaacttatcaagttatttgcatcaacaagctcaatataacgaggttttatgaatatattactcaggctgggtattagccgtagccgaatctttagtaagatactttttgtgctatgtatttttttcttaatttgccgttaaacttaacgctcactctcttttctattggaaactcatgcttattttactgatattcgcgtacatattctcgctgaacttgagactgcaaaagtctctatttatgtcgctgtcgcttggtttactgatgccagacttttcaatgtaatctgcaaaaaggccactgaagggattgatgtacagttgatcattgtagatgatcatataaatagtagctcatcgcttcgctacgaagaactaattgatgcagggggacgttttttttctattgattctgcgcgttttggtaatctgatgcataataaattctgtgttattgacgcttcaacaactattaccggctcttttaactggagtatccgggctggaagtaatcatgaaaatattactgttactaaagataatacggtactcgccgaatcttttctttctgaatttaaaagtattaaggtacagtatcatgggcatgatgtcttaaagatctttgatgcgatagcgataaataaaagacttcaagtgatcaaaggacttattgatcttgatgagacagaaatgattcagtcccatgtagacaagattgctgagtttgaattgactagtgaaatacttgggttgttagagctagtggatagtaagcggtatgtacgggcttatgaggcgattgatcagtatctcaaaaaaaatcaggctcttactgttgatgatgaagttagactaatgaggatccggtgggaaatcaaatatctggaaatagagattatttctatggaaaacgagagatcgactatacagaagatgatatcggatttcgtacatgcttatacacttgcttttggtgatatgatcaaaagaatcttacagctgaaaaaggaaaaaattgcgcagcaaggaaatagtaagggaaaaaaaattgaacaagctgaaaaagcatatcgggaatatgagcagtattttgatcgggaaaagcagaaaaattccttaaaactgagcgaagatgaacgcagagagatggatgggctcaagcgtaaagcagtagtactttgccatcctgataaattcccgggagacgtgcagatgcagcaaaatgctgaacgtatttttaaagagctgatgaattcttatgataacaatgatattgccaaggtaagagagatactctccaatttagagagtgggttatatgatattgaggataggaagcagataaataaatttgatgcattgatgaaacagcttgaagtaatgaaggccaagtatgcccagctacaggttgaattgagcttgctctataaggataagacctataaggatatccgctcgatacgagatatggatgagtattttagggatgaacgtctgcgatatgaaagcgaattaaacaatttagaatatgagtgaagataacagattgttggcgaacgcattgtctagtcagattgctgcggaaaattccgcttcgacgctttttgggctgaaaggaatggcgctaagtcctctggcgtatgcagcaagagtgacaagaaaaaatccatgtgcatttgtcttattgcttgatcagtccttttcaatgtcttcaaagatgagcaatggaataagtagggctcaagtagtgacagacatagtaaatgacatgcttgagaacttgataatgaaatgtcagagagatagtattgttcgggaatattttgatgtgatggtgattggctatggtaaaaccgagggttcacaaagagtaagtttcggctgggaaggaaatcttgagggaagaagctgggtaaatattagtgaactcaagaataatgtttacaagacagatgtagtggcaacccagaagcagatgccttggggtctgattccgaatacccaaacaaaaaaaatatggataaatccctatagtgtggctaatacgccaatgaaagaggcacttcgactgtgtcgcgaagaacttttagactggactgcagagcatccggaaagctttccgccgatggtattcaatattacggatggatttccaactgatgttgcaacactaaaagagttggttgatagctgtgaggagatcaaaaaaacgggtacagatgatggtcagacacttctctttaactgcctaatcacggatggagtcgagaatattctaccctctcatggtactgcactcggttttgaaggtaacgattttcatatgtctttatatgaaggtgcaagctttcttccccatgagctaaaaaaaatggccagtaaggtgtttggtgatgaacgctttgtattaggacgtacaaaaggagttatattgaactcaaccgcttcaagtttaattaatttacttactataggaactatgattacccttgccaatgtcgccgattaatgcttttcgattttcctgttccgatccctttgataaggaaaatgaatcggaaaatgaggacgcaatattctattgcggagctagtcctgattttctcaaagcagcgatttctgatggggcagggggagcggggatattctgcggagactgggctcgccatttagtgaataatcagccggataagccttttttatcaaaggacaaagctgaggaatggtttttaggggtctctaagaacttttatgatagcaaggttactcagttggatgccagcgatgcgttcattgttgaaaagttccataatgatggatcctatgctactttggtgttgatctggtgggatacacttcgtgctgaactgtattattggggacatggagattctacactgtttttgtttgaaaagaatggggatcggtctatccctaagctgatttttccgattggtgagcagtcgtcgcttaatgaccctcctaagcttttcaattggaacaaaaaacttgatcagaggatacaagttgaaaaaaaaatactcaaatctgatgatcagctgattcttacgaccgatagcataagtcgatggcttattctgcagttaatgttattgtcgcctatggaaatgcctactttgcttggtgagcagctttacagttcggtaagtaaggagggagaacttttggaaagcttaaatctgagaaaagaatttaattcaactacagcgctcttggagtttatagaaagggggctgcaatgcccatatattataatacgaaaaaacctaagcgaccggatcgaacgggcggagcttgagaaagatgatttgagtattttaatgttaacaaaatagatgtatcctgataacttacaatacaaacattccataaggaatagtttttttgatcctgctgaggtggggacggtttttacaccagtcctgcatgaagatgaacccgttttcgagtcagggaacaaagccattgtttttaaggtatctgataattcgacgggacagtataaagcactcaagctgtttgcaatggaggaggctgatcgtttttcgcgatttgagcggattagttcttacctaaaaggattcaactcaccgtacttcgtcaattttgagttttttagcaacctgatctatgtccaggataaaagttatcaaggaggagcttattatcctggggtagtaatggactgggcaaaaggagtaaccttgggcacttgtcttcggaaactttgtatcgatcgaaataaaaaagcaattgcgacacttgcggaaagcttcaagcagcttgctctttttcttctggaaaaaggaatcggtcacggggatttaaaacatgataacattatagtttctgatgaagggaagcttattctggtagactatgattgtctttatacgcctgcatttgccggaactgattcagttgagctgggtactgatgcctttcagcatcctctacgttctgcaaaggattttaatgaaaggatcgatgatttttcaatcttgactatttacacttctatactcgctctttctaaacatccagggctttatgagcagtttaatgatcagcataatctaatttttactaaacatgattttagttatcccgatgattcattactttttgttgaactggcgaaggacagtcacttgtgtccctatggatatctcattaaacgatcctgcaggtcttcttttatctatattgatgagcttgagggaattttgagaggtaatataccaaaacctacaattttgatttcgcagtaccctgtaaagcccttggctggtgaatccgttactgttagatggatgacgcaatatgcagactacttgactcttgagggatctacttatccattatcaggggaagtgaaacaagcttttcttgaaggcgcagttgtgaacttcatatttgggaatgagctgatcgaaaaaaatcgtcaatacaaagtaaagcttcacgcgagagctgaggtcttacatttttttgtggattcagacattatacctgttagtgaatcagtgaagatttcttggaaggtaaagggagcgaaaaagataacacttatcttcgatgggcttgctgaattagtaggagaggaaggcactaaagtggtgagtccgaacagtgactgtatatgtaagctcttagttgttgaacttgattgtaagactcagatagaagaagtactaaatattcaggttaaaagaaatgttaatatcaatttttttttatctaaagatagttttatcattgagtccataaagacaaaattgagatgggatgtggactatgctgatgagatcagtattgagtctagtctgggagagagttttaatcatctcagcggaaaatcattagaagtagaaccccaacggtcggtcacatacacattgacggctaagaatgcacttttttcggcgatttcaaaatgcgatatatatgttgacccaaggccccgtttgaatctggttttgcctaatattgtgccagacaaaacatcactggttccaggttttccaattgaccagttgtttacagataatagagagcaatccagactattttttgaagaggttttcggtgttcgtcgtaagaggtcgagtaaatcattttttaaaaaaattctccaatggaaagattgattggattgactaaattgcagcgttttttctgttgtctagcaggttatgaccgttttgttttggcatattgtcctacgttgtttaacgcgttctcgggtatcggttatttggtgttgctaggactttttgctctttctgcttcggtcttcgtctatgcaagagacttatttggttttacgcccagtacggccttgttttgtgctattgttcttggtattctaatgggttttggttttaagctctcggcttttttgtttcaccgaagcaattcaatcagtctattgatccctctactgatgttatcgattccgcttgctttcttagtagcctatggtctttcttttgggatttttaaatctgaaatactggtctatattttttttaatgattctcggagtgactcatggtcttcccgttcactattgctttttgatctctgcacagatggggatgaaggtagtagcattttgtcaatatgtatctgtattgcgctttttgtgaccttactgctttcagcccctttcgtgctgatttatcattaccgcaactccatttattatcaaacgttccaacgatatgtccaagacttttcaaccagatgaggcggagccaataaaggcttattcatcattacaatattttttctggctgatgtcaggctgtgagatccgtattttaaaggaatgtcctactgattataaccgacaggcaggcattggctttactattttcatgacaacactttttggtgtttttgcaggaggatatgccggttattattttacagaaaactttatgactgcctcgattttcggattgatatgggggctattggtgttttcgattgaccgtacgctggtggtgacattaaagaaaaatcctactaagactaaacaagctattttgcttccgcttttggggcggggagtgctcgcattgttgatcgcctttatcatttctattcctcttgagcttctaatcttttctgaccaaatcgcaatacagagagagtttgatcaggaaaaaggaaagtcagatatcatgaaaatcagtaaagagaatggaaatataggggataagagagaggctgctgttgaggcggaacgtttagagaatgaagcattagaagactctaaaaattgtgcttcggacgctgagtttaggtcaatccgtagtgcctttgatacaaaatcagccgaatttcggcaggtaaatggtcgttataaaagagtaagagaaaaattagctaaactaaggaatattgatgataatggatatatggcaaacttgtttctgtcaggtcgtgagtatcgcgtagtcgagggcagctacaatgtacttaagcagcaaaaggacgtactatttcagaggatgtctcaacgatgtcggatttactcgatagagaagcagaaactggctgatctgcagaggaatctcagaacaaaaaagatggcagaaatacaatctgtgaatgaagagtctgagcagaagggggataaggtgaagaggatgtatactaaaagctttattcgagattttgtagcactagaaaatgccgcttatgcaaccgaaccgagaaaaaacgataaggagcctttgaagtatacgaatgagtcgttactgagttttctctggttgataagggttctattctttattattgagattctgccgactgtggccaagatcgcgacacctataggtgcctatgaccgtgcaatatatgcgagggaaaaagactttgaacttcttttggaactcaagacggcagattatctagcgcatgagcgagaattgagaaatattgaggaagaggaaaaagtgagaaaacaaaaggctagagcaaagattgaaggtgaactacatgatgagctactcagggagatcgcacttgcccagaatgaaatcggcaggaaaaaaatcgaagcttttaaaaaggctcaccaggtacacgtggattagaattctgctatttaatacagataatatcaatttttgtaaagtgaaacccgtattagaccacctgtaaggtttcttcaggacgagacagcgctggatcttgtttatactgatgatctcattgccaatcgagaatcagaaaggggctgggtttgcaagactttatttgacttttttactcttgaaccttaggaatttgaagattttttggattgactctatctaaatgcttttgacataggaaattcggagagcctaatctctaagatacaacttctgaggtcttttgctactatgatgaaatagagataattggggtggtaagctagctgcaatagtagctcatcttttggttctttataaaaaagccccgtattgtaagacgaggcacttaatgttttcacaacggaataatccttattgtgatttgctttcactcaaatgtagttattatatattactccatatacgggaaaccgtattttattaaattttttatttttagctttaaaaaacgctaactcagagttatgaaaaaaattttaggaattgatttaggtacaacatccattgggtatgcacaggttaatgaaagtgcagattttggaaaatcatcaattgaacgaattggagtacgtgttaatccactaaccaccgatgagcaaaccaattttgaaaaggggaagccaatttctataaatgcagatagaactttaaaacgtggtgcaagaagaatgcttgaccgctatcaagatagacgttctaatttaattgatgctctggccaaggcaaaaatcattacggaaaatacgattcttgccgaggacggtaaaaacaccacccattctactttagccttacgtgcgaaatctgttaatgaaaagatcgaaaaagaagaatttgccagaatattactgactatcaataaaaaaagaggttataaaagtagtcgtaaggctaataacgatgtcgaagggatggcaattgacggcatggctattgccaagaaattatacgatgaaaatttaacacctggtcaattagcttatcagttattaaaagagggtaaaaaatacttacctgatttttatcgttcagatttgcaggcagaatttgataaagtatggagtttccaggagcagttttatcctgagattttaactggtgagcttaaaaaggaattggccggtaaagggcaacgggctacttcagctattttttggaagacctgcaattttaatacagcagagaataaaggtactcgagaagagaagaaattaaattcttatcaatggcgaagtaatgcagttagcaataggctcgagaaggaggaagttgcctatgtgattacagaaatcaacagtaacctaaataattccagtggttatctgggagcaattagcgatagaagtaaagagctgtattttaacaaacaaactgttggacagtatttatataaacaaattcagaataagccgaatacaaaattaaaaaatcaggttttttatcgccaggactactttgatgaatttgaaacaatttgggaaacgcaagctaaatttcacgcagaacttacagatgaactaaaaaaggaaatccgtgatatcattatcttttatcagcgaaaattgaagtcacaaaagggattagtaaacttttgtgagtttgaacgtaaggaagttgagatagaaagaggaggactgagaataaagaaaattattggtttaaaagtggcacctaaatcatcacccttgttccaggaatttaagatttggcaggttttgagcaatattctaatcagaaaaaaaggaagtaaaaaagggactgttaaggtggaagatgatggtgtcttatctgagggaacggaaatatttgttttcgatctgcaggcaaaacaggttttatttgatgagttgaatatcaaaggaaacttaaaatctaacaaaattatcgagttgttaggctatgatgcaaaagactgggaaatgaattattcagaaatcgagggaaaccgaacgaacaaagctttatataatgcctacctgaagatcatcgatttagaaggttatgatacaaaagagttgttgaatgtaagttcaaataaagatgagttagatctggatgatataaatattccagtggttaatatcaaagatatggttaaacgtatttttgaatcactggaaataagtatagaaattttagagttcaatgcagaacaggatggtaaagcttttgaacaacaggcctcctaccaattatggcatttgttacaatcttatgagggagacgattctccaagtggaaatgaaaaattatacgaacttctaaaacaaaaatttggctttaaaaaagaacattcacaaattctggcaggtgttgccttatctgatgactatggtagtttgagtgcaaaagcgatgcgtaaaatttatccgcatattaaggagcagacttttgataaggccgctgcagttgccggatacaggcattccgcagcatcattaactaaggaagaaattgctaatagaccgttgaaggataaattagagttagtaaagaaaaatagcctgcgcaaccctgttgtagaaaagatacttaaccagctcgtaaacgtaattaatgctttaattgagaccaatagcgaaaaagatgcccatggaaacattgtaaattacttcaggttcgatgaaattagaattgagttagcgcgagatttaaagaagaacgcggatgaacgtgctgaaatgaccacgaatattaatgcagcaagaattgctcatgaaaaaatattcaaacttttacaagcagagtttggggtgaaaaatccaacaaggaatgacattatccgttataaactctacgaagaactaaagaataatggctataaagacctgtacaccaatacctatatttccagagagattttgtttagcaaacaggtggacatagagcatatcattcctcaatcaaagatgtttgatgatagtttctcaaataagactattgtatttagaaaggataacctggataagggcaatagaacagcaattgattacatagatagcagattcggcaaagaaaaattagctgattttgaggagagaatagaattcctttttgaacagggaaagaaaaataaagaagaggggatatctaaagccaaatatcaaaaactgttaaagagagaaaacgatattggtgatggatttatagaacgtgatctaagagacacacaatacattgcaaagaaggcaagaaatatgctttatgaaatctgtaggattgtgaccccaactacgggaagtgtaactggtaggttacgtgaggattggaacctagtcaatatcatgcaagagcttaatattgacaaattcaaaaaattaggtttgaccgaaatggtcgagaaaaaagacggtggctttaaggagcgaatagtgggctggagcaagcgaaacgaccaccgtcaccacgcaatggatgctttaacaatcgcttttacgaagcataaccatatccaatatttaaattatctgaatgcccgtaaaaatgaaaatcacaagcaacacgataatatcattgcgatcgaagaaaaggaaactaaagtcgttattgatgatttaggtaataaaaagcgaaaatttaatttgcctatcccaaactttagggaggaagcaaaaaagcacctggaaaatgtgttgatttctttcaaagcgaaaaataaggtcgttaccaaaaacaaaaataagacaaaatctgccaaaggagaaaaaactaaaattgagcttacaccaagagggcaattacataaagaaaccgtttatgggaaatatcagttctacgtttgtaaggaggagaaaattgggccaaaatttgatgaaaaaatcatccagaaagtagcgaaccctacttataagagacttttgttggaacggttagtcgaaaatgatagggatgcgaagaaagcatttacagggaaaaacgctttagttaagaatcctatttatttagataatacaaaaatgttggtcctaccggaaatggtaaaattgacgtggttggaaaatgactattcaatcagaaaggacattacacccgaaaacttcaaggacattaaaattatagacaaaatagtggacgaaggtgtgaagcaaattttaaaagaaagattagcaaaatacaacaataacgcaaaagaggctttttctgatctggaaaaaaatcccatttggcttaatgaagaaaaaggtattgctattaaaaaggttaagattagcggcgttaacaatgctgaacctttgcattacaaaaaagatcatctgggaaatgagattttagatcatcatcaaaagcttgtccctacggattttgtgagtacaggtaataatcaccacgtggctatttatagagatgaaaaaggtaacctgcaggaaaatgtggtttcgttctatgaggcagtcgcaagggtaaatcaaggattgccgattattgataaaacattaaaagcatatttgggttggacgtttttatttaccatgaaacagaatgaatatttcatattcccaaatgagcagacaaactttaatccttctgaaattgatcttctagatccaaagaacaataaactgattagctctaatttgtttagggtgcagaaattcactattaaagactatttttttaggcatcatttagaaactaatgtggaagataattcacaattaaagaacaccacctggaaaagggaaggattaggtggcatcagcaatattgtaaaagtccgtattaaccatattgggcaaattgtaaaaattggtgactactgaaaaacgttacttgagataaaaagccaaagtaaataacgaaattctaacatattctctcatgattaaaagaaccctccacttcggcaatcctgcgtaccttagtttacagcaaaatcaactttcaattgatctgccgcatttaaaatccttaggagaaagagaatcaaaaaagtctattccaatagaagatattggaataatcatattagataaccaacaaataaccataacacatggttgcattgctgcattgttagaaaataatgcagcaattattacctgtaaccaaagtcgccatcctactggtatgatgctcccaattgatgggcacaatacacaaagtgaaagatttcgttatcaaatagatgcttcacagcctttaaaaaagcagctttggcagcaaaccgttcaggcaaaaattttaaatcaggctgcgatactttttgatagagatattcccagtaaaaatatgattcattgggcaaaatcagtacgttcaggcgaccctgataattatgaagcgcgagcggctgcttattactggaaaaacgtttttcctaaaaaattagatttcttcagagggcgtgacggtgacccgccaaacaacttattgaattatggatatgctatactacgtgctatcgttgctcgtggtttggtctgttctggtttgttaccaacattaggtattcatcatcggaataagtataatgcttattgtctggctgatgacattatggaaccttaccgtccgtacgtggatgagattgtattggggataatagatagaggtgaaaattttttagagttgggtagggatattaaatcacagcttttggagattgcaacggttgatgttcagtttgaaaaaaataaaagccctttaatggttggtctgcagactacaacttcttcactggcgaagtgttacgaaggtacggtccgaagaattaactatccaataatgaaaaatttcgacactagaaaatcatcgaacttcaaagctgatgaggattaaaacttgatctttatttataaaattaccgatcggagcaagaagcttttgatgaattgctattttaattgatgcgtttaaatgaatatcgaattttgtgggtattagttttttttgatctgccaaccgaaactaaaaaagaacgaagtattgcttctaaatttcgtaaggaaattttaagggatgggtttgcaatgtttcagttttccatttatctgagacattgtagtagcagggagaatgcagatgtacatattaatcgggttaaacgattgttgcctgagaaaggtcatattggtattatgaccataacagacaaacagtttggtatgatggaattattttatggaaagaacgaaaaagcattgccagatactcctcaacagctcgaattattctaaaatacgaatattacaataacaaaaaatacttagaataaaaatccggacacatttgtgtccggatttttttaattctaatttcttgtttaacctactgaattatagcttgttgtgctatttggtggtgttgtaaatatcagtagttcaaagagtgaaagcaaatcacaacccagccttaaccctgatcaatattgcattgggtgttgtaaatatcagtagttcaaagagtgaaagcaaatcacaacccagctcccgtctatttccgctaaaaggtcggtgttgtaaatatcagtagttcaaagagtgaaagcaaatcacaacgggttgtcctcgtgtctacctccgacgtaggtgttgtaaatatcagtagttcaaagagtgaaagcaaatcacaacaatgctgattcgttcatgttatttaatttaggtgttgtaaatatcagtagttcaaagagtgaaagcaaatcacaactagccaataaaaaggctataccattgcttggtgttgtaaatatcagtagttcaaagagtgaaagcaaatcacaacactgtttctaacaaattccaacaaaactgaggtgttgtaaatatcagtagttcaaagagtgaaagcaaatcacaactagatagaaatctttcagcctgtgttgttggtgttgtaaatatcagtagttcaaagagtgaaagcaaatcacaacaaatcagttggcagtttttcagtaggaataggtgttgtaaatatcagtagttcaaagagtgaaagcaaatcacaactaaaataacatgctgtatctctttcgggtaggtgttgtaaatatcagtagttcaaagagtgaaagcaaatcacaaccaatcgttaaacgagagttttccgcaactaggtgttgtaaatatcagtagttcaaagagtgaaagcaaatcacaactggcatgaagaagaaaaataagatcgggagggtgttgtaaatatcagtagttcaaagagtgaaagcaaatcacaacataacaataagttttaaaatgattaattaaggtgttgtaaatatcagtagttcaaagagtgaaagcaaatcacaactcagatagatattgctaaacccggttgctgggtgttgtaaatatcagtagttcaaagagtgaaagcaaatcacaacatactttcatcaatggtgaagcaaggaatgggtgttgtaaatatcagtagttcaaagagtgaaagcaaatcacaacactttcactacaactagcaacattgatctaggtgttgtaaatatcagtagttcaaagagtgaaagcaaatcacaaccttcataagaaatctgttcctgtatgttagggtgttgtaaatatcagtagttcaaagagtgaaagcaaatcacaaccgcgaagatgtggttgtattttaccggatcggtgttgtaaatatcagtagttcaaagagtgaaagcaaatcacaactattacggctccttccattttccattttagggtgttgtaaatatcagtagttcaaagagtgaaagcaaatcacaacgcgttcatgtgttggtgtgttcacattacggtgttgtaaatatcagtagttcaaagagtgaaagcaaatcacaactgtgtgaatgactttctttgtttagcatatggtgttgtaaatatcagtagttcaaagagtgaaagcaaatcacaacaagcgccataacagcaactccaataagcaggtgttgtaaatatcagtagttcaaagagtgaaagcaaatcacaactgttgtgactatttcccattgatcaccagaggtgttgtaaatatcagtagttcaaagagtgaaagcaaatcacaactagccaatccccactctaaaagatatccgcggtgttgtaaatatcagtagttcaaagagtgaaagcaaatcacaactgttaacatgggatgggtattgtatgaagtggtgttgtaaatatcagtagttcaaagagtgaaagcaaatcacaacgagtttcagtcaaatgaaatcgtgaattgaggtgttgtaaatatcagtagttcaaagagtgaaagcaaatcacaacactctactttataagtaaatccctttgctgggtgttgtaaatatcagtagttcaaagagtgaaagcaaatcacaacccccatcattaacgctctctggtatcaaagggtgttgtaaatatcagtagttcaaagagtgaaagcaaatcacaacatcctggttttatctttggagtccaattcaggtgttgtaaatatcagtagttcaaagagtgaaagcaaatcacaacaatgatggtgccatcatacacaaagtacttggtgttgtaaatatcagtagttcaaagagtgaaagcaaatcacaacgtttgttactgctcctatgattgctatcatggtgttgtaaatatcagtagttcaaagagtgaaagcaaatcacaacattttttcttgtattgttttgttgctttctggtgttgtaaatatcagtagttcaaagagtgaaagcaaatcacaaccatccagttgttgaatagatcactttgataggtgttgtaaatatcagtagttcaaagagtgaaagcaaatcacaaccgataaacaagatgtaagtaagccagggccggtgttgtaaatatcagtagttcaaagagtgaaagcaaatcacaactatgtaccatggcgattcttttgatattccggtgttgtaaatatcagtagttcaaagagtgaaagcaaatcacaacctcattaatcgcaatcattttggtttccaaggtgttgtaaatatcagtagttcaaagagtgaaagcaaatcacaacaatcatcagtgccggtttttgcctttggttggtgttgtaaatatcagtagttcaaagagtgaaagcaaatcacaacaggagcttcaatttcatacactgtcaaataggtgttgtaaatatcagtagttcaaagagtgaaagcaaatcacaacatctctcgcatgatttaaaattttcccttaggtgttgtaaatatcagtagttcaaagagtgaaagcaaatcacaactccttctatactttcgtttatttctataggggtgttgtaaatatcagtagttcaaagagtgaaagcaaatcacaacccttttttcgcttcttttgttttacaaaagggtgttgtaaatatcagtagttcaaagagtgaaagcaaatcacaactagtattcttctttcccttcttctgttgatggtgttgtaaatatcagtagttcaaagagtgaaagcaaatcacaaccaacgtcgttttctgacaaacaaatcaaggggtgttgtaaatatcagtagttcaaagagtgaaagcaaatcacaaccagcgccgcgcttctatctggggctttcgtggtgttgtaaatatcagtagttcaaagagtgaaagcaaatcacaacaaagaaggagtgcaagcagcatacgatatggtgttgtaaatatcagtagttcaaagagtgaaagcaaatcacaacccctcatagtgtctatgttttgtagtgggggtgttgtaaatatcagtagttcaaagagtgaaagcaaatcacaactagcttcctagtgttatgaagctaccgttggtgttgtaaatatcagtagttcaaagagtgaaagcaaatcacaactctatggtcttttattgcttgtacgtctctggtgttgtaaatatcagtagttcaaagagtgaaagcaaatcacaacacatttttctcttattctatccagttctttggtgttgtaaatatcagtagttcaaagagtgaaagcaaatcacaactgaatgtatttcactatatagtttactgtggtgttgtaaatatcagtagttcaaagagtgaaagcaaatcacaacggggcctcttcggccccaaacttatgagcaggtgttgtaaatatcagtagttcaaagagtgaaagcaaatcacaacttgcggctgttgctccgcttaaatcagccgggtgttgtaaatatcagtagttcaaagagtgaaagcaaatcacaactagcttcctagtgttatgaagctaccgtttggtgttgtaaatatcagtagttcaaagagtgaaagcaaatcacaacgtgtcataaacatttcgttacttgctattgcggtgttgtaaatatcagtagttcaaagagtgaaagcaaatcacaactcacatgaataatttatgttctttccagaggtgttgtaaatatcagtagttcaaagagtgaaagcaaatcacaacccactactggtgcttgcattgttagtattgggtgttgtaaatatcagtagttcaaagagtgaaagcaaatcacaactgttcctccagttgggtatactgataaccaggtgttgtaaatatcagtagttcaaagagtgaaagcaaatcacaactccttctatactttcgtttatttctatagaggtgttgtaaatatcagtagttcaaagagtgaaagcaaatcacaacttattgaactcttctattgttttcttttgggtgttgtaaatatcagtagttcaaagagtgaaagcaaatcacaacctctagtagtttgtagtattcttctttccggtgttgtaaatatcagtagttcaaagagtgaaagcaaatcacaacgatcattcaaagtacaactagatgtattcaggtgttgtaaatatcagtagttcaaagagtgaaagcaaatcacaactttgcgtagtagtttttatatatatcccaggtgttgtaaatatcagtagttcaaagagtgaaagcaaatcacaacaccaaaactagttattattcagctgtaaaaggtgttgtaaatatcagtagttcaaagagtgaaagcaaatcacaacctggcaagtttttaaataaaatcaaatatgggtgttgtaaatatcagtagttcaaagagtgaaagcaaatcacaaccggtagttcaagacaagtcgcttggatcaaggtgttgtaaatatcagtagttcaaagagtgaaagcaaatcacaactatcaaattgttattcatggatgcccatttggtgttgtaaatatcagtagttcaaagagtgaaagcaaatcacaacctcttgcaaatggacggaagaaggcctcagggtgttgtaaatatcagtagttcaaagagtgaaagcaaatcacaacaggaagaaatgtatgagcgtcaaaaaaatgggtgttgtaaatatcagtagttcaaagagtgaaagcaaatcacaacactactcatgcaaaggtaattgcaattggaggtgttgtaaatatcagtagttcaaagagtgaaagcaaatcacaaccaatgcgttatcatcatcccccggctcaatggtgttgtaaatatcagtagttcaaagagtgaaagcaaatcacaaccattctgcctccgtgcaaccatcgcataagggtgttgtaaatatcagtagttcaaagagtgaaagcaaatcacaactgtggtattgtgttattatgtataaaataggtgttgtaaatatcagtagttcaaagagtgaaagcaaatcacaacgctatggaattgactttgaacaataaagggggtgttgtaaatatcagtagttcaaagagtgaaagcaaatcacaaccgctttaccattgtagtacgtataactgtggtgttgtaaatatcagtagttcaaagagtgaaagcaaatcacaactgtcaatacggcataatatgtcaagagagaggtgttgtaaatatcagtagttcaaagagtgaaagcaaatcacaactagcggttgttctattccttctcctgctgcggtgttgtaaatatcagtagttcaaagagtgaaagcaaatcacaactatcgaatgtgtcgcctggtaggcctaacaggtgttgtaaatatcagtagttcaaagagtgaaagcaaatcacaacttgaggtttgcgcgaatatgtgattgtattggtgttgtaaatatcagtagttcaaagagtgaaagcaaatcacaactccgttttgttttttgtttccgatccataggtgttgtaaatatcagtagttcaaagagtgaaagcaaatcacaacttagtctgtagcttcccatagctatgaagtggtgttgtaaatatcagtagttcaaagagtgaaagcaaatcacaactagtgataattgtgtgtacatttcatctagggtgttgtaaatatcagtagttcaaagagtgaaagcaaatcacaactgaagcaatgcgcgatccacgcgcaagggcggtgttgtaaatatcagtagttcaaagagtgaaagcaaatcacaactagtggttgttctattccttctcctgctgcggtgttgtaaatatcagtagttcaaagagtgaaagcaaatcacaactagatgatgacgatagtattattgctggtgggtgttgtaaatatcagtagttcaaagagtgaaagcaaatcacaaccatctaccgccgcagccccgctactcgaaaggtgttgtaaatatcagtagttcaaagagtgaaagcaaatcacaacttatacaactaagtatatgcacaaaggtaaggtgttgtaaatatcagtagttcaaagagtgaaagcaaatcacaacggattcgagtatgatataaggccagataagggtgttgtaaatatcagtagttcaaagagtgaaagcaaatcacaactggttagcgtacgagcttcctaaggcatatggtgttgtaaatatcagtagttcaaagagtgaaagcaaatcacaaccaacgaaagtcaactatacaataccgctacggtgttgtaaatatcagtagttcaaagagtgaaagcaaatcacaacagagtgatgatatcaaaaaaagtgaatgggggtgttgtaaatatcagtagttcaaagagtgaaagcaaatcacaactctaatcgattaacatctagcaaaccatcaggtgttgtaaatatcagtagttcaaagagtgaaagcaaatcacaactgcaaatatgtgattatatttcactgggtcggtgttgtaaatatcagtagttcaaagagtgaaagcaaatcacaacatggggaggtgccggaattagcagtacagggtgttgtaaatatcagtagttcaaagagtgaaagcaaatcacaacggtaaatcacttccgatttaaggaagtcagggtgttgtaaatatcagtagttcaaagagtgaaagcaaatcacaacggatctcttgggtacaagtaaaacccatttggtgttgtaaatatcagtagttcaaagagtgaaagcaaatcacaacacgtatggtattaaccagctggtaatgcttggtgttgtaaatatcagtagttcaaagagtgaaagcaaatcacaacccagcattggggctgtggtagtagaaaacaggtgttgtaaatatcagtagttcaaagagtgaaagcaaatcacaacataggtataaaacattaaagacatgaagaggtgttgtaaatatcagtagttcaaagagtgaaagcaaatcacaacctatattccaatcgttcagctcttgaagatggtgttgtaaatatcagtagttcaaagggtgaaagcaaatcacaacggttctgggtttgcgtacgacgactcctgtgttgttgtaaatgtaagtataaaagggtaaaagaaaatcataacttcaacgctttcggtggttggttatgcctctgtcagtgagtaggggagattcttaaaactactcaccgaattattttttggatactgcctttttggaatcggtacaatttttagtatccctgaaaaaataccccctgctaacatttttgtttgcaaagggggtataagtttttgattctaaatttggtgatccctctgggatttgcaccttgtgcaaaaatcaacgattttacaatacctgaatagattttgatattcgactcccgaatagcgcgaaattaacatggtttattgatggggtactataccaattttaattccttaaatagtgcatacaaatcagataaagcattgaattctttacgattgaaacgcaatattaaattgttagaccgtggtgattttttttagtctaacctctgaaaggaacgttttatataaattgagtttccgaataatctcttgaatattaatagagtcttcttcatttcctaaccaatcctgaggctccactacagctacagtcatatattttccattaccaaatctacctggtcttttgatttctttataatcattctctcttgccatctccatcagtttatgatggaattgatccctaatttcagcttgtgaaatatcgttatgaaaatctaaatcatcgggatgtgttgatattttgaagcatagttttgcttgttcaagttgtatatagacagggaatattccccattcagcccaatctaaaatagcacaccaaaaacctttgtttggattgttcacgaatttccagtccgcaatttccatttcttgttctagtaattgaaaaaaaccttgccagtctgaactaacccaatctctaatcttcttttctttaaataagtgattttcattttcaaggcgatttatc

SEQ ID NO: 2129 - DNA, 24290 bp, synthetic construct
  misc_feature 1..24290: note = Synthetic
  source 1..24290: mol_type = other DNA
gttacgacagaggatggtacgggtatcgtacatatcgcaccgacgtttggtgcggacgataaccgtgtggcgaaaacattcggggttcctcctttgatgatgcaggataaggatggaaatatgcgccctatggtggatatgaccggtaagttctataagctggaagacttggctccggagtttgtacaaaattgtatgaacgcctctgattatgatccatggcaaggaaaattcgtgaagaacgcttacgatgatacgaagacggataaagatgagacgttagatatagagatctgcatgatgctgaaggcccagaaccgggtgttcaagatcgagaagcatgtccacaattacccgcattgctggcgtactgataagccggtattgtattatccgctggatagctggtttatccgcacaaccgcttgccgtgagcgcatgatcgagttgaacaatacgatcaactggaaaccgcagagcacgggtacgggacgtttcggcaaatggctggagaacttgcaagactggaacttgagccgtagccgttattggggtactccgttaccgatctggcgtacggaagatggtagcgaggagaagtgtatcggttccgtggtagagttgtttggcgagatcgagaaatcggtgaaggccggctttatggagtctaacccttacaaggacttcgctccgggagattatacgaaggagaattatgagaagatcgatttgcaccgtccgtatgtggatgatattatcttggtttccgcttctggtaagccgatgaagcgtgagacagacttgatcgacgtatggttcgattccggcgctatgccttatgcccagatccactatccgttcgagaacttggaggagttcgataatcgtcagatctatccggctgactttatcgctgagggtgttgaccagacacgcggttggttctttaccctgcacgctctgggtaccatgatttttgatagcgtggcttacaaggctgtcgtgtctaacggtctggtattggataagaacggaaacaagatgtctaaacgcttgggcaacgctgttgatccattctctacgatcgagaagtatggttcggacccgttgcgttggtacatgatcacgaacgcttctccatgggataatattaagtttgatatcgatggtatcgaggaagttcgccgtaagttcttcggtacattatataatacgtattcattcttcgctttgtacgcgaacgtggatggcttcgactactccgatccggatgtggaatggagcaagcgtccggagattgaccgttggatcctttctctgttgaacagcttggtgaaggatgtggatggctacttggaggcttacgagccgactcgtgccggacgtgctatctctgatttcgtaaatgataacttgagtaactggtatgtgcgtttgaaccgccgccgtttctggggtggtggtatgacggaggataagttatccgcttaccagactttatatacttgcttggagacagtggctaagttgatggctccgatcgctccgttctatgccgatcagttattcttagacttggtcgctgttacgggacgtgagaacgttgagtccgtacacttgtccgatttcccggtttacgacgagtctaagatcgacaagaatttggaagagcgtatgcaaatggctcaagatgtttcttctatggtattggctcttcgccgcaaggtgaatatcaaggttcgccagccgttgcatacggtaatgattccggttgtagacgctcatcaacaagagagtatcgaggctgttaagaacctgatcttgaacgaggtgaacgtgaaggagctgaagttcgtggataatacggcaggtatcttggtgaagaagatcaaaccggactttaagaagttgggcccgcgctacggaaagatcatgaaggcgttggccgccacgattcaatcgatgagccaagaagatatcaacgctttcgagaaagccggaacgtttaccttgatggtagatggacaggaggccgttttggagcgtacagatgtagagatcatctctgaggatatcccgggttggttggtcgctaatgaaggtcgcttgacagtcgctttggatattaccgtaaccgaggatttgcgtaaggaggggctggcccgtgagttggtgaatcgtatccagaacttgcgtaagagcagcggtttcgatataacggataagatccatgtatccattctttcttgcgaggagatggatgaggcgatctatgattataaggattatatcgctaaccaagtattggcggaatctatcgaaatcatggataatgcgatcagcgacgctacggaactcgatttcgaggactttaaattgtccgtaaagatcgagaaagcttaaaaatagaatagcatttcttgcggaagaattaggaatgaaatataggaaaatcgataattatattatctttgcatgcaaagaagaaataatatgattttatattcattcttaattcttctttttgattgatatttgaacgattgttgaacctaaatttttttagaaccatggcagagaagacaagatattcagacgctgagctcgaggagttccgcgctattatattagagaaactggaaatcgcgaagagggattacgagcttttgcgatcaggggttacgaattccgacggtaacgacgtggctgatacgtctcctacattcaaggtgctggaggaaggcgcttctacgttatcgaaggaagaggcgggccgtttggcgcaacgccagatgaaattcatccagaatttacaggccgctttgatccgtatcgagaataagacctacggtatttgccgggagactggtaaattgatcccgaaagaaaggctacgtgctgtgcctcatgcgactttaagtatcgaagcaaaacaaggaggtgcaaagtaaatgagatattctaaaggttggggagcagtgttaatcataatactgctccttcttcttgaccaagtgctgaaaatatggattaagacccacatgcagttgcatgagagtatagagataactccgtggttttatctctattttactgagaatccgggtatggcattcggtatagaggtgattgggaaattattcctttccgtattccgtatcgtggctgtattgtttatcggatattatttgtataagctggttaaagaaaattataaattcggttttattgcctgtatatctttggtttttgcgggggcggtgggtaatataatcgactcgatattctatggcgtgatcttcgaccatagtttcgggcaactcgctacttttatgccggagggaggtggttatgcctcttggctgcatggtaaggtggtggatatgttctatttcccattgatagagaccgtattcccggattgggttccgatctggggtggacaggagttcgttttcttccgtccgatctttaatttggcggactcggcgatttgcgtgggagttttccttttgttaatattttatcggcatactttgtcggctagcctttcgaaagaagagaaataaatgcggagaaaattacggatatatggtatggctttattagccacgacgttgctggcggcatgtagtaaggttccggatggtattctgtcggagaaaaagatgcagggtgtcttgacggatatgttgctggctgaggccatggtaaatgtggattataatacttataaatccgataccatgaagcttgccttgtatgagtctgtattccgtaagcatgatattacacaggcggtgtatgatagctcgttggtgtggtacggccgtaacttggatatttatatggaggtctacaaccgggtcttggccgatcttaataaacggatcaataacttaggggatgtgcaggcggacgctgcgccggtatcgaaccgggattctgtggatatttggcctcgccgttcttatctggtcttgtctcctacctctgtatttaatggggtgactttcgatatacgtccggaaacgaattattcctcgggcagtagtttcgtgctgggcatgcgtgtctggggattgaataacaaaatggcttataagccggaggtacgtttaagcgcagaccaaggtgatacgaccttgacggtgaatagtaagatcacgaaagatggatatcacgagacgatcttgaagactataccaactaagaaagtaaagcgtgtgtttggatatatccgtatggataatatggatacgacttattataaggtgtatatagatagcttaagcttgatgaaatataactatggtaaggagcttgccgaattacctaaggattctattaagtaatctctctatttgtttattatacttatgagaagaattgccgctcattacgtttggtgtaagcaggtttatcgtatgcattatatcgaactggatgataatggtgcgtttcatggtgtttacccgttgaatgaggagatagctggaaccgctttttatgatggagtgctggtgccggttctttcctcggaaccggcgattggttttaagcaggtgatgggatcttggccggcgttaaccgaaaagattacgccgggttgttcagtccatatatatcgtttaagcgggattcccttggcgtctgcgaaactcggcacagaccacagctgtagcgatggccacattgagagactctgaggtgtctcttccttccggatagttcgggatatataatttttcgtttacaaaagcctctatggcgggacgtattccatttccttcattacccattatcaagataccgtttccggataaggttttctcatataagttttctccgccaaggaaggtgccgtataaaggtatggcttgggctgattgggcctgtaagaacgtttccagatcggtgtaatgtatttttacgtgggcgagcgcacccatagtggcttgtacggtttttggactgaaaacatcggcggtatctttgctgcatacgatatgggaaataccgaaccagtccgctaaccggatgatcgtacctaagttgcccggatcttggattccgtctaatgcgagaacaagctccttttccggcgttatttccgttatatcccaattggggcgtttaaagatcgcgagtacatcttggggatttttcaggaagctggctttacgaatatcatcttcttccgctaccaataactccttggccggaatatcgccttgtgtagccatccaagatggcttggctattaataactcacattcaaaggccggtaacatatcggctaccaatttatttccttcggctacaaaaacattattttcattccggaatttctttaattccagagaacggatgtatttgactttggtcttgcttagcatcttagttctttttacaaaacaaaagtacggtaaattctttaaattccagtacattcgcgatcgtaaaaagcttggaatgatgaatcgatctctacgtatatgctattttatctgtatcgtactactactaacctcttgtagtacgaccaagtttgtgccggatggggaatatttgctggataaggtggagatcgtgtcggataacagggactataagtctgcggatttaaaatcttatcttaggcagcaaccaaacttcaaggtgtttggtctgatgaagtggcagttgtttgtctatgattggtctggtaagaatgagaagaaatggatcaataaacagttacgtaggattggtgagcctcccgtggtgctggatacgatgttggtggaacagtccgccatggaactagagcgtttttacattaataaagggtatgtccatgcggatgtatcaacgacgatcgatacggcacgccataagaaagcggttgtaacttaccatataaaggcgaacgatccgtataggatacgcaattacacgatgaagttccccgatccgaaaattgatagtttggcacatctgaaagcgcctcgccgctctcccttagcttctgcgttccggtcctcacaggaagagtataaccaattagttaaggaaggaactttatttgaccgggatatattggacaaggagcgggagcgtattacgaccttacttcgctggaacgggtattatggttttaatcgggattatttaggatatatcgctgatagttcttttaaccaaaatgtcgtggatcttgatatgtccatgaaaccttatcggaaggtgttgcccaatgggtcggtagaggatcagccgcatcgtcagtattatattaaggatgtaacggtcttaaccgattataatccgatgggggtaggagaggacgctagtttcatggctacagatacgatgctcagcgcaggggtgaatatcgtatatggccggaacgggaagagtatccgtccgagcgtgctccggaggagtacttatattcggccggggcaattatttagtgagaagaatatagagcagacctattcggcgttcgcttctctaagggctttgaggaacgtaaatatacgttttacggaagtagaggagcgggatacgatgaagttggattgttacattctcacttctcccgcgaagataaatacggtgggagtggatttggaaggtactaactcggcgggtgactatgggtttgcctccagcttgaattatcagcataggaatatcttccgaggatcggagctgttctcggcgagggtgagaggggcttacgaggcgttatccggaaataaggcgaatggctttggtaattactgggagttaggtgcggaagggtctttgctgtttcctcgttttttgttcccgttcttgagttcggattttcgtaggcggctacgtgcgtcaactgaagcgaaaataagttacaacctgcaaaaacgtccggagtatacgagggcgattctatctggtggttggagttatatttggcaagatcggggcaatacacaggcacgccatacctttaagcttgtagacttgaattatgtgtatttgccggataagaatatggactttatcaatagcttgccggattatatggtgttgtataactatacgaaccattttatcatgagttcgggatatacttattccttcagtaattattctccccagaatcgtttgagaaacacgcattccctacgtgcgtcggtcgaggtcgcagggaatttgttgagtgccttttcgcatcttacgggggcaaagaaaaatgatgacggttattatgagttgtttggtacggaatatgcgcaatatgtgaaattggatttcgattttagtaaaggaatcgtgcttgacagtcgtaacaagttagctttccatataggagtgggagtggggatggcttatggtaactcaaactatttaccttttgagcgtgcttatttctcggggggagcgaatagtgtccggggatggtctgtacgagagttaggtccgggtagtatggaagttgacagcacgacttctttcgctcttcaatcgggggatatccgcttggatttgaacttggaatatcgaacgaaacttttttggaagtttgaattggcggcttacatagatgccggaaacatatggacccggaatgtatcagatgaacgctataaggctggaaactttgatttctctcgtttttataaggagatcgctgtttcctatggtttgggacttcgtttggactttgatttctttctactacgtttagatacaggcttcaaggcttataatcctcaggagaaaaagtctaggcgttgggcgataacccgtcctaatttcaaggataatttcgccttgcattttgccgttggttatccattctaaattcaatatgtaaaaaagtgtactaaaagtttgcaaggaaaagaaaaatccttacctttgcaccacgaaaataaggatggtcaggtagctcagctggatagagcaacagccttctaagctgtgggtcctgggttcgaatcccagcccgatcacgagggagattctaaaagagtctcccttttttgtgtcataacttcgttggcaaagtatcttaggtgcgtgagccgatgtacttaagatacttttttggggggagggatcgacaagaggttctttctttttccgactggaaaaactatatgcctatcctctatgatttgctactgagctggaatttgtcttatatggatgtcttgtcctgaaatagcttgacacttttaaggggctaaaaagtatagaaatgatcaaaagaaagcccaaaagagtgttcacggaaccctttaaattatccgtgttacgcgagtattacagtagcggaatgagcaagtatgcgataacgaagaaatattctttgagccctccttgcatatatagatggctaaaagaatacccagtgggatcggaccagttacctttgccatcagaaacaaaagagaggttacagatggttcccaagcaatcggatttgacagatatggagtcccttcaaaagcgcatagaggaattgcgtcgttctttggagctggagaagatgcgtagccgtgccttcgagaagatgatagagatagcggaagaggaagaaggcatcagtatattcagaaaagatggtgccaaacagtaacggcgttacgtgaggagtatccccatgagagtgtggctaccctttgcgggctgtttggaaagaaacgccaatggtattacgcgaacatgaaggcggatgtatcggagagacaacgcgtcaagcttcttgctgacatgataggctattatcgtctttgttgtccccgtatcggaggtttcaagctgttccatttactggaaaagaatttgggacatgctgtgaccctcgggcgagactcgttcttaaaggtttatgaatcaaaaggctttaagctcaatcccaacaaacgtaggcgtacgacagactccaatcatgtctataaaaggtaccccaatcttatcaagggaaaagacgcgcggtattccaaccatatatgggtgtcggacatcacgtacgtgtggatattgggggacgtgttgtacttgcatcttgtcaccgacgcctattcgcacgccgtattgggctggtgcctatccgacagtctcagcgcctcgcatacgacagaggccttgcgcatggcgatccggatcgccggaggcggcaacctttgcggtaccatacaccactcggacagggggtcacaatacgccagcgaggcttacgtcagctgcctcatggagcatcacatacggataagcatgacagaaggatatgagccgacagacaacgccatggcggaaagacagaacgggatcttcaaggtcgaatggatatacgagcaggaaatgtacagggataaagaacaggcgatcaatgagatcaatcgtatgattgacttttataacaaccgaagacctcatatgagcatcggaatggagtgcccgatggaggtgtataaaggcaaactgccggggaaaaatctttggcgaaaaagaccctgattctttttgattccttacatttgtacgccgagaatatggatcactctggtatatccattgtccattcttgatgacaggctttttggtaggctttatcagagagtgacaagtaagccaggaggatcatgagtttattgacaagtaaagttgtttaactaccccaaaagtgacaagtgattttaggaatggacaggattgaggaatatgccgtaaaagtaagtactacttactttgtcatttaatatatactgcaagtggcatagaagatatactgtcctttccacgggtttctaccaagctggcatttaggctgattttagaacttcgtagcataaaaaaatcccccgcagaagggcgagggaacctaatgttttcacaacggaataatccttattgtgatttgcttcattttagtatgacaaatatatgaaatggaatgcttgcgtgcaagtgtttctgaaataaaatttttatatttgggaaaatgtaaagataacatactatgaaaaggattttaggcttggatttagggacaaatagtatagggtgggcgttggtgaacgaagctgaaacagatgaggaagtctcgtcaatcatccgattaggtgtgagagtaaatcctttgacagtagatgaaacgcagaactttgaaaaagggaaaagtatcactacaaatgcggaaagaactcttaaaagaagtatgcgccgtaatttgcagcgatataaattacgtcgtgatgcgttggttgaatttttgaaagagctgggttttattaccgacgaaactatcctttcggaacaaggaaacagaactacgtttgaaacctgtcgtttacgggctaaagctgctgaagaagagatttctttagaggaactatcccgtgtcttattgatgattaataaaaaacgtggatataaaagtagtcgaaaggtaaaaaaggaagaagatggagttttgattgatggaatggagattgctaaaaagctgtatgaggaggatttgactccggggcaactttgttcgcagttacttgaatcgggcaagaaagttttgccagacttttaccattctgatttgcaagaagagttggatagaatatggagtgttcaaaagcaatttcatcctgatgttttctgtgatgccgccaaagaagaaatcaaaggaaaaaacagaagccagacatgggctatcttggctaactattttgtttggaaagaagaagtggttggctggaatgacagagaagcaaagaatgaaacgatagaaaaagaatgtaaacttgtcggtcttaaacggacgactaaggggtatgaactgaaaaaggaaaattatcgttggcgtgcgcaagctcttactgaacaattaggtttggaagagatagccgtagtcttgcaagagatcaatggtcagataaatgcgtctagtggttatttgggagccattagtgataggagcaaagtgttatactttaatcatcaaacggtcggacagtatcagatggctgagttagacaagaatccccatgcaagtttgcgcaatatggtattctatcggcaggattatttggatgaatttgatagaatttgggaaaagcaggcagaatttcataaggaattgacagctgaattgaaaaaagagattcgcgatatgatcatcttttaccaacgacgtctgaaaagtcagaaaggcttgattagtttctgtgagtttgaaaggttggagattgtagtagaaaaggatggaaagaaacagaccaaagtcataggatgcaaggtgatacctcgttcgcatccattgtttcaggaatttaaggtatggcagacattgaatgacataaaggtattgggaagagagaagaaaagaaatgctttgtcggcaagcgaaagtagggctttgtatccagaagaaaaagaaatactggcaagagaacttgcgataaaagaaaacatgaagaaagcagatgtgttgaagctcttatttgaaaatccacaggaattggatttgaacttcaaacaaatagatggaaatcgtactgggttttctctcttttctgcctatagcaaaatgatagaaaagtatggctacgaaccgttggattttaagaaaccagcagatgagataatcggacagctaagaactatctttaccgatttaggttggaatacgaatctgtttaccattgacttaaccaaagaggggaaagagctcgagatgcaaccttatttcagactttggcatctgttgtattcttttgaaggagataatacgtcgaccggtaacggcaaactgattgaaaagatcatgcaactttgcggagttgagaaagaatatgctgtagagctagccagtctttcgtttcaagatgattacggaagtttgagcgcgaaagccatcaaaaggattttaccctatttgaaagagggtaatctgtatgatgtggcttgtgaatatgccggttatcgtcattccaaatcttcactgactaaggaggagatagaaaataaggttttaaagggcaagctggaggttcttcctaaaaacagtctccgaaatccggtggttgaaaagattttgagtcagatggtgaatgtaatcaatacaatcattgatacgtatggaaaacctgatgaaatccgagtggaattggctcgtgaattaaagaagagtgccaaagaacgtgaggaactgacgaaagctatcgcaaagagtacccgtgagcatgaggagatccgtaaattgttgcaagatgaatttggtatgatgaacgtgagccgcaatgatattatccgttacaaactttatgaagagttgaaagatactgaaaatcttttctttaggtataaaacattgtattccaatcaatatatacctaaagaaaagattttcagtaaggagatagatatagaacatattattccacaatcccgtctttttgatgattctttatctaacaagacattggagtataaggctattaatatagaaaagggaaataagaccgcttatgattttgtaaaagaaaaatatggagaagaaggcttgcaacaatatataaatcgttgcgaaagcttgttcaatgacaaaaaggcgaaacttcggaaattgaaaatggaacagaaggatataccggatggtttcattgatagggatttgagaaatacacaatatatagcgaaaaaagcactcgctatgttgaacgaaatctgccgtagagtagtggcaactaccggttccattacagatcaattgcgtgaagactggcaattggtggatgtaatgaaagaactgaacctgcctaaatatgaagccttgggttttgtggaaacatacgaagataaggacggaagaaaaatcaaaagaataaaggattggacaaaaaggaatgaccatcggcatcatgcgatggatgcgctgacggtagcttttacaaaggatgcgtttattcagtatttcaataataaaaatgcggcacaagattcaggcaatagaaaccatacgaatataataggtatcaagacccgttattttgacaaaggaagagctttgcctcctattccattggagcaattccggatagaagccaaacagcatttggaaaaactgctggtatctattaaagctaagaacaaggtggtgactgtcaatgttaatcgaacaaaaaagagaaagggtgaaaatacgaagatacagcaaactccgcgaggtcagttgcatttggaaacggtttatggtagtcacaaacaatatgtgacaaaaatagaaaaggtgaatgcttcttttgatgcggctaaaatagcgactgtgagtaaacgggcttatcgaaatgccttacttaaacggttggaaacattcggtaatgatccaaagaaagcatttacaggaaaaaatgcattggaaaagaatccgctttatgctgataagtatcagaccatacgagttccggagaaggtacaaacagttgaatttgaaactatttatactatccgaaaaccggtcgatcctgctttgaatgtggataaagtagttgatgtaaaggtacgtgctattttagaacggcgtttgaaagaatacggtggagatcccaaaaaggcatttgttaatttttgggaaaatccgatatggctgaataaggaaaaggggataagtatcaagcgggttagcatccgaggaatcaataatgcccaatcgatacacgtgaagaaagataagaatgggaatccgatatgggatgaaaatggaaaacaaatccctgtggattttgtaaataccggaaacaaccatcatgtggctatttatcgtaaacctgttttagacaagaaaggacaggtgacgtttgatgaggatggtaatctgatgtatgaactggacgaggtggttgtccccttctttgaggctgtaacacgggctaatttaggacttcctattattgataaggattacagaaaaagtgaaggttggcaatttttgtttagcatgaagcagaatgaatatttcgtgttcccgaatgaaaagacaggcttcaatccgaaggaggtggatttgttgaatccggataattatgcaatgattagtccgaatttatttagggtgcagactatgtcaaaagttatgtatggaaataatgttgttcgagattataaatttagacatcatttggaaacaacagtgaaagatatgaaagagttgaaagatattgcttataaacaatataaaacactttcttttggtaatagtgttgtcaagatccgaattaaccacattggacaaatagtatcagtgggagaatattaatagtatctattagaaattgaaataaatagggtgtatgctattctcaaaaaggttgtaccctttttagaaacagacttttatactgattaatagtaatttaaaatctaactgcttatgatcaagaaaaccctttattttggaaaccccgtttatctgtctctgaaaaatgctcagttgatgataaaattaccggaggtagtcaggaatgatacgttacctgaaagtttcaaacgaacttcagaagtgacgaaacccattgaggatattggagttgtggtactggatcacaagcagatcaccatctcttcgggcgtgttggaagctttacttgaaaataattgtgctgtcattacatgtaacagtaaaagtatgccggttggtttgatgcttcctctgtatgggaacacgacgcaaaacgaaagattccggcaacagttggatgcctctctaccgttaaagaaacagctttggcagcagaccataaagacgaagattgaaaatcaggcagccgtattgaaagaatgttctggcgcagaagtgaaatgtatgtacgcatgggcttcggatgtgaaaagcggagatacgagtaacctggaagcccgagcggctgcttattattggaagaatttgttttggatagaaggtttcacaagagacagggagggcattccgcctaacaatttgttgaattatggatatgctattctgcgggcggttgttgctcgtagcttggtggcaagtgggcttttgcctactttaagaatccaccatcataatcgttataatgcttattgcttggcagatgacatcatggagccttatcgtccgtatgtggatcaattggtctgtggtatcataaagcagggagtggattatgcggaactaacgagagagttgaaagcgcagctgcttactattcctgtgctagaaacttatatgtcaggaaaacgtagtccgttgatggtggctgtcgggcaaactacggcttctctgtataagtgctttagtggcgaattgcgtagaatctcctatccggaaatgtaatatggatcggtttagcgaatatcgtgttatgtgggtacttgtgttgtttgatttgcctaccgagacgaagaaggagaaaaaggcgtatgtggatttcaggaaaaatctacaaagagatggatttacgatgtttcagttttctatttatgtccgccattgtgctagtagcgagaatgcggccgtacatgtaaaaagagttaaatcttttcttccggagcatgggaatgtcggaatcatgtgtattacggataagcagtttgggaatattgaacttttttatggaaagaaaacggtggaagtgaatactcctggacagcaattggagttgttctaaaagaaaaatcccgctgtcaagcgggatttttaatggaaacaatatctgttttttttattctgatgtgctttgtaatccattgattaatagtttttaatagataatatgctgtttccaatggctcaaagttactaaaatgaaagcaaatcacaaccggtcgatctctttagtaggggaggttcatgctgtttccaatggctcaaagttactaaaatgaaagcaaatcacaactatgaataaggtggaaattttttacaaaaagctgtttccaatggctcaaagttactaaaatgaaagcaaatcacaacaagacttggtgatatggcgaagaagaaagagctgtttccaatggctcaaagttactaaaatgaaagcaaatcacaactgcaatcgcattgaaccaaaacgcagagaagctgtttccaatggtccaaagttactaaaatgaaagcaagtcacaataaaatattgcaaaatattggggcagctacaccaaaaagtaagccattctcttttatgtcatcaaaatatctctttttctgtcattttgctcaaaatggagacttttagctgataaaggctttttatggaaatgcgaaaatagagagaaaaggaaggcggaaacagcgtatttcgccattttttagtgtatgaataggctttgtagagggattatgatccaatagtaaggtgtttataacggcgttgtatgctgttttcgactgcgatccttattgtttccgaccggaaatccgattgttttcggatgaaaagcttattgttttcagataaaaagtcgcttgtttgtccgactgaggttgacagaagacgaaatctttcgctagaataaatcagtgaaaatttgtaatgcgttgttcaatagattattgtgaaaaaatattttcgaatttggaagcaagtcgtaccttgcctcgaaataatcgattctccaagcgtttagattgcaaagtgtcagaatgacaatttgcattgattgaggaatattttggtgcggtgttctggtaaaagattgtttaggcacggcttttttattttttttggaaagattatcctattttttaatactgattatcagtttcttatatataagtttctctcgtgagcttattgtgcggaattttacttgagatccatgcattccggcctgctgaaacggatgggtaaatgaaagagccgtgttgtttaggtcttagataaatgatttaatttcgtacatttgtttttgataggcttaagctggaaactatggggcttggttccctatggttgagattaaacagattgtaaatatataaagagtaggtaagatggaaacattcgacgatatcattaaaggggataaacctgtattggtggatttttttgcgacatggtgcggcccgtgtaaggtgttgagtccgacggtcgaggcattggggaaggagttggcgggacaagtgcgtgtccttaaaattgatgtagataagaacgaagcacttgccacacagttgaggatccaatccgtacccactttgatcatctttaagaaaggtgagatcgtatggcgctcttccggcgtgatggatcacggaagcctattgcggaaggcgcaaagctatatcgattaaaagccgttcatcgggatcaataccgttgggatcaataataggaatcctaggatcactaggacaaggatgaacttccatgcccatttgaaccatttatcatacgggatacggcttactcctagaaccgctatcaggacacctgatgtgggagttatcaggttcgtgaagccatcgccaaactgaaaggccatgacggtggcctgcttggataaaccgatcaactccgagaatggggccatgataggcatggtaagggccgctttggcgcttccggaaggaataactaaattgataagcgtctggataacgtacatcatcccgaccgtagctacttgccccaagccttccatccctttcgctaggttaaagagaatcgtatcgatcactttgccttcttgtaggattacgatgatacctcctgccaaaccgacaaccaaggcggcgctcataatatccttgcaaccctctaagaatagtttcacaagctcattcggatcgcgtccattggcgattcccgccgctatgcccaaggcgaagaataaagtcgctatttccataatgtaccatccatagcccattacgcctgttatcaggaaaaagatcgtgaagaataaaaggttcaatatatataaatgtacggttttccgcagagtgaatatcgaactgattatgaacgctacgctaagaatcgggattaagggaagtccctcgattacactattcccgatttctaaggatgtctggggataatagacagaaaagaccgctaagatgattgccaataggataaaactgacccatgcggctttcggggtcctgtacacgatttccaaagaatgggtattatgtaggtctctccagtattgatcatcctcatagactggtgacaattgagggttcttttttaccttggcggcataacgcaatatccatgtgaagcctaccacattgataatacaccaacaaacgatacgatactcgatgccggaaaaaagaggaattcctgctaagccttgcgctataccgatagtgaaagggtttaaaatcgctccggcgaaacctaatcccgccgctataaaaaccatacatacgccggttatggaatcgtatcccatagatatcgccatcgggaccaagaccagacaaaaagcgatggtctcctcactcatcccgaatacggccccgaatatactgaaaagtagcatgatggcggtcaataagaaattatctatgcctattttacgaaggatggggttgttctccattttgcgtgctttccgtaggaaactgactgtcccgatatcaaatgccttactgtcgttcacgatccagaatgcaccaccgatgatgaggatgaagacgatgatatccgccttgtccacaaatcctttataaaaggcggagagtacctcccatgtttgaggtacgctttccacggattcatatacaacggtccgctctccatctgggctgatattttccgtgtattgcccaccggggataacccatgtcaatgcggcgcaaaataagatgatgtaaaaaatgattacgtaagtgtggggtatttgtctctttttcatgattctgctttttcgtcttcttcagttaatattccgatctcgggaaggatagctcgggcctcacggtcgctaagcgtatctacgtctttgagtttacgttggatggcacgggtacgggtacctaaaacctcttctatttgcccgctggcggtttgcaagttcttttgggctttctcgagcataccgcctactttctcgaattcttttttcacggcccctaagatcgtccatacctcccctgagtgcttttggatcgccaatgtacggaagcccatttgtaaactgtttagtatggccgctagggtagtgggacctgttacgactaccttgtagtttcgttgcaagtcctccaataaagcggaacggcgtacgacctcggcgtaaatgccctcgaacggcaggaacataatgccgaaatcggtcgtggcgggaggcgccagatatttgtccgaaatatctttagccatcttcttgatcgttgtctccaataattttccggctgtctcgatcgcttgggaatctgcggcatcgtaagcgtctaggagctgttcgtatacatctttcgggaatttagcgtctatgggaaggtatacgaattctcgggcatcatcccgcccggggagcttgaccgcaaattcaacgaccgcatccgaacctttccgggtatgtacattcgcctcgtattgctctggtgccaataactgctccaataacatactgagttggatctccccgatatttccccgggtcttaacattactaagtacccgttttaatccgcctacatcctgcgctaaggtttgcatctcgcccagtcctttttgtacactttctaattgttcggtgactaaacggaaagattgcccgatacggtcgttcaatgtcttttgaagtttctcgtctacggtgactcggatttcttccagtcttttttccgtgttatccactaatctctgctggcgttcgtccaaggcggcgaatttctctttctgcaacctgttaaaagaatcgataccacgttcgaaagcttccctgaactcgttcatggaatgagccagttcttctcggttatctttcgctaccaaacggctttcttcccggttcaggcggaagtcttccctaaagtttttctcgatacggtcgaacgagcgttgtatctcgtttagcaacttttccaggtcttctttgttattatttagctgtttaggacgcaaaaggatttgcatcacgatgattataagaagtccgccgataataatccaatccatctgtttttgattttgacgtcaaagataggtaatctgtattttgcaacagcagttaaatagagttaaataaaagaacattgtttattttcgtttgttttatcgacagaaagctgcttatatttgtgcagccaacttaagtaagactattaaatttacatacaaagatggcaaaagtaacattaaaaggtaacgagattcatacgaacggcgagttgccaaaagttgggacagaggctccggactttaagggtgtaaaaagtgatttatccgaattgtcgctaagcgacttgaaaggaaagaaagtggtgataaatgtttttccgagcttggatacaagtgtatgtgcggcatcggtaagacgcttcaataaagaagccgcttcgcatccggatacagtggtattagctgtttctaaagatttaccttttgcgcatggacgtttctgtactacggaaggtattgataaagtgattacattgtcagtgttccggtgttcatgttttgaggataagtatgggatgcttctggtagacggtccgctgaaagggttattagcccgtggcgtgatagtggtcgatggagctggtaaggtggtttatgaggaacttgttcccgagattactaccgaaccgaattacgatgcggctttagctgcattgaaataaatgtagtagattattgtttttcattggttaaagttaagggttagtgtaggaggccgtcggatgtgaatcccgcggccttcgtttttttaatacaaacacgtttatatggataactggaagcgagtatttgccattatttggacggggcagttcttatctatactgacaagttcgattgttaatttcgcgatagtcttgtggttgagtctggagacaggttccgctgaggtattggcatttgctacgatggccgctttgttacctcaatctgttttggggcttttcacggggatctttatcgaccggtggaaaaggaagcgggtgatgattatggcagatagctttattgctttttgtacgttgatattggcggtcttgttttattttgatttggctaagattagtcatatatatgtgttattggcccttcgttccgtaggttctgcctttcatatgcccgctatgcaagcttctgttcctttgctggctccaaaatcggagttgatgcgcatagctgggattaatcaggtgatccagtcggtgtgtaatatcgccgggcccgctttggccggtctattcataacgatgatgaagatgacgaatatcctcttattggatgtggctggagcggcgttcgcttgtctatcgctctgctttgtctttattcccgatccttctcatgaggaacgaaattcagaattgcatctttggagagaggcgaaagaggcgattatggaagtccgtaaccaatatgggctatcgtggttattcctattgtctatattggctacattcgtgattatgccggtaagtgtcttattcccgttgatgacgttgaatcactttgccggaaatgctttccaagtgagcttggtcgaggtttcatggggtggaggagccttgcttgcgggtgctttactggggcttaagaaatatcgttggaatgagatcctgttgattaatgggatgtatatagcgttgggattgacattcttgttttccgggttgttaccggtatccggttttatctggtttgcggtgctgacggctttaggaggtgtttgtggttccctgtattttgctacttttactacggttatccaatctcgcattgatccgggagttatgggaagggtattctctttttacatgagctttagtatgcttccttcgatgatcggtcttttgagtaccggctttttggcggattctatcgggcttggaaatacctttataataagtgggggctttttatgtttgataggtattatatccttttttatcccttcgttgatcagtctgaaagagagttttaagagataacgatatcgtatttagacactatttaatatgaataagaaaatacttcaactggcgataccttctattatttccaatataaccgtacctttattgggattgatagatgtggcgatcgtgggacatcttggatctgcttcgtacatcggggcgatcgctgtaggcgggatgctgtttaatattatctactggatattcgggtttctccgtatggggacaagcggtatgacttcccaagcgtacgggaaacgggatttgacggaagttacccggatcttattccggtctgtcggggttggtttcctgatatctttggggcttttgatacttcaataccctatcttgaaggttgcgtttactttgatcgacgcaacggaggaggtaaaacaatgggcctctctctattttaatatctgtatctggggagcgccggctgtattggggttatatggctttgccggttggtttatcggtatgcagaattctcgtttcccgatgtttatcgctatcacgcagaatatcgtgaatattgcggccagcctatgtttcgtgtttgtgctgggtatgaaggtggaaggcgtagcgttgggaacactgatcgcccaatatgcgggtctcctcatggcgtttgctctttggttgaaatattataaacgtttgaaagcgtatattgattggaacgggctttggggtagggaggcgatgcgtcgcttcttctcagtcaatagtgatatatttttccggaccttgtgcttggtcgctgttacgactttctttacttctacaggtgcgagacaaggggatgtgatattagccgtaaacaccttgttgatgcagttatttaccttgttctcttatataatggatggattcgcttatgcgggagaggcattagccggtcgctttattggagccaaaaacgatgtggggttacgtaaatgcattcgcttattgttcctatggggaatcggcctctcattgtctttcacgatcctttatgcgttgggagggaagaattttctgggattattgacgaacgatacctcagtcattgaagcttccggggattatttctattgggtgttggcgattcctttatgtggattctccgctttcctttgggacggtatctttatcggtgccacggccacacgccagatgctttactcgatgcttgtggcctcgggcactttctttattatgtattacttgttttatcaatcgatggggaatcatgccttatggatggctttcctttggtatctgtctttacgtggcggtatgcaatgggtactttggcggttaaaaaaataaggcgagaacctgtaactgatcctcgcctcattttatcctaggaaaacctatttactgttgtttgtaataagctaagtcctcacgattgaagttgttgatgaaggattcgatcttatcaatctcagcttgtccgtagtttacataaacctcggcggaacggcggaagctgtcatctttgtttgcgtcttgcaatagcaagtagccgaatacgcaatgagcggctgcctcgaccatacggcgagcttggaagtcaatatattcgttatcctttgtctccgtaaccttggctaccactttctcatacttctcggtcatagcggcaagtttgttcttcagagcctctaattccggcttatactcgatcgcttggtattcacgaatctggttcaagtaagtacccgtggtgacgtggcggatggccgctacgacttgcaattgggtggtaccctcatagatattcgtgatgcgggcatcccggtagatacgttcgcaagcgtagtctttcatgaaaccggaacctccgtgaacttggatagcgtcgtaagcgttctggtttgcgtactcggtagtcatgcctttacccatcggggtgaaagcatccgcgagcttgctgtacttcttgaattcttgacgttcttccggagtcagtttacgttccttggatatatcatccaacgctttgtagacgtcaacgaaacgggcggtctcgtataacatagaacgggaagcatccgctttcgcacgcatcaaggcgataatctcagcgatcgccgggaactcgatgatagacttaccaaactgtttacgatccaaggcgtaagcataagcctcacgataggcagcctcg

SEQ ID NO: 2130 - DNA, 24287 bp, synthetic construct
  misc_feature 1..24287: note = Synthetic
  source 1..24287: mol_type = other DNA
aaacaaatggattgaatacgaaagtttcttatttaaccaacttagcagccaatcaaaccttgaagttttcattaagttattcctatttagatcctaagtttgaaaatgtcgacagtcagtacaattcaaaatataaaatagaaagtttaaaacatcagttaatcaatacgatagattaccaaatcggaagaactactttaagtgtagcgaatcgctacaatacccgtcaatcttataagtcctattggattacggatgcgagagtaagtcattcattcaagaataacataggtatttattttgatgcacaaaatatatttaatacgacttacaacgaagcgggagcaattccgttgccaacgacttggatgagtataggtgtaaagtttactggaatttaaatgatgacaaacatttaattctctttaatagttatattatttaatgcggaaaacagctttttcttttagaaaaggctgttttttactttactttgttgattttaaggcttcatccaaagaatttacttgattcaaattttgatcaaaatagagcagtgagagatcttcctctttttgatctgcattaaattttatgagttcattttcttcaaattcagttaaatgttccaaataaccacggtcttttattgcgataatctttttattgtaaaataccacatagcctattatttccaattctatgttcatttgctttgataggaaacctgaatagttgacaattgaagaaatgtcggagaaatgaacagggaaatctactttttgttttgcgatttgaatgccttcttcaccatgaataggcaaagttgatataatttcaggctgtgcactgagcattgcccaatctggaatagcatacgtgaatttatctgaacaatgattttcgatttcttgtttgattacctgaatgattttctctgaagaaaaagttggatgtgtgtgtgtcattgtttacaaatctaggattattctttatattctttacccgtcaagatatctatataataataaatatttttgttattttcggttgtgatgcgcactaagccattgctataaatactgtcgtaagattttgttcctattggatgtttggctatattactgtataagatacacttatcgtccttttctttttgcaatgaaaaaatctggttatcaagatctaacagctgcacggaataataggtaggttctaattcccattttttagtatcagaattccagattccttctttagtacctccattatagcttttggtttttatgatatatagattttctgattggtaaacatattttattttatccactttccaatctttatctaattcgtttttagttaaaatcatcttttggtcgggccagataagataaccaacacgatctaacatatagaaatctttgacttgaatttccggtagtagatttccctgtgcatcaatatacaaccagtcgtaagcccagatagcatgatcatagttaaaacgtcctaaaataaaataaggagagtggtttacagaataaaccaaatcaacattttttagaaaagccaattgttcaggggttgcttgcttaatagattttggaaaaggtttatcgtattgtggataaacatagatttcctttgtcttagagtcctgtaatattttaggaactgttggagagaagcggtctaaattaagagaatctaatacgaaaggttgcttgttcacttctaagtgaattcgatctgttccgatgagatttgagacaagcggtgtttcagattcaatagtataaatactgaatatttcttcactatccggtatatatcgaccatgatctaaactaaaagccagatgattttttaatttttttaatttcttgtttttaatctcgtataagacatcgtttaagacaagatgatgttcatcaagcgaatagtaattcaaagtataatggtcttcatcgtaaggaatgtcttttgaaagtagcaattgattggtttctaaaacacgaatttctattttcttataagtttgtgttgtatcaatccctccacccattatattccaatcccacttccaaatgggcattttcttttcatattcgagttctttcatcatcaaagtaagatgatgagcaacttttaattcgatttcttcttctgtgtaatctattctaaaatttcctttcgaatcaatgaccgcatttttaccttgttgatttccaacaattgtatatcctgtttccaaaaaaggatttgcagaagcaaatgtaacgttcagttgcttttttaggttgcaatcgacatagatatactccttattttttgtcagataaggcacccaactagctgctttgctattctgagccattgtagaatcctgtgcacacgagatcataaataatagattcagggagtagatgaagattttatttttcatggtaaatacgttttaacttggtttagattggtggtcatcagtgctagtttgtttataaatatagatcttgataaacatttagcgcttttatttcgtaagtggaatcatttaaagcgacaacaccaattaatacattatttttatccatctttgtttcgtataattttgtggtatgatccagtttgaaatattgatttaattgatgttttgagatgagatttgtaaaaccttgttcaaattttatatgctcaaagtttgctatttcatagttcttaaacagaatagaatctgatgaatagtttttttcgaaatagaaatgcattcccaaagagtcatttgaaaatttgtaagtgacattctgtaaattataatcgttgccacaatattcgatagaatcatttaatcggttaaaaaatccgatcgaatctttatggaataagatttttttatcgttcatcattctttcaaaatcactcatagtcgatttgttaagttgtaaatcctctatttcccaattatttttgattagaagaaaatcatgattttctttagggctattacaggaaaaaagtaaaaaagggagaaggtataccaatgtcttattcatattgtgtgttttaaaaaaatcattgatgtgttgatgatttctttaccaaaattgcaaaaaaataaatggatcggaatccctattattagccaatttgatagaaagaaaaatcgcttaattagagaattaagcgattttctatactaatattgtagttaaggtaataagaattggctagtaatcttattaaggttataagttggttgatgtagagcttgttgttttactttttcaaagttgggaatattttagatcttaaaatatccctatttttagttattttctaaggttttgtaattaaaccatattctattgcagaagtaatggctgagcttaagtttgaacttttgaatttttcgattaaattttttcgatgactgtctacggtgtgtgtactgataaataatttatcggcaatttgttgtgtagttaaaccttgtgcagcttcaatcaaaacttccttttcacggcgggttaattttggaatggtatttaaaccatctttttcttttttgctcatgactttttttgtttgtgagcagagaaatttttttccatcgaagattgaattgattccttctaagatttcatccacagaggcatttttctggatatagcccgaagccccttcttctaaacagctgtttataacagcatattcattgtgaacgctcaacataatgatatgcatctccgggtattttttcttgaaaggtttgattaattcaatactattgatatctgaaaggttgatgtccagtaaaagaatatcaatttcattcacttttaaagcttcttgtaagtcatcaacagaagagaaacaatcgacaatttctaagttaggttgatggctcaaaatatttcgcaatccttctaataataaaggatgatcatctgtaattgctatttttatcatagttgtatttttgggaaatggaattctatacttgtacctaagtcaagttctgaatgtatgtttaaatgtccttttaaaaattgtatacgagattgaatattatgtagacctgctgattgagtaagtttggcttgattcagatcaaagccttttccatcgtcttcaacagttacagtataatccgtttcatcttcaacaaattgaatgataatttgttcagcctgcgcatgtttgatcgcgttattaaccaattcttgtataattcggtacaccaacagttggttttctttatcaagtgaagtggtataactcaagaattgtacatcgatgtctaaatgatcgtttgacatacgaatcgcatattctttcaaggcttcttccagtccatatttcaacaataaatccggcatcaaattatgtgcaacccgacgcagttcgtctactgcaccatctaattgatggatggattttgtaatatcttgtttagaatgttcatctattttttcgttaagatgtgtcagctgaatttttgttccggataacaatccgcctaatccatcgtgcaaatctcgtgcaagacgtgctcgctcttgctcttgtccgtcaagaagtgcagttaatgtagagatttttgagttttggcgttcttgttccaactctaatttgtaaagttcttctcgctgctttaaatgtttgttacgctgtttgaaagcataaagcaataaaacaagtaaaatgataaaaaagatgattgaaaagatgtaatacttgttcaatttattcttaaaattaagttcagaaatataattgaccaattcatcttttctgtttttattttcgagtttagataatttcagattttgttgcgaaatcgtcaattcctgtgaacgtttatccgactctaaacgtgataattttaattgttttcgctgaaactcttcactcagtttcgaattctccaactcttgtttttgtagaatccccaatgaatgcatcaattttatttgttgttcctttttctccgtctctaattgcaaacgaatcatttgttgctgttgccgctctttatcaaattgtgcttctaatcttttactaatttgtgcctgttctttgtcgtaaatagatttataagtcgccatatacagtttgtagtagcgtaaagcttcgctgtaatttttttctcgttccccgatttctgctaaactttcgtagatggaaagtagaatatgttcgtctgtaaaagagttttcattaatctctttaagagaagaaagtaaataagctttggcagaaataatgtcattgctttgtaaggctaattccgctaacaagccataagaggaagcaacatgaatggtttgtccggttttagtcccgatttcttttgctaagtgcgcatattttacggctttttcgcgatatgttttcggataaaactgaatatataagtttgctaaattatttgctacaaatgataaattagatggcattatcattttatttttgttgtgattgtagagattaatcgcgttgaggtaatatttttctgctaaatcgcgaacataaatattcttctcattctgcatgaatttttgttcgtacatataacccattgacatataggcgtcgaaaatagaattgaggttattttgttttaaagcaacttctaatgccagtttactgtatttttcctgtaattcataatcatcccatttcgaataaattccggtcaattctgaataaacggcagataatcttgataaaatagttggtgaaataggtgctttatcataatactttaaggcatcaataaaattcttgacagcttttgcatcttttttatctctcacgtttagccagccttcgcaatattttacatatccttttgttgaattatcatttgttctttcactgtaataagttgctttttgtaaattttgaatagacgctgtaatattctcttcaatacgattattcatcgctgttatagcatataaataagcagcatattttccatctgcttttttctcagcactgattacattttgttttaaaattttaaatgctttctcttcttgctggttaaaaaataatgcttgtgcatatttcccggcaatttcataacgttcaatagagtttgaagaagttttattgtattgattttcaaaatctgttaagacatcttgtgcatgaatactcgtacttaaaaagaataagcaactaaaaaatagttgaataaaagtcgatttgaatgtagaggtattgttgaacatttcgagattgataatttgataaggcgaatataatgtcttttagatatagaatgaaataaactaaaacattcgacagattgttttagtttatatttttattgaggttgatataagatttttgttatttctggaaatcaatccgaatagtgaaaaattcacctttttgtaaaattccatctaaattccgatcaataatcagtagaatgtttacttctgtattatcataagcactccaatccatttctgcgtcatattgataaactcctttcaatgtccatttgtaaatgtcccaattgcctgaagttcctgatttatccacgcgtttttctttgttcgaaacataaaataaatactgatggccgtcaaaggataaaaaaggataataaacgacttggttattttctgatgcaaatcctgtgcctgactcgaaataaggaatgctttctattgataaaccctcctttaattctatatctgctttacgatctgttactaaagcttgtgcagcataaaaaagttctttttttcttgataaggtttattcaaatattcgatactaaattcttctggaagcaactttatggtttgctctgtttcatgaatattaaaaatttgattgccttgctttatgacaagagtatgagtagaatagtcttgggcattcaaaaaagaaacaagaaaatagaatacaatcagaaactttatttttatcatattacttttaactatttaataaggctaaaatagagagtacagatcaaataaaaatcactagaaatattgaatttaaaggtgtattaataaaaaaagacaactaatttagttgccttttatactttttattcttgctttattacgtccgtctaaaagagaggcaactgcccagatggctgcgggcagccatccgattaaagtgatttgtaaaattaaacagataattccatgtattatttttcctcttaagatgaaagacaaccaaggcaaaagaacggctaatatgatcattgtattttatttagtgaattttttatttcattataatgtaagacttttacttgatcggaactactttgtacgtcattttcaatcatagattgtgcaacattctctgcgtgtatcgatttgtatttcgacaatttaccgattaaaaagaggtgaacgaaaggaaaaacaaatgcactgaacttttcagctaatctgtattcttttcgatttccgattaacaaagaaggttcatacagatataaatgggcaatatctttttgtttcaaagcttgttctgcttccccttttatttgcaagtaaaagttcgatgcatttgcatttgctccaactgcagagatataatgaaatttggttaaccctttttgttgcccaagctcagcatattgcaaaggaagttcaacctctattttatgataagcatctaaattaggtgtattttttcgggttgttcctaaacatgaaaagatggaatcgatttgagtgatttcatcgatttgaatttcagaatcgaaatcggtgacaatttcaatcaattttggatgattgattttttggggttttctaacaacagtaataattttcgaataggcgggatgattcaataatttttctaaaagtaaagaaccaattaaccctgtacttcctaaaaccaatgcagttttgttcattgtttaaattttcatcaataaccaataccaagcaccatttatatcaccttgttccaatagctttgctgctacctgatgacgaacttcaatagatttgaatttctgtatatccaatcgttgtgttaattgcgctttgaaattctgaatcatttcatccgtaggtaatttttctacatttccaagttgacctaaattatttcctgataaataattggaatgtttgatttcatctggtagttgatcaattcccaagcccactgtacgtgttggtttttcaacttcgaaaatagattcaggaataacacgacagtaataatcaccacccatacgtgcgactaaatctaaatcgtaaggcgagactttatcattttcatccagcaaatcttcgtgaatgtgcaaacgaacaacttctgcaatgactaaatttgctgcaccgggttgatctgtaattgaaatcacttcacgaactttacattccagttgaacaggagattctgccacacgaggtggttttaccaattctgaaggaagttcggtaaagccggctttcacaaattcatttactcctttaggatattcaacacttgctaaagattgctgttggacaatattataattcacaatattaatcacacattccggatgttcccaaatattttctaatgtatgtttcgtggttccatctctcatttttcttaatggagaaaaaacacaaataggagggttctgtcccatcatattgaaaaaagaaaacggactcaaattgacatttccgtctttgtctacagtacttgcaaaacaaattggacgtggagagataacgtgtttgaaaatatcatcaaacttatttgtatttggctcaaaagattttgtatgctgcataaaatgagtttattcgctataaagatgaacagaatttactaattttcctaatcctgtgattgacatttcgatgatgtcatttggttgaagccattgttcccgataagtcgcatcttggcgttttcctgttccattgagttccaagaaacatccagttccaacagttcctgatccaataatatcaccgggataaagtttgactccgtacgaaattcgttcgataatttcggcaaatgtccaatgcatctccttaaaatttccgcgagagacttctatgccatttaccacgcaggtcatttccaagtcataacaattcccaagatgtccttttttaggttctactttctcatttgtgatttcgtccggcgtcaccaaataaggaccaaacattgacgcaaaatcttttccttttgcaggaccaaggtttagtttcatttcttccatttgaagagctctggcgcttaaatcattcaaaatcataaaaccgccgatataatcatcagcatcttcagcggtgatgttcattccttcttttttgatgacaatggcaacctccagttcgaaatccattcggtcaaaatgtttttccatggcgtatacttttcccggtccctggatcgcttgatgattagagaaataaaaaacaggaaattgatcaaattcaggaatcatttctaaacctctgttcaaacgggatgtttccacatgctggcgaaaagcataagcatctctaaaactagaaggatgcggtattggagccaataggtgaggattttcgacaagtgcatttttatattcgccacgattgatttcatgataaatctgctgacagattaaaagtgaagaatcatcatcggctaatataccgattaaagtagcgggtaaattggaattaatttttgttaaatcatagatcgcatcttgtaaaacaagacctaccttttcttgttgattttctaagaaagtaacgaatttcattatttgttgtttgagtcgtgaagatacgaagatgattttaatcttctaatactctgagaaaaaaaggcgagttaccccgccttgaatgttttcacaacggaataatccttattgtgagttcctttcattgcaaatataagaacaaattaattatatgaaattacgagaaaccgtaatgggaatattttttatttctgtaatttactacacaaaattaaaaagatgactaaacatatactcggactagatttaggaaccaattctattggatgggcttatataaaagaagctcaggataaaacagaacaatcgtcaattgagaaaatcggggttcgtgtaaatcctttgacagttgatgagcaaacaaattttgaaaaaggtaaaccgattacaactaacgcaggaagaactttagcacgatcagcccgtagaaatttacaacggtataaacttcggcgagaaaatttaatcaaacttcttaaagcacatcactggattgacgacgagacaatcctggcagaaaacgggaatcattcaactttccagacctataccttgcgttcaaaagcagctgcttctccaattactttgcaggaatttgcccgtgttttattgatgataaataaaaaacggggatataaaagcagtcgtaaagtcaatactacagaagaggggcaattggtagatggaatggatatagccaaaaaactgtatgatgaaaatctaacgcctggacaatatgtttaccaagtattaaaagcaggaaaaaagaaattaccggacttctatcgttccgatttacaaaacgaatttgataaaatatggcgttttcagcaagctttttaccctgaaattctgacggaaacctttaaggaaactttaaaaaataaaaatcaaaaggtcacttctcaaattttttatacggtatatcaattcaacacggctgaaaataaaggaacccgcgatgaaaagaaacttcaggcatacaaatggcgtaatgaagctttatctaaacaacttactaaagaagaagtggcgtatgttttagctgagattaatgggcaaatatataactcttccggttatttaggtgccataagtgacagaagtaaagaattgtacttcaataagcaaaccgtcggcgagtatttatatgaacaattacaaaaaaatccacatacacgtttgaaaaatcaggtcttttaccgtcaggattatttagatgagtttgaaaaaatatgggaaacccaggctctgtttcataaagaactaacgaaagaattgaaaggtgaaattcgggatgttgttattttttatcaacgtaagttaaaatcacaaaaaagcatggtaagcttttgcgaatttgaacaaaaagaaattatagttggtgaaaaaaagaaaacaacaggattacgggttgcttcaaaatcatcacccttgttccaggaattcaaaatttggcagcaattgcacaatatccgattacgaaataaagaaacgcgtgaaataacaaatttaagccaagaagcaaaagaggttttgtttgaggagttaaatctaaaaggaaaatttacaacggttaaagttttaaagttaatagaaaacgggaaaaaatatgaagtaaactataatgaaatagaagggaataatactaatgctatgttgtatactaagtatttggacattctggatatggaaggatatgatattaaaagcgaattaaaactaaagctcaacaaagaagatattgctttaacagatttggacgtacctgcttccgaaataaaagaaatggttacaaggatttttgaagaattaaaaattgatacaggcattctaaactttaatccggagttagaaggaaaagagtttgaacatcaaaaagcgtatcagttatggcatttactatattcttatgaagaagataactcggtatcgggaatggaacttttgtataaacaattacaagaaaagtttggatttaaaacagaacatgcaaaaatcttaggctctgttgtttttactgacgattatggtagtttgagtaccaaagcaatgcgcaaaatattgattcatttgaaagaaggttttgcttacggaggatataaagaaaaacctgaaatgccaagtgcttgtgaaatggccggatataatcattctaaaaattcgctgacaaaggaagagttagcgaatagagaattaaaaccccgtcttgatgttttaccaaaaaacagtcttagaaaccccgttgtagaaaagattttaaaccaaatggtaaatgtagtaaacacgttgattgataccgaaaatgataaacttgaaaaggcaggaaaagaacgaaacttccgttttgatgagattcgtgtagaattggctcgtgaattaaagaaaaatgcaaaagagcgtgaagatttaaccaaagaaatcaacgctgctaaatcaaaacacgaagtaattgtaaaaatattacagaaagaagatggaatcaaaaatccaacgcgaaatgatgttatccgttacaaactgtatcaggaattaaaaaacaatggttttaaaaatctgtatacaaacgaatatatcgaaagaaaagacatttttaccaaaaaatacgatattgatcatatcattccgcaatctcgcttatttgatgatagtttttcaaataaaactctttgtcccagagatgtaaatcttgacaaaggcaataaaacggcctatgattatatattagacaaattcggacaaacaaaagcagaagaatttgaatcgagagttaaaggtttagagactttgggtaaagcagaaggaattaccaaagctaaatatcaaaagcttctaaaacaaggcaaagacattggtgatggatttattgaacgcgacttacgtgattcccaatacattgccaagaaagcaaaaaccatgctgtttgacattacccggacagttactacaacctcgggttcagtaacagatcgtttacgtgaagattgggggttggtaaatgtgatgaaagaattgaatttgctaaaataccgcgctgcaggattaacggaagaaattgaaaccaaagaaggtactaaaaaagaaatgattaccgattggacaaaacgaaatgaccatcgccatcatgctatggatgcgttaacggttgcctttactaaaaagagttttattcagtatttgaataatctgaatgcgaggagggcagaagaaagtgatggtatttcaaatacaaataatagaaaatcaattgatacgaatgatttacgaatttcgacaaaagatgttttaggtattgaagcgaaagaaacgagtaaagtgaaagatgagttgggaaattggaaaagagtatttaatgaacccattcccaattttagacatatagccaaagaacatttagaacaaatactagtgtctcataaagcaaaaaacaaagttgctacaaaaaataaaaacaaaattgcaggccagaaagtgttgcaagaagtcttaactccaagaggacaattgcataaagaaacggtttatggaaaaattcgtcaatatgcttcaaaagaggaaaaagtttcagcaagatttgatgaggcgactattgcaatggtttcaaatccaaagtttagaacattattattaaaacgcttggaagaaaacgggaatgatcctaagaaagcttttacgggaaaaaatgctttaacaaaaaatccgatttatctggatgatataaaacaagaaactttaccggaaaaagtaaagttaatctggttggaagacaattataccatacgaaaagaaattacaccggaattaaaattagataaagttattgatgaaggtgtaaagcgaattttacggaaacgtttggaagattttaatggtgatgcaaaaaaagctttttccgatttagacttaaatccaatctggctgaataaagaaaaaggaatcgcaataaaacgagtaaccatttcaggtgtaagtaatatagaggcattgcatataaagagaaatcatttaggagaagaaatagtagatgaaaatggtcattcaattccggtagattttgtaagtaccggaaacaaccatcatgtggccatttatgaagatgaaaaaggaaatcttcaagagaaagtagtctctttttatgaagctgtagcaagagtaaatcaaggtttgccaattgtagataaatcattaaacaaacacttaggttgggtgtttaaatttaccttgaaacaaaatgaaatgtttttatttccgtctgaagatttcaatccaaatgaaattgatttattcgatagaaaaaattataaattgatgagtagaaatttatttagagtgcagaaaattgctactaaagattatttttttagacatcatttagagacaactgtagaagataattcaaaacttaaagaaataatttggaaaagattgggtgtttctgggatgaaaggaattttaaaagttcgcactaatcatttaggagaaattatccatgtcggagaacagtaaatacttaatctatgctaaaacgtactatatatattggtaatccatcgtatctaaaattgaaagataatcaactgaaaatagaagaaccgataacaaaggaagtaaaaggttctgtaccaatagaagatttaggatttctggtattggatcattatcaaataactttgagtcatcaattaattactgcattacaacaaaacaatgtagccattatcagttgtgatgagagtcatttgcctttaggattgatgttaccaatgaatggtcacgtggaacatagcgaacgactaaggcatcagatgaatgtttccgaaccgttgcgaaaacaattatggaaacaaacggtggaagcgaaaatatttcaacaaaaggctttattaagtaagtttggttttgtggaagaaccaatgcaaaattacctaaccaatgttaaatctggtgacgcaacgaatatggaagggattgcagcacaatattattggaaacaattgttcgataacttctcacgtgagagagatggagatgctccaaacaattttctgaattttggatatgcaattttaagaagtatggttgcaagagccttggtaagttcaggattaaatccaacaattggtatttttcatcggaataaatataatccgtattgtttagcagatgacatcatggaaccttatcgtccatatgtagatgaattggtgttagagtgggtgaataaaccttttcgtcctacagaaatgaataaagaagtcaaaagtcatttactgaaaatagccactaaagatgttaaaatggatggattaaatagacctttgctagtcgctctaagttctacaacgagttcattatataagtgtatgataggagagcaacgagtaattcgctttccggaaatgatatgagttttattcgctataatgcgtatcgaattatgtgggtgttagttttgtttgatctaccaacagaaaccaaaaaacaaagaagtcaagcaactcgatttagaaaagaattgatggatgatgggtttgtgatgttccaattttctatttatttaagacattgtcccagtaaagagaatgcagaagtacatataaaacgggttaagtcaaaactacccgaatttgggaaggtaggtattatttgtattacagataaacaatttggtcaaatggaattattcttttcgaaaaaagaaaccgatttaccaacaggtccacaacaattggaattattttaataaagtaggataaaaaaatccaatagaaataaacttattctatcggatttttctttttttctcatttctaaatttcttcttaaatccttttctataaaggactcttagaatgaggttgtaactacttacgtaaaattactaaaagtgaaaggaactcacaaccaaccgggcgacgttaaagtttatgcaaaagttgtaactacttacgtaaaattactaaaagtgaaaggaactcacaacaccaatgttaaggtttcacaaatacaacaagttgtaactacttacgtaaaattactaaaagtgaaaggaactcacaacatacaaccaattgcaaactataatattacagttgtaactacttacgtaaaattactaaaagtgaaaggaactcacaacaatattattctttgttaaaatgtaggttaagttgtaactacttacgtaaaattactaaaagtgaaaggaactcacaacaagattgataaacttcttcttcatttttaggttgtaactacttacgtaaaattactaaaagtgaaaggaactcacaaccactcaatcaacgcttgttgcaaatcgtaagttgtaactacttacgtaaaattactaaaagtgaaaggaactcacaacactctttcttggttgtacgttgcattaagcgttgtaactacttacgtaaaattactaaaagtgaaaggaactcacaacgcattccaactattggctatggtgcaacgtgttgtaactacttacgtaaaattactaaaagtgaaaggaactcacaaccggaaacttcaacaaatgcaattgctactagttgtaactacttacgtaaaattactaaaagtgaaaggaactcacaacggtgattcttcattaaacatattcatttgagttgtaactacttacgtaaaattactaaaagtgaaaggaactcacaacggtttatgccggacatattattgttagagagttgtaactacttacgtaaaattactaaaagtgaaaggaactcacaactattggttcaattccaaaaaagggttgcaggttgtaactacttacgtaaaattactaaaagtgaaaggaactcacaacaccattgtgtttgtatttaattattaatatgttgtaactacttacgtaaaattactaaaagtgaaaggaactcacaacaaacatcggaagtgttactgtaaaaagtcggttgtaactacttacgtaaaattactaaaagtgaaaggaactcacaacgccgcactacgaattaaaaaactaatgatagttgtaactacttacgtaaaattactaaaagtgaaaggaactcacaactataacccttcttcgcttacgctggcaacggttgtaactacttacgtaaaattactaaaagtgaaaggaactcacaacaggattcgttgagttttgtctcttaaacaagttgtaactacttacgtaaaattactaaaagtgaaaggaactcacaacaaacatcggaagtgttactgtaaaaagtcggttgtaactacttacgtaaaattactaaaagtgaaaggaactcacaacacattcagatatattccatttagttccccagttgtaactacttacgtaaaattactaaaagtgaaaggaactcacaacacagaggtaacaattaacaacacttataatcttctaatactctgagaaaaaaagccccgcagataggcgaggctctaaatgttttttgtaaaaaataaagaatgaggttgatattttctacagtttagaaataataaaattaaattataggagaagcattttacgggaaaacgtaaaattaactatttgcttaatgctatattgcaatctatggatatagaaacgaaagaactattaataagaatttatagatggagttctgagcaaattgaccttgctttacgtgcaaaatgtaaatgcgaatattgtgataaagatatgtttgaatcagcagataattataaattatgggaagtagatcatattattccaaaatcttctcaaattgaagggtttgactataatagttttgataatttagctattgcatgtaagcaatgtaattcttcttttaagtcaaaatataatccggttgaatccattggatcgaataaaagtagagaagaatatattcaagatattagaaattatattcaagagtttagaagtgataaagaagaagaattattggaaataaaacaactgtttagtgaatatttataaggtgtagatattttataaaaaacgcatcatttgatgcgttttttatatttattaccatatttttcagaaaaactatttaatgtaagacttatctatcatttaaaatagaaattatggcaaaggaataataatttcgtttctttcttaaaatatagcttccgctacagttttggtattattagaattgctcatggtataaaaatgtaaaccgggaacgccaaattcaattaactctttgcattgatgaatgctccattcaaggccgatttgcttcacagcttccttatcttttgctttcaaaacttccatcgacaaaggctccggcaaatcaatataaaaattctgcggaatcgaagtcaaatgactgaatgttgtcaaaggttttattcccggaataatcggaatatggatatccatttcgcggcatttattcacaaagtcaaaatatttttgattgtcaaaaaacatctgagtcacaatataatctgcacccaattcaactttctttttcaaataatgtaagtccatcgcaagatttggtgattcgaaatgtttctccggatagccggctacgccaatgcaaaaatccatcggatgcgattcctgcagttcatcatccaaataacttccggtatttaaaccagtaatttgtccgattaagtcagatgcatgtgcatgtccgcccatttcaggaacaaataatttttccgatttaattgggtctccacgcagaaccaacacattatctattccaaggaaattcaaatcgatcaacgcatcctctgtgtcttcttttgtaaaaccaccacaaatcaaatgcggaatcgcatcaactttataatgattctgaatggctgcacaaatggcaactgttccgggtcgcttcctcacttggtaacgtttcaataatccattttctttctgtttataaatgtactcttgacgatgataggtgacatcgataaaagcaggatttaattccactaaaggattcaaagttttgaacgtcgcatttacatcttgtccttttaaaggaggtaaaatttcaacagaaaacaacggttttccatttgcgcgttctatatgttgtgttactttcattgtttttaatcgtgttgcaaaattcgtatgacgaatctgtaataatttatgttgtaagtgtctaagtgctaatgtttgatttgggcgttcccttcgggcgggcttttcgctgcaatctttgctattcatcaaaggattttcacttcaatccctaacgcagtttttacgccaagtttggactcaaccaacgttcagcttttgccaattcgatattcttacgttgagcaaagtcttctacctgatccattttaatttttcctacaccaaaatatttcgcttccggactcccgaaataataaccggagaccgatgaaacaggatacatcgccaaagaactcgttaactcgataccggcatttttttcaacatccaaaattttgaaaatagtttctttttctaaatgatcaggacaagccggataaccgggagcagggcgtattcctttgtatttttccgaaattaattcttcattcgataacgtttcatcttttgcatacccccaaacttctgttcggatgtatttatgcaaatattccgcatacgcttctgctaaacgatctgcaagtgcttttaccataatcgaattataatcgtccaaattcgtttcgtactgttttgctacttcttcaatttcttgtcctgccgttacagcaaatgcgccaatataatcttcgatacccgaatcttttggtgcaataaaatctgaaattgaaatattcggttgtcctttcgattttttagcttgctggcgaagtgtatagaattcttcaattttctgatcatgttcatcaaataattctattgtatcgtcatctattgtattggctttaaataagccataaaccgcttttggctttgctagattttctgcttcaattttgtttaacatcgccaaggcatccacatacaattcttttgcatttgttccgacaatttcatcatccaagattgcgggaaattttccgtgcaaatcccaggttttaaagaatggtgtccaatcgataaaatctttcaaatcagtaatactcacttggtgtgtaaatacacctaattgagctggcttgaaaggtttgtactcgtcgaagttaacgcttaatttatttttacgcgcctcttcaattgtcaaatattcttttgctacagcacggttcaggaaaccttctctaattttagtgtaatctgtaactgtttcagaaaataactcatcttgttgtgtacctaccaattttgtacacacagttactgagcgggaagcatctaaaacatgaattgctttatcatattcaggagcaattttcactgcagtgtgtgctttggaagttgtagctccgccaatcatcaatggaatatcaaggttaaggcgtttcatttctttggcaacatgaaccatttcgtccaatgatggtgtaattaatcctgaaagtccgataacatccacattatttttttgagcttcctctaaaatagtttctgaagaaaccatcacacctaaatctatgatctcaaaaccattgcagctcaaaacaactgacacaatattttttccaatgtcgtgaacatcaccttttacagtagccatcagtatttttgaaggttctttgtctgttttatttctaagtttttcttcttctaaaaagggagtaaggtaagcgacagattttttcatgacgcgagccgacttcacaacttgaggcaaaaacatttttccacttccaaacaaatccccgacaacattcattccgtccattaatggaccttcgatcacacgaaggggtgaaccgattttatctaacgcttcagctgtatcttgatcgataaactctgtaattcctttaaccaaggcaatttctatgcgtttttctaacggtaattcgcgccaggaatcatctttctttttctcttttgtaacacctttcaagtgttcagcaaaatcgattaatcgttctgttgcatcatctcgtctatccaataaaacatcttcaacatgttccagtaaatcggttggaatatcatcataaatctcaatcatttcaggatttacaattcccatatccattccatgtttgatggcgtgatacagaaatgcagtatgcatggcttcgcgaacggcattatttccacgaaatgaaaacgaaacattcgaaacaccgcctgatactaaagcatggggaaggttttctttgatccattttgttgcgtcgaaaaaatcaatcgcattgcgtcgatgttcttccattcctgtagcaacaggaaaaatattgacatcgaaaataatatctcttggattaaatttaacttgattcaccaaaatatcatacgaacgtttgacgatttcgaggcgacgttcataattgtctgcttgtcctttttcatcaaatgccatgacaactgccgccgcaccatagcgtttgattttcttggcatgttcaatgaataattcttccccttcttttaaagaaattgagttgacaattgcttttccttgtacattttttaaacctgcttcaataatttcccattttgaagaatcgatcatgatcggaacttttgaaatatcaggttcagaagcaatcaatcgtaaatattttaccatagaagctacgccgtcaatcattccttcgtccatattaatgtcgatgacctgagcacctccatctacctgatcacgtgcaacctgcaatgcttcttcaaatttttcttctttgattaatcgcaagaattttttggaacctgtgacatttgttcgttcgccaacgtttacaaaattcgaattttcacgtacaatcaaaggttctaatccggaaagttgaatttttatacctgacattcttcgctgatttttcgaggttcgtaatcttttgctaaatctgccattagtttgatatgttccggtgtagttccacaacatcctcctaaaatattaaccaattttttctctaagaatggtttcacaaaatcacgcatcatttccggtgtttcatcatagcctccaaatgcattcggtaaaccggcattgggataagcacttacataaaatggagctttttctgctaaaacttctaaataaggaatcaaatctgttgcgcctaaagcacagtttaatccaacagaaagtaaatcaatgtgttctaatgatatgaggaacgcctctgttgtttgtcctgagagtgtacgtccagatttatctgtaatagttccggaagccattaacggaacatcaattccggttttgtcaattgcatcttgaattccaaaaaatgctgcttttgcattaagagtatcaaaaatcgtttcaactaataaaatgtccgcgccagcttctaacatggttttggcttggcggtaataaacatttgccagtgtatcaaaatcaatgtcgcggtaactcggatcgtttacctgaggagaaatcgaagccgttttattggtagggcctaatgaaccgactacaaaacgaggtttatcgggtgtagaaaattcttcgcaagtttctttggctaaacgaacagcttcggcatttaattcatcaaccaaatcaaccatatcataatcaatcatcgagataatattggcattgaatgtatttgtttcaattaaatctgctcctgctgccaaatattcgcggtgaatatccttgataatatgaggttgagttaaaactaataaatcgttatttccttttaaagaagtatgaaaatctttgaatcgttctccgcgataatgttcttcctgtaaattgtgcttttggatcattgttcccattgcaccgtctaaaatcacaatacgtttttttagtatatcgtttaatttcattctaatttttttaaaaaccttatgggaagagtggtgaagtaattccttatctttctctgttctgagtaggatgtagcacccaactttactttgggttgccaagatatctacgggcctaatccctccatctttcttcataaggtatctgcaaaattatctatttcgcttaaaataaaaaaatgacaagtataaaaaagattgtttgagaaagatgaaataaaataagttaatcattgcggattctttaaagatgattttatgtttaaaatttattatttcagaaaataattctattaaaataaatattataggaaatagtattttaaaactatttttatgtatggtattttagaataatgattttttttagaaaaagaatatgatttgttttttcttttatttaaatttttaagaatattttttttaaatatgtgcataaatagaataatattcttaaaaaaaccttttatttcgatttgtatagaaaataataaatgtttcgatgtaaaaaattttggaaaagtaaaataatttcatctaaatttgctgtcagaaatagttcattaaagtttagattttatcaagaaaagtggagggaaatggcccaaagaaactttagcaacctgattcattgatcaaggtgctaaatccatcctgattaagggaagatgaataaaaattagttaaaaccaatcattcaataatattcgttattaaaattggttcaattgtttttatttgcaattgaaccaattttttttcttcactttttctgataaaatcaattcataaaaaagaaagaaatacatgaaaaaataaatattggcttattcggatttggagttgttggagaaggaatatataaggttttagaagaaaagcctcagctgaatgctacaattaagaaaatagtcatcaaagattcttcaaaaaccagaaacgctccttctgcattattttcgacgaatgcagatgatatcttaaacgacgatgaaataaatgtggtggtagaattaatctctgatgcagatgcggctcatgatattattaaaaaggcatttaataagaggaaacatgtggtgagcgcaaataaaaaattaattgcagcgcatcacaaggagttgttggatttgcaagagcagaacaaggtttcttttttatatgaagcgtctgtttgtggttcggttccaattatacgaaatttagaagaatattttgataatgatttattgaattatgtttctggaattgtaaatggaacgacgaattatattttaacgaagatggcaaatgaaaacgaatcgtaccaagatgcattgaaggctgcacaagaaaatggttttgcagaagcggatccaacagcagatgtagaaggttacgatgcggcaagtaaattggcgattattacattacatgcctttgggaaaaagattgaggtacaagatgttattcgaaaaggaattacgtctttaaaggtggaggattttaaatatgcaaaggagaaggattataccataaaacttattgcaaattctaaaattaatcatcaaacaggagaaataacctctacagttttgccgacttttgtagaacttaataaaa

SEQ ID NO: 2131 - DNA, 24287 bp, synthetic construct
  source 1..24287: mol_type = other DNA
  misc_feature 1..24287: note = Synthetic
gattataccctttatgcgaaaaagctcagaggctgtttggcatggaagtggatgcccgtatcgtgtcgttgtcgcaactgtatggcggcaaaatatctgctgctctttcacggcagcatcctcgggatttattcgatgtgaagcaaatggacattcctctgtcagaagtcaaggatggaattatatattgtctacttggcagcgacagacccattcacgaatccttctctccaaattttataaatcagagggaggcaatggagaaccagtttgtggggatgagcgatattccgttcagctatgaggaattcgagatgacaagaaacaagcttataaaaggagtcaacgacattatgaccgaggctgacaagagatttcttgtcagctatgaggaactgactgtcaaccgagaggaaagtccgtattcgatgttctttgattttccatccgtcaaatggaagattcagaatctacaaaaactcaagacgaccaatcctcggaaacttaaggctgaagccaataagctcaggctcattttgggaattgagtgatgtttaacactaggcataagaatcgttaaaacgaacctcagatttgttttatggctaaaattcactaccttggcattatgtaaaaacgcctcgttattgcatcaccaagaggaccgacaagaatgactgatttttcgtcaccatctctgttccctataatcattgacgactatctaaatcattgatatagctccatttggagtgtaaggttcaagttcctccagctccaccaaagtctggtgaaaggcaatgaaaaatcctgcaactcatttaattgcaggattttcttatatgcaatagaatgaactaaaatgaactggaggaaaaatttcttatttggttgaaattttaatattataatatactttgagtatatttataaagtgtattttcaactcttcattttgtgtagtcaaatattttaacgcagtttagagttgccagactgtatagctgaaaactttggttccgttctttctcttataccatatcgttaatccgacagccaaaagtatgctaatgacacgagcaatattagaaatcagacctccggcagcattctccgtaccctccatagtaaaaataaaccatgcgagattcatcaaaatatgtaatccgattggaacccaaagattgaagttccaagcaacgtacatccaactgaaatacacagctccaataaatgtgacaccaaatgctgcaaggcttgaaatcatgtcatgcccctgataggtatgagcaagaccaaataaagctgcagggaatagtgtagcccagaaaaagcctatttttgcatatcggaaaaataatccaaacataaaggcacggcataaaagttcctctatgaatcccggtagaaggctcttccttacaagcaacgaaaatgttaaatcgggatttattgttccaataataggaaatacgatatatagaggtaataccgaaattatagctaccaaaaatccttttgcaaaatttgattcaagcccgagaaataaacactccttctggggcttaacaacaatagagagaactataaaaacagaaagtgccattagtagatcccgtattgaagagttgagcacagtttggcttggtatatcgagaagtgaagtgatgcgccatacattttgccatgcaagattgacaacaaaagaggcaaccacagcaaaaatagctttagaaatcttggaattcaatgttgccatcttatcatatttggtttatttcaggtcgcaaagttaaataaaatctcacaaatgtgatatagtcatctgattattcaataaatacgaaggaatgatgcaggagaaggagttgctgtaaatataaccttatgacatccgtgaaggttgaggtacaccataatcgatttcattatttgatgtcgaacgcttgaagaatcaatatcgtgaaaagtgtaaaaaatgagccgtcaaacactgattttcatctgtggacgagaaattttgcgggatttacactacttttgtattcggattgataataactgtatccaagacctacgggaataaaaatgtgttcgatgtaactcttgtgattcataattgtaatactacatgatatataataattgcgatataaaatggctgtggtttgatcttgacgacacacttattgattttacaacaaattcacgcatggcactcgtcaagacatttcactatgcaaaacttaaccgttggttttctgatgagtattgctggattagatgctacgagaagcacaaccacgctctttgggatgcggcggcacgcggcgaaataacatcatcatttcttaaagcggagcgtttccgacgaccgcttgtcgaagccgggatgccgaaacatgaagcctacatgatatctgatgatctaagccggttgtatcttaatttgcttgcaaacgaaaaagaacttgtcccgggagcggtcgaggcactttcagcagtacgtaggtcaggaacgaaagtcggcatcctgagcaatggattcagttgcgttcagggacgcaaaatagaacgcgcagggcttacgggatatatcgataaggttgtgctaagtgatgacatcgacattatgaaacccgatgtgcgactttacaaatacgccatggaaaccgtcggtgttcaagacccctcccaacatatcatgataggcgataatatcaataccgacataaagggagctttggacgccggatggacggcattctttcttcagccaagacatggcaagccccgtgtcgatgtacctgatggggttgtatcagtcgacagcctttttcaagcaattcgcctactcggcatctaagattcctccgcgtctacagctgcgatgaaaagaaatagtatcataggggctcgtctggctaaaatttagccctaagtccataggagcgtatacatgtcattcctcatagtgcacaggattatctcggttgccatgtaacacaccgtttaaattataaaaaataggatgctatcatgtctgaaaactttaaaatagtagaaatcaaaaacgacaaaaagcggtttatacaacttttactcatcggtgacgaatcggaagcgatgattgaccgctatcttcaaaaaggtaatctatatgtgggtatatccaacgatatttccattgctgtatgcgtgactttgattattgataacacaacggttgagattaaaaatcttgcagttcgccccgatttccatcgttgcggttttggcagattaatgcttaaacatgtagaatgtgagaatcctgataaatccattatcctcggtacaggtgaaactccatcaactcttcgcttttatgaaaaatgtggttatcgctattctcaccgcataccaaattttttcaccgacaactattccaatcctattatcgaagagggggtgatactccgcgatatggtttatttgagaaaagataacgcgtaataattatactattcggtaaggtgtcatacaaccgattctgacgcgcttgagctgactttgccgtcgagaatatagttgcgtatggcaagagcctcgtccattgccagtgagggcaccgtggcgcagccggcattggttgacacattaagcgacactcgccctgtgtaaggggtaaacggagtgcttgcaatggccaccgattgaatgtcacggtatcttatatactcgcgtatgcatgcaatattgcctcggtttatcttcatatacgactctttcaattctatgctgctgtgcttccaggccattgccgcacgcacggctgcaattgcggcgtagaccgcgccggccatcactccgggcagtgcaagctttgtgctgatcattattatcgcagcaccgccgactgccaatagcagatgcgggatgaatgtgcgcatcagcaatcctatgcccgatgcggccgagagcagggtagtgtcgttcacgctgccgttgttgccaagccaccatgcgagcagctcgtcgccgagatttgacccgtaaatgcgtatgccgccttcatttttactgtcggtagcattctcggcctgatgcagcgagatggtttgacatccggcaatcttttcgagcggattacgctttatcgtgagcacggtagtcttttcacgtgcgagtcggcatgtaaaccgcgacacaaggcccgattcaatcgtcagcaggttatcggtcatcctcaatgtcatgttgccgtatcgcaaggctattttacccgtccacagcgccattactattagatatatggctacaaggaggcacaggcactgccaggctgtgggcatcacatcgccggcatgggtcccgatatactcgatgattcggtcggtggcgttgtcatcgatttggcttatcttgtcaaacagagccaaggtaacggtggcaagtacggcaaatcccttgagatgattttggcacagtgcgcctttcagtatgtttaaattgcttatgctccgtgtgtcatcctttacgggtggcggaagcgcaacagaatcgtcggttatatgggcaaaattctcgcccttgctgacgcgctccagtagcatctgccagtccctctcgtcgagaatcagctccacctcctgcttgtcgcttgcaagagtgtcgaaagcgacaccgcgcatggataaaagtcggtaaaccaatcctctttttgtgcgcagtgtatggattcgtgaaagcggtatgcttgttgtttgcttttccgcgagtccacgggtatatatcagtttgtcgccctcgatatggaattttctgaaataatatctcgtgaacgccactgcaagggaataggtgagtatgattcctgccgccaaggcaaatttccagaatagtcgtcctcctgaatcgtggctgttgtagagcatatacaccaatgcaacgaatgccgcccctacaatatctttgaacgatttcagaaacattatcacgaatgcgccggggctcattcgccggggagtggagaagtcagtcattgtcgcagtcggctttattgatgagcaatgatttaagccgctcggcgttttcaagcgtcagcccgggtatggtgagccggttggaggccgattgcgagccgtttacaacatcgacatagtagagcttgaaaatgcggcttaccaaattcatgcgcaagctcacctgctgaatcttgctgaaaggaatcgtggtgaccgaagtgaaaaatatccccgtgcggtaggatatgtccctttcgcgaagtgcataacccttgaaattatatattttgtgggccaatgccacattcacgacgaaggcaactgccaagacacaatctacaatcagcatgggcaaccattgttcccacatcagcggaatgagcaacgcacacgccatcaaaagaatatatacgataattatgcgaattacaaccacattcatgtagctgcgctctaccggttcaaagcaaagattctctataggctgaatgtcatcgcaccacacttgcctgttcgtcattctgttcatacggcaaaaatagcaaaaattccccgaaaatctcccaaaaggattcttctattcattggcctaaagatgtttcatggaatgaattgccttagcgctatcggtccaacgtaattattcgttcaacagatctgtgaagctctcaacatcggttctcactttaccggttttgtcgacaagcagatgaaatggaatgccactaaagttgaacttctcctgcatctgactccattcggcattgtttatgaaaatatgctcgcccttgatgttgttctcgtctaaccatggattgcacttttccggtgtatcgtaggtgacatagaggaacttcacaggcttatctttcagatcctccactttctctcggtcgttgagcatccctgcacggcaaggaccgcatgtcatcgaccagaaatcaacaataatcacatttcccttatatggctctataatgcgctgaaatattgaatcggccttagtcagtggcttttcttctacagcctgcgcctcatgctcttttacgaagtcgcgataggtgagagtcgttatgcgtgcaaggtcgggattggtgatgtaaggcaatatgttggccagaagttcggcatagctctcgtagtcgtcatcatagaatagtttcttatccatggcatagaatacccaattcatcaagcatatctgcaaggtaagattggctgaacttatattaaggttatcgcttatctttttaatgccgtcggccaatgacctgcgcattgtatagagcgaatcaccgtataagaaatctttctccttatcatattgatgaggatatgatgacatcactttgggttgtataggcaaaaatggcgcaaactccatgcgattgaaatagaaatgatcggcacttatcatcagcagaggattgtcgagcagatatttttcgcgtggagcgagaaaatcaaaatagttacgccaatatgcatcccggtcataatcatcttgcagatagtcgttatatgagtccaagattatcattgcataccatgtcaagatactggtgcgaatgatgtcagaggccagcggggagcagtcggcgagttccggcagtccggcattaatcttcatcaccatgctgtccaggcgcgccacctgattattcttccacatcatgagcgagtctatctggtcggccttatttatactgtaggaagcatagttctcccgagtaagatatttgctgttgatatctttcatcgttcggtttacttcgccgctaagacccgtgccatcgatgataatgccctcttccttcgattttgcttcgatgtttattataatgtcaacggtatcgccgggactcatatatacattgtcgaatggcttaacatacacaaacattggatatggcacgttgaatttcttttcgatagtgcaatcatcattgaaattcatggcatggactgtttcccggttaataaggtagttgcgaagataagcggttatagcgccggtattaagcctctgcgccaactgcttgagagcaatcttctgctcttcctccgaagccttttttaattcttcaggcatcaacacttttaccctcatcaacacatcgccaccgtgcatgcggtattcgccgattgtggcacttggatagttctgcatttgtggcacaacggttttcttgctttttttctttgcgtcgctgtgcaaaggacagcatagcattacgagtatgcttagaattgtgataataatcttcattatggtgtattatgtaatctctgttttgccagctaaaaggatggtaataaactcatctttgtattgcttttcaggtcggttattttcaggttgcctttccttacgaaacaatagctgttaagctctatatattatgaattgcgttatatgaggcaatactttgtaaaagtacaatattttttttaattgcaagtagaaactcaataaatatgttgattagcaagcagagttattgccgtaagcacacaggagcatctgaagagcctcgacccttccatcatgactgccagaatcagtaagagccgtaaaattggggttgtattcaattgtttgaaattgtcctatattctttaggcgtgcgtccggtgcgacgtttgaaaaagcgtacgaaatgttgagggtattcaaagccgagcatatcgcctacctgtgttatagatagcgtgaggtcgttaagcaattctcgtgccgagcacacaagccggtcggctatcatgtcttttgcagttgttccggtgctcgtcttgacgagttcgccgaaatagcccggcgatagattaagtttatcggcgaaatacgccacgttcggcaagccgcggtgcctgatttcatgagtcacatattcatccagcagggcgttgaatttttcaattatggtgttgttgattatttcgcgtgaataaaactgtcgttcataaaaacgcagacagtagtcaaggaaaacctcgatatgtgatattatgatggaccgggtgtgacggtcgatgttatgcttcatttctctttcaatcaacccaaggacggctccaagcagttctacctcttcctttgaaagatgcaaagcttcattgctgttgtaggaaaagtagctatatgacgacattttactgcccaaagctgtacgggcaagaaaatcgggatgaaaagcaagcagtgtccagcgaggttgtgccattccctcgtctactacaactgttactttctggccgggagcaaatgcggtcaccgacatttcgtcgaagtcatatttagtaaggccgtagttcagatcacaacctttggtttctttaatgtatattgcgtaaacgccaaactcgtatgtagtagttccgggtttcacctcatcgttgcagtgccctacggcaatcattgggttaagatgctcgaacccgtaatattcgttaagacgacctatcgtgtctaattttacttcgtttgtcatatttatttaattgtttaatgcaaaattactgataaactacaacttacaaaaatcctgtttggggctaacatgacctatttttcggaaatacccgataaccttaagaaattgcaaatagtatgctgatataacatagcattatcggttgtaatgttatgtcaacaggctcacgatgttaaaagttatataattctaacatttgccgattggtagatgcgtatttatgtctatatttatgggcaaaatagaatgtaaaatgttaaaccgcatcatcatttgcaatgggatgaataaaaaatttggaggttgaaacagctcgttttacaaaatgaagaaaatagtacgatgcaatgaaaatgattatgcatcgctctcggaaatatgggagcgttcggttcgtgccacgcatgatttccttactgaaaaatccattgaagaaatacggtcggcattgattcctgaatattttcccaatgttgacctgtatgctgtcgatgattgcggctctctggcaggctttatcggattgtcgggagagatgatagagatgctttttgttgatgccgattgtcggggacttggctatggctccatgttgctggattttgcaaaggcaaacggagctacacgggttgatgtaaaccaacagaatccttcagccttgctattttatatatctaagggattccatataatcggccgggatgatacggatgaagccggaaggccctatccaatattgcatctctctttatgatggggcatggccctgcgtgttgtcgataatattactttagtcgtcaatcatcggcggacgggtgtttttgggcggcgtggcttgtgtcgtaggagtttatcaagcgtgcttttgccaggcttccctttggcgaggctgctgtgcggttttgcgagagtggggcggtgttcctccgactgcccgggagtgggcatcggtagttgttggcaagtttgtgctgatgtttcttgaggcttcatgttctccatggccggtttttgctttgattccggtaggcgtgacgatgccgcttttgctgccttttgtgcctttgccgctgctttgcgctcgcgggcgaggcgttgtagttcacgtgcgcggtatcggcggcggattgtaggcataatcaacatgaatattgcacgtggcactcccgcagtcacttcgattacggtcaggtcgcgctgataggcatcgattgccgcgcatatctcgtcacggtaatgcttcggcagcctgtcgacggcatccttccactcctgatcaaatttcaaacttttgcctctcttgctatgtgcgttcattactgtattttccataatcattgttttttcagcaaatatagtacgccgaaatccccgatttcaccccataatgtcgcgaagcgcattttctcctctattagtccggtcctccactgtttcggagcataagaaaagcgacccggaggccgctttaaatgttttcacaacggaataatccttattgtgaattgcttcattttttgtattgcaaatatattatttttttatcatccaagcaagttattgttaagattatttactacatttgtaaatattcaatcaatcacagcaatagaaatgaaaaatatattcggattagatctcggaactacaagtataggatgggctgttgtcaatgaagccgaaaacgccaatgagcagtcagcgcttattgctcttggcgagagggtaaatccacttagtacggatgagcgaaccaattttgaaaagggaaaaagcataaccaccaattccgaccgcaacctcaagcacggggcgaggctgaatctattccgatataaaatgcgtcgcaacaacctcatatcgctgttgcgcgacaatggaattatcgatgactcttcaatccttgccgaaaacggtgagcatacaacgtttgaaacccacaagctgagggctaaggctgcgactgaacgcattgagctgacggaatttgcacgcgtactgctcagcatcaataagaagcgaggctataagagcagccgtaaggccgatagtgccgaggagggtaaggccatcgacggaatgtcgatagccaaggagctttatgaaaatgacttgactccgggacagtacgtttatgctcgcttattgcagaataagaagtatgtgcccgatttctatcgctccgatttgaatgccgagttcaatcgaatatacgccaggcaatcgacctattatcccgatgtgctcacccccgagctcgccgagcagttgaacggcaggaatgagaaggctacatgggccattattgctggtgcattcaacattaaaggggccaagcgggcaaccaagggcttcgataaaaaggtcgaggactacaagtggcgtgttgacgcacttgtcgacaagctcgatcctgaacagatagcaggcgtgttgagtaaaatcaatcgcgacatatcggggtcgagcggctatctcggggcgataggcgaccgcagcaagtcgctttatttctcggggttgaccgtagggcaatatcaatatgagtgtcttgtaaagaatccccatcacagtctgaaaaatgaagtgttttatcgtcaggattatcttgatgagtttgagcgaatatggacagtccaggcttcacaccacgataagctgaacgacaagctgaagagtgaagtgcgcgatatcgtcatcttctatcagaggcggttgaggtcacagaaaggcaatgtggctatatgtgagcttgtgcaatacagtgttgatgtgacggtcgacggcaagacaaagcggaagattgtaggccctaaagtgtgtcccaagtcatcgcccgtattccaggaggcaaagattctacagattctcaataacgtaaaggtaactaatcgtaacgacgacaccgaaaggccgttgtcgggcgatgaaaaatcggctttgttacgtgagcttaattggtgtgacaagatgtcggctactgaagcgttgaagctcatttcgctcaatccgcgcatctattcgataaattacaagcaacttgagggaaacacgaccaatgcatcattgctgaagagcttcatgtcggttgtcgatgttaccggccacgactcggaagccattgaagacctgccggcatctaaaaaggctgaaattgtggaagggattttcaagtcacaaggcttcaataccgacatattccattttgacagcagcgttgaatgtcaggcgattgaacatcaaccggcctacatgttgtggcaccttatatactcctatgaaggcgatgactctatttcgggcaacgaggcgcttattaaaaagctgtgcgagaaattcaacttcgactcggagtcggctgcaattatcgcaggggttgtgtttaagtccgattacggaaatctgtcgacacgagccctacgcaagatattgccctatctgaagcagggcatggtctatagcgatgcctgcgacaaggtcgactatcggcattccaagaggtcgttgacgcgtgaggagatcgacaaccgggactacaagagtcgcctcgacctgctgcctcgcaattcattgcgtaatccggttgtggagaagattcttaaccagatgataaatgttgtcaacagccttattgaaacttacggccgtcccgatgaaatcagaatcgagcttgcccgagagctgaaaaaatcagctaaagagcgtgccgaccttatctcgtcgatcaacaaggcgactgccgataacgaaaagataaggcaattgcttatcaatgagttcggtattcaacggccaggccgaaatgatataatacgatatcgcctatacgatgagcttagcgcggtaggataccaaactttatactcagatacttatataccccgcgaggaactattttccaagcggtttgacattgagcacataatacctcagtcacgattgtttgacgactcttttgccaataaaaccatagaggctcgtgacataaacattgaaaagggtaatgctacggcattggatttcgttgaagccaagtatggctcggaatatgtcaaggagtatcgcaatcgtgtggatatattacttaaggaagggaaaataggtcgtggtaagtacaataagcttctcaccaaggagaatgacattcccgaggatttcataaaccgcgatttgcgcaacacccaatacatatcgcgcaaggcgttggagatactgtcggaagtcgcacccaaggttacggcgacatcaggctcgattaccgagcgcctgcgtgaggactggcaacttatcgatgtgctgcaggagcttaactgggataagtatgacaggcagggccttactgaaacatttgtcaaccgtgacggtaacaccgtgaggcgtataaaggattggaccaaacgtaacgatcatcgtcaccatgctgtcgacgcagtggccattgcctttacccgggcggaatatgtgcattatctaaacaatcttaatgcacagagcgacaagggtaaggagttttacgccatacgtgaacgctatcttgagcgtgacaagcacaataatctgcgattccgatcgccgattcccgtcaaggagttccgcgcggtggtgaaggatcagcttgaaaagtcatttgtttcgcataagtccaaaaacaaggtcgtgacaaagaatgtcaatgcaacaaagtgcagcggcggtgtcaatcgaaaggtgcagcttactccccgcggacaattgcacaacgaaacggtgtacggacgcataatgcagcctgtcgtgcgggaagagaagataggagtagcatttgactacgacaagattgccactgtggcatcggccgttgagcgaaaagcgttgacacgcaggcttgatatgtttaacggcgaccccaagaaagcatttacgggtaaaaacagcccggcaaagaatcccgtatatatcgacgacgagcgtaaggttgagttaggcacgaaagtgaaaaccgttacaatggagtgtgtctacactataaggaaggagatttccgagagccttaagcttgacaaggtaattgacaaaggagttaagcgcatactgcaacagcggctcgacgagtacggcggtgaccccaagaaggcattcaccaatcttgatgctaatcccatatacctgaataaggagaagggcataaccataaagcgggtgaccataaccggtcctactgaagtggagccgcttcactccaagagggatcatcttggcaatgagatgcgtgatgccgacggacgcactatacccaccgactttataaacaccggcaacaaccatcacatagccatataccgtgatgcttcgggaaatcttcaggaacgtgtcatgagcttctttgaagccacagctcgtgcatgtgctctgcctccgcttccggtgatcgataaggattatagaaagtgcgacggatgggaatttctgtttacaatgaagcgtaatgagtactttgtgtttccgcgatatgaatcggtcgtagacagctcaacgggtcaggaaaagttgataaagacatttgatcccaaggccgttgatttgctcgatagggataattacgcaaagattagccctaatctgttcagagtgcaaaaacttaccaatagagattactatttccgtcatcatctggaaaccaatgtcgaggaagtcaaggaactccgtgatattacctggaaacgaataaataccattaaattaatggacgatgcggtaaaggtaagaattgacaatcttggatggattgtcgctgtgggcgaatcgtaatctttaataaaattataccatgataaaacgtactttatatttcggtaatccggcttatttgtcgaccgaaaaccgacagctgttaataagattgcctgacaaatgcgggtcggacaatgctgttaccaaaagtattcccatagaggatatcggtgctgttgtacttgacaaccggcagataaccatcacccaagccgccttggaatcgcttagcgaaaacgcatcggccgtcatagtgtgtgacagcacgcatcatccggtttcgttacagctaccgcttgatggcaatacattgcagagcgagagatttgcggcacagataaaggcctcgcttccgttgaagaaacagctgtggcagcaaacgattcaatgcaagatacgcaatcaggctatggtgctgtcatcgatacgcaattgcgaaacaggcaatatgattgcatggtcgtcgcaggttaagagcggcgacattgacaatcttgaggctcgtgctgccgcatattattggcgtaatatgtttccttcggttcccgactttacacgtgaccgttacggatgccggcccaataatcttttaaactatggttatgcgatacttcgggcagttgtggcaagagccttggtggtaaacggactattgccaacgcttggcattcatcatcacaaccgatataatgcctattgtcttgccgatgacataatggagccttatcgaccgtttgtggatgctttagtagttgatatcttcgataattctgatggattggtggatttgacgacatcggtaaaatcacgattgttgtcaattcccacgattgatgttgtgattgacggatgccggagtccgttgatgaatggagtaggacgcactacctattcattgtataaatgttttagcggtgaatcgcggaaattggtctatccatctttcaccctttgagttagacgatgaacagtcgcatcagtgaatatagggttatgtgggtgtttgtattctttgatcttcctaccgaaacgaagcatcagcgcaagcaagctgcaaagttccgcaagaatcttatatgcgatggcttcactatgtttcaattctctttttatataaggcactgtccgagcaaggagaatgccgatgtacatattaagcgtgtgaaaagttttattcctactgatggagttgtgggattgttatgcgttaccgataagcaattcggcgcaatggaattatttcagggaaaatccgaaaaaaatttgcctataggaagtcaacaacttgagttgttctgactttcggaaattaaatctaatgaaaacaaaaaactgttgtcaataaacgacaacagttttttatttgaaataatctttgtactatgttgtcaatcagtaaattgcgtacaatctgctgtgaactatacacaaagatacaaaaaatgaaagcaattcacaacttaccgcaatcagattggccttcaaagcgagctgtgaactatacacaaagatacaaaaaatgaaagcaattcacaaccaggccgatgtagaagttaagcaggctcagctgtgaactatacacaaagatacaaaaaatgaaagcaattcacaactgaatacggcgatgaatttatgcgtcctcagctgtgaactatacacaaagatacaaaaaatgaaagcaattcacaactatagaagctgtctcgcttttcgtcatattgctgtgaactatacacaaagatacaaaaaatgaaagcaattcacaactttagcagcactcccacactcggtcagacagctgtgaactatacacaaagatacaaaaaatgaaagcaattcacaacgcattggactgctttcgatggttctatcagctgtgaactatacacaaagatacaaaaaatgaaagcaattcacaactaacgatctgtttaaagtttcgaccgagatgctgtgaactatacacaaagatacaaaaaatgaaagcaattcacaaccaatgatttgtttaaagtgtcgactgaaagctgtgaactatacacaaagatacaaaaaatgaaagcaattcacaaccagagcgctgttatttcgatttttaatcgtgctgtgaactatacacaaagatacaaaaaatgaaagcaattcacaacattgttagtcaagcgggaatacctgtccaagctgtgaactatacacaaagatacaaaaaatgaaagcaattcacaacttaagtctaataactctcaaatacgagaagctgtgaactatacacaaagatacaaaaaatgaaagcaattcacaacgcagcacccctactcttggtcagacattcagctgtgaactatacacaaagatacaaaaaatgaaagcaattcacaaccgacatgaaatcacgctatgttaaagtgttgctgtgaactatacacaaagatacaaaaaatgaaagcaattcacaactaacaaaaaagcagcgaatgatgtgaaaagctgtgaactatacacaaagatacaaaaaatgaaagcaattcacaacacccatgcctaaatggggcgttccaacattgctgtgaactatacacaaagatacaaaaaatgaaagcaattcacaacgaaaacaattcatcttataacttaaaaaaagctgtgaactatacacaaagatacaaaaaatgaaagcaattcacaacagaggaggatataacctcaaatttgtggtggctgtgaactatacacaaagatacaaaaaatgaaagcaattcacaacatttcgccatgatgtcattgcgcaacccctgctgtgaactatacacaaagatacaaaaaatgaaagcaattcacaaccacttgttagtgtcactttcatctgtgtatgctgtgaactatacacaaagatacaaaaaatgaaagcaattcacaacagttagcgtataaaaagcttgcttctgttggctgtgaactatacacaaagatacaaaaaatgaaagcaattcacaaccccgtttccgttattttatcccccttgaagctgtgaactatacacaaagatacaaaaaatgaaagcaattcacaacaagtggtcggcccaacatttgctcggctacgctgtgaactatacacaaagatacaaaaaatgaaagcaattcacaacgtaagtcattacaaatacccttaaatcactgctgtgaactatacacaaagatacaaaaaatgaaagcaattcacaacaactttggcggtcgtttggcgagatggtcagctgtgaactatacacaaagatacaaaaaatgaaagcaattcacaacaaagggcgtgaagcgtaaaaatcataagttgctgtgaactatacacaaagatacaaaaaatgaaagcaattcacaacagacctgcaaaataaaataacttccctcaagctgtgaactatacacaaagatacaaaaaatgaaagcaattcacaactttgggcggcatcgaccaagaagctgtcgggctgtgaactatatacaaagatacaaaaaatgaaagcaattcacaacaaggcatcgactgattatatagaaatcgatgctgtgaactatatacaaagatacaaaaaatgaaagcaattcacaacatattttaatctcgccataacttgtaatggctgtgaactatacacaaagatacaagaattagattaatttacaacagcgataatttggtaaaatatgcggcgatgctgttggataatcgcttaaggtaatcgttaaaatgtttgggtgatattggggatcgattttaaagtgttatatttgtggtgctcgcggtcgctctataaggtttgccacactttatagggtgtcctgagcaatcgcaaatatacgattttaaaatcagacgacaatgtgacctgttgaatttaatgattatttcaaaaacattctaagaacattgcgtcagaaataatcgccgaaacggcgactgattttccacacgaaaaagttttgagctgtgaactaaaaatggatataacaaaaaaatgaagcaattcacaactaatacaaccctattgattcaggaggattcatgtgaaatcggtacaaagatacgaataagttgagagcaatgccaaatttatttggacattgccgagcgtgagtatcttgggcgaagacaacgatcgaataagttgagagcaatgccaaatttatttggacattgccgagcgtgagtatctaaaaatatagaggcttcatttgattgtgagcatgtaaccaaatccgcgctggttgatgatggcgattgccgggtcgtgacgcagggcacggcgcagcttgtggatatagccgtgcagcgaattgcggttgctggggtcgtcgcgctgccatacggcaatcatcaattcggatgcatctaccgttttgcctatgttggaagcaagacgctcaagaatcatggcctcgaaatgcgacaattcgacaacgttatcgcccatggtcagcatctgggtcgtcgtgttgaatgtgtatcctccgatggcaaactttgtgtcgtcgcttcggttgtcgccgtatcggcgcagcaatgccttgattctgattatgagctcgcgcagttcaaaaggcttcttgatgtagtcgttagctcctatttcaaatcctttctcaacatcgtcgatggcgcttttggcggtaaggaagagtagggggaccgcaggtgacaagcgccgtatttccttggccatcgaaaagccgtccatgcgtggcatcatcacatcggctactacaatgtcggctccggcggtcttgaatttgtccagtccgtcgattccgtcaacggcctcgatcacctcatagccctgactgcgcagggtatcggctactatcaggctgaggtcggcctcatcttctacaagcaggattctattcattgtcgttgttgaatttaatagtaaatgttgagccctcgccctccttgctcttgacattgatgtgccatcccatcttgtcgagaatgctcttgacatagtagagcccgatgccgtagccgcgcacatcctgccggttgccgtgaggcacgcggtagaacttgttaaacagatagggaatcgattttgccgggatgcctatgccgtcatcggctatcgacaggccgtcggcatcgtatgtcattacgattctcacccggtcgcctgagtatttgatggcgttgtcgatgaggttgttaagcacgttggacagatgcgttttgtccgactccaccgaaacgttgtcatcgccttttatttcgatagttatcgccttgtcgcccctcattcgctgggccgctgcaatttcttccaagagaggacgcagttgcacggcctctttttccagcttcatggttttgcgtcgctccatgctcattgcgagaatgttttccacaagttcaccgagccgcttgagctgcttgttggcaataagaaggtaggtttctttcttcgacggatcgttgctcgtgtcgtagttgagcagtgcgtcatttgccgaataggctatggctatgggggtcttcagctcgtgggtcatgttgcttacaaaatcgtccttcatctcctcgatagtcctgagtcgtgacactgttcggtaaagatagatgaaagcgagtgagaatacagcagtaagcaggatgacagtcactatcacgcccgacatttcggaaaatatatggcgggtcaacggcgtgatgtaggcgcgataagccaattcggcatcggggttgaagctgtaggttactacatcatagtcgtcggcaatgtcacgagagttacgcttgaccacattaccctgcaggtcgatgacctcgacggcaacaaattgaggtcgaatgaaacggtcgttgaggcgtttggtgaacacgctgtccatgatttccaggtttatatcgacataggggtccatgaccgaatgaaactgcttgcccacggtgttgacaaacttattggcaaacgaaatgtccttatcggtcgagatgctgccggttgccactgagccgtcggggtagcgggtggctgagatcatgtttccttccgagtcctgtatgactgatgtttccccccggcgttcgcttcccggctcctgttcgcctgacgcaatcttggagcgcgtttcacgattggctctttcggctctaatccacagctcgtcaaggtcggcatcggccaatgcgcttttcacatccctctcgacggtcgagcgtattgactcataaagatttacgagataacacacattgcaggcgaaaatcactgcaatgattatgatgaatgtagccgatatggttttaaagcgtttcatttattgcacttgtttaatcacgattggaaacacagctaagttgtgcatcgcaaatttaataacaatccgttacattaatgattaaacttattgcgatttaagactaaataagggaacgtgttgtgattgctgctgatttcagttataaatttgcgatgacaaactttatcgtgtcaacgacatctatgtttcgctatgtttcaacaatcatcgccctcgttctctcggcgttgctgaccgaggggctggcccgggatgtggtagtggtcgattcggttaaccgcagtccattgcccggagcgtcaatatttgaccgccaaggtaactcgataggcataagcaattcaaagggccgcacaacctatattgccgatgaaagctatccgataaccgtgcgttatctcggtttcaaagagagtgtcgtgacggcggcaagcgacgacacggtagcacttcaggaaatcgtgtcggaattgcccgaggtggtgattgagtcacggagccacaaggtgatgcacattctggcctatgtgcgtgaatactcgacattgacaacctacaccgacaccgtgttcctgttccgtgaaaagatggtcgactatatgttgacacccgacaaaaagtcgaagttcaagggatggtcaagtccgaggattatggcgtgcaagtcctactaccgattcagcaacgctgacgggctcgacagtgtgagcgatgcgagcaaccatcatttttcgtggtcggactggataggcgttgtgccggttgccgagatgccctcggccttgaggggagttgaatatgctaccgatacgctgcgcggtaaatacagtcccaccgaaatatggattagaaacagcgaccgcgtcaccgtaaatgtcaatgtattggccgatacgacaagctggaagtgggtacccaatctgtcgggattctttcgcagaaatcttgattttgagaatttcagggtgaggttcaattacggcgatgtggtgggcgacactatttcgcctatggacttggccggatattcattcaatatagagtcaagagggcgcggacatgaaatgtttagattcaatcgtgtcgacgagccatgctttgtgagcacctatgccgaagtttatatattggacaaggagtatataaccgtaaaggaggccaagaagtgggacaagcataacttcatgaccgatgagataggaatttaccgccccttggaggctcctgagctgcagccgtcgattttggatcttatggccagggttgacaatatcgacaaagagggggtgagattgggacaggagcctgactcccgaatgataagtcaacatctaaacaaccaaaacttcaagcttggaaaccgattgctgtttatgctgaaacaattgactggaatatcgctcatcaaatcaaataaaaacatgaatcgtcaatggggcgatttcaaaaagggaaagaaacgaagcagcaacaggttgagcaaattttagacttcatttgccgtattcgattcctgctttaacacgtttattgtaggttgcgaaactgctgtaggcattgtaggtgatgacacatgcgccaaaaatctcaaaccatcccttggcgtcgatgctgcgggcaagtatcggggtgactatccaggaaatgattatgacgcatcctaaaagcgtgagcaggaacgagatatttctttttatgcggttacttacagccatattgtcgttatcatttacgctgcaaagatataaaaaaagcacatacaggcaagtaaatggatggggttgtgtgccggaatagcgatattttgtttatttttgcatcggtaaaaatcacatttcaacaatgcgcacgcttctttacatggctatactgctggtaatcaccggatgcagttgctcaagtccccgattgagggagcttgacgaggctcagcgcatgattaccgaagaccctcgggccgctctcgactgtctgaatgtgattgatgtttcggagttcggcgactcggccacaatggcgcgatgggcgttgctctattccgaggcgatggtggccaacaacctgtcggcgcctaccgacaccataatcaacatcgctgtcgactactatgagcgtcacaacgagcgggttgaatttcaacaggcttgcaggcttaagtcgctgattaccgccggcgataaaaaggacgcgcttgcgtcggccctatatctgcagaaggaaaaggagttcatgctttacaacgaaagggtgaagcgcgagcgattgatgacatggggattgctaaccatagtgttggctgcgggtgtcatcgtgtggcaacgacagcgacttaaaatcaagactatccagaatgatgctttgatggctgaagcatcgggcctgaagtgcatgattgatgttaggaacagggatgtcgacaagcttgaatcgactttgcatcggttgctcgacggccgcttcgcgctcatcgactcgctgtgtcagacctattacgagtcgcagggcacaaagagcgagcgaaagaccattgccgataaagtgaagagcgaaatcgaggccgtgagttccgattcattcggcgacatggagcgagccgtaaacgactgctgcaataatctgcttgtggggcttaaggagatatgccccgacataaaagccgacgactacaagcttgcggtgtttcttgcgagccgactgtcgacacgcacgatcagcctgcttttaggcgagtcggtcgatgtggtctataagcgtaagtcacgacttaaaatgcgcttgaaggcgattgccgacaatccctatcctcaaattttggagattttttgacccgaatcaatgcgtgtcaggaaatatgtgaatgctattcggtaagtggcttgtatttagtgtcttgcgagctgcgatgtcagacttttattttggcgttacacatgattcatgagtaattttgtgcaaaaaattacatcacactcatgaacattaaagttttagtcacattagcttcaatcattgcaatgtcgaccgccaatgcacagaatcatgaatcggccgacagtcttaaccgggaacttcaggagatagtgttcacggccaagcaaccggccacaagacttgaaggctccactctcgtttcaactatcgccgggtccaatctcagcaatctcggcaatgctcttgatgtgctcgcgcaattgcccatgataaaggttgacgacagcacggtgagtgtagtagggcgcagcaacacggagatatatatcgacggccgtccgatgcgtgacaacatggagttgcagcagctgttgtcgggcaacataaagcgggttgaactgcttatggctcccggggcaaggtacagcagcactaccgatgccgtgataaaaataaccacacggcgtgacttcctgcagggattgtcggtcaccgatcaattcacacttaagcgcaggcgcaaatggtcgctggtcgatttggccgacttgaactatcgggcgggagcttacgactttttcctgtcgggagcgttcaatcacgataatacggttgtaaacgggagcactgtcaacacattgaaatataacggagaaattactacggtgggcagttcgcagaacaaccgctatcccaccaatacgggaagcgtaaagagcggattaaactattcaaaggatgccttgtcgtttggggcatactaccgcttcagt

SEQ ID NO: 2132 - DNA, 24287 bp, synthetic construct
  source 1..24287: mol_type = other DNA
  misc_feature 1..24287: note = Synthetic
tctaaatcattttcacaatagattaattttccttggggaattatcgtctcaataaaaattttaaactgagaaatatattcctcaaatgttggaaatacattgatatgatcccaagctattccactaattacgccgatgttagctttatacaaatgaaatttaggcctcctatcaattggcgaagctaaatactcatcaccttcaataataattataggtgcggtatcggttattttaaccatggtatcaaagcctgtaagctgagccccaactaaataatcaaaatctttattgaaatgattcaatacatgcaaaatcatggatgtaattgtggttttaccatggctgcccccaattactaccctaaccttatctttagcttgctcgtaaatatattcaggataagaatagatttttaatcccaattcttgcgctttcaacaattcgggattatctaagcgagcatgcattcctaaaataaccgcatcaatagccgaagtaatattttcggcaaaccaaccaaaagtagcaggtaacaatccgtgctttgctaatcttgatatcgatggttcaaaaattacatcatcagaacctgttactttaaatccttttttatgtaaagcaatcgctaagttatgcatagcgcttccgccaatggcgataaaatgtaccctcatagtttaaataaccgataaattagctaatagttaatttagagaaataaattgagcagctacccaatctcctatttttttatgatcaacgtaattaagattaaactttaaacaatgttgcttaatcatctccaagtctggatcttcataaaaaccactaaataaaataattccattgttctttaaaaccgcagcataagtctcaatctgatctaacaatatatttctattgatatttgccaaaattacatcaaattcttctttaggaatggtttctttacttccgcagagcgatgttaaattgtcaatttcatttaaggcagcattttctatagcactcaaataacaaatatcatcattatctatagctacaatttgctttgcccctcttttgctagtcagtatacccaaaatacctgtacctgctcccatatctaataccagcttatctttaacatctgtttccaaaatgtaaagcatcatcatggtggtagtttgatgatgacccgtaccaaaagccatcttgggatctataacaatttcatatttatattgtggctgatgctcgtgaaaagttgctcgcacgtagcaatcttcattaataattagtggactaaaattcttttcccactcctcattccagttctctggctctatatgatggatggtataactgtatttaaaatcatcgctaaacgtttttaatagatcgtctaatttagtttgtacaaattctgcagctactataaaggctgctacaccatcctccgtatcttcaaaagtatcaaaaccaatatccgctaattcggcaactaaaagatcttgttggtattcttctatatcacttaaacttaaagcaacttttaaatatttcattaaactaattaaattataggtttgcctgagcataatctctcaactatgctcaagacagttacatgctaagaattaaatgctttaacaatatcaacaaaatcacgagattttaatgaagcaccaccaattaaaccaccatcaatatcattttgagcaaataattcggctgcattttttggattgcaacttccaccatataaaatagtggtatcatcagcaatgtttacaccgtatttcgcttcaacttttgctctaataaaagcatgtatatcttgtgcttgctctggcgaagctgttaaacctgtgccaattgcccaaactggctcataagctaaaacaactttagcaaaatcttcggcatttaaagtaaaaacaccattttctaactgtttttctaatacctggtaatagctcccattgtttctttcgtctaatgtttcgccgatgcaaaaaagtggggttaaattattttgcaaagcgattacagttttagctgccaaaagttcgtctgtttctgcaaaatattgtctacgctctgagtgaccgataatcacatattcgcatccagtggattttaccattttagcagaaatctctcctgtaaaagctccactttcattttggtgacagttttgagcacctatttttactacaccagcacccaactgcgttaagctattgatatgaatataaggggcacaaatcactgcaatttgatcgccttttttctcatctctaaccatgttaacaatttcagaaaataacgaaattccttcgctaaaatccatattcattttccagttaccagctacaattttttttctcatatcatcttatttgtcatcctgagtatcacgaaggatctctgagatgaatatttgtaattatttatatttcaattgcaatatgcaataaacttattaagcttattttttattgacgaacttataatgaaactcttaaaaactttagttattgggatccttcgctgcactctggacgacaaaacaactttaaaaatgtctatattctttagttctttcaaaaatttctgttaagattttaatttcaatttcatccaaaaccatgtttctacgttctagaaccaactttgcagtggctagcattttatttaaactataaacttcaaaaccatgtgcgccaccccatgcaaaatctggtataaaatttcttggaaaaccagaactaaaaatgttagcgcttaccccagcaaccgtaccggtattaaacatcgtattgatggcacatttggcatgatctgccataattaatccacaaaactgtaatcccgttttacggaaactttgttgtgcataatcccacaacctaacctcggcataattattttttaggttagagttattgctatcggcgccaatattacaccattgccccattaccgcgttacctaaatacccatcatgccctttagatgagtagccccaaattaccgcattatttatttcgccacctaccctactgtatggccctattgtagtttgcccataaatttttgcacccatttttacttgagaattattacacaaagcaaatgagccacgaatatgagttccttcccaaacttgtgcatttttacctaaataaattggccctgctgtactgttaaaggtactgcattctgcacttgctccttcttccgcaaaaaactggtcgccaataaaagtattggtgttactaagcgtagctgatgttttccctttggttaataaagcaaaatctaaaactaattcgttatggttatttttaaaaatatcttcaggaaattgaatataggttaaatctcctataaactcaattgctttgaatttacttagcgcttcatcgcaactaatgatctcctcagctattttataggcaataaccaattctgctttgattaaaacttcagcttcttttaaatcagcaatagctgctaacaattctttattcggacaaaccccaccattgatatacagcggtgcagttagtgcgggatatttaatttgtaaataatcttgtgttagaaagccaaattcggcatttaaatatttagcccatttttcggcaatggttaaaataccaattctcaaatcggcaactggcctggtaaaggttaatggtctgagcgtttgccaagacttatcatcaaataaattgatcgtcataagctacaaaaataaaaaaagtcctgagcttatgactcaggacttcaaaaaatatggtgttttcgctaaattatttcttagcgtaacgagttttaaatttatcgatacgaccagctgtatctactaacttcattttaccagtataaaaagggtgagaagtatgagaaatctctaatttatataaaggataatcattaccatcttcccatttaatagtttctttagtctctacgcatgatttagttaaaaatgcatattcgttagacatatctttaaatactacaaatctgtagtttgatgggtgcaaatcttgtttcatttgaatattattttaagttatttatgtgaaactatcaatgacttgattgcgttttgcgggcaacaaagctgatgacaatctctatttgtcttttttaacctctatttaagaggttgcaaatatcacgattttatttttgaaaaacaaactcaaataagatttttttaaaacataggaatttgaccagaaattttatctgtatcaaaagcaacacgagcttcgccttgtttaataaacctcgttccacctttagaattatcaatatttataattcccattcttatatcttttaactctgttccttctctagaccctgatattacaattgcaaaaactgccgagtttgtaccagcaaatgatttcactttaccgtaaattgtaaattgatttccactacctgatattgctgtaacaatgctagtatctgcctcattaagtaaatttttgccaattaatttaatattgttatcttgatcttgatcaaaaaacttaaccctaccgtcgagaaactttaaatttggcacatcttgagatctattgcttttaaacaaaacgaaaggtgtaaaaataaatgcctcattattaaatttgggaggattaacatcctgattaattaccaatcctaattttgttaaggtatcctgaaattctttaggtatgatatctgcaattttcttttgtaaaacttcctgttttgcaagttcatcaactttttctttatcttttttacaagcgaataaagtagttgcaattaccaatacgagtaaactttgtttaaatgttttcattttttttagttttaaattattaatttgatcatcaatttcttttgcaacaaagtctcggaaatacctcaaccaggtgcatttataacttttatatattaatgggggtatttaattgtatggccacgtacggtttaatttgaaatgggcaatactatacgttagaaatctatagtgtacaactaagtatctatttagcaattacttcaatcttccaatttactataatatgagaagcgtttttattcccaccttcataaaaattgagcttaaactggtctgaatttcctagcttaataaacttgctctcgccaggttgcatcgtttctatctgattagcataatctgccaaattgataattaatggcgatccattacattcttcacaaacatatcctctatctgcaaatacttctttatctttcaaattgcctctaagagaaattttcgtttttcttaaatcttcattcgaaacgtttgtaacaatggttttgatggcgttgatattagtgggaatatctttataagcttttgttacgccatcttcgttgcctaatgctttaacatcataactttcgccattctttttccacatgtttgggaaacttgcatttttgccaggtgcttgtacacttgcagaaagtgatccaaataaatcttcatcattatcagtatcttcaacttttttagcgcttaaattttgcaataccaatttcacatcgtatttcctatcggccgaaacaacaccacaattggttgttgcataattaacattggaattaatccaagctggcgaatgatctgctgcaaaatttagggtgtaacctattggtgcgccaatattttgcgcattgaattttactacaattttagaatttaaattccttaacacttcatcaatagttgtacccatatttattgcttgcccgccatactgaaatgtttttatctctgttttacttgaggttaagatattggttacttcgctagtagataaattagaggtgccaacagtaacagcccctccaactggcaaaccaactcctgttacacccaaacttgtttcagtagaaaccttattcattacggcattatataaagcctcttttgtaaattctgaagtaagcaccacataaaacatttgcccataagaaacactactcacataaaccaaatcttgttctaattgggttttatcaatatcattaaaaacatcaaactgaggtccttgctgagcggtcatacttgctacataaaaaacctgtctgaaacgtagaattaccgtattttttttactttctgttgatgtggttgttgtacttgtattagatacagaaactttgttagctaaatctacagttactggaattttaggaattggtacatttaatttaaatccaacatctacactacctgctgtacctaaaatagaattcatttgctcgttagactctactaaaattacctcggttactacatctgctggtgtaactccgttgatgtatttacttagaatgttttttgtagcaccagaaacagtaccatagccaaaattagaaataactaccggaggattatctccaatagctgcatcaaaaatattcattgttaaatccatagggtttctattcatgaattttgtataaggtataggcgactgcgttttaatggtattaaattgataaattgccccaggaaaaatggcattgctaaaattcggtgaaggaaagaataaaccaacttcttgctgagaattgcggtaattaataggcaaaaaattacaatctgcatttattaatctttcaggaaaaaccttcttttcttcagctaaatatttggcaaagtttgaaacgtcaactacatccttattagaagattgaatagggatagtaaattgtttttgtggtttaaactgcaaagccttttgctttgaaagtgttttaaagctcgcatattttgtgtttttttttaacacaattggcaaattaggccttacttgcgctaaggcaaaattagaaactgttaatgctataattaatagccaaatttttgttctcataacttttaggtttaattgttttagtattgtaaaactgaggataatacactccactttgtagcccttgataatgggatttttacacttaaaaactacctgaattagggtatttgtaagctgaaattttatttttactttgcctagataaattacactatatgaagagtttatctccctttttgaagtctactttaccaatcattatttcaactctatttgcagttaacctagcatttagtcaaacgctaaatacagatagcttaaaaaatttaattaaaactgctaaagatgataccactagagctattcagatgcgaaaactggcttcttatcaaattttacacgataacaaagcagatgatggattagcacttttaaacaacacagaaattttagccaaaaagattggttttgctagaggaatttgtgaggtattgcttaccagaggtaattatcattttcgcagaagtgagtggggaaaagccattgaatgttttagcgaaataaatgaacatgctgataaaataccagattacactataaaaaatcgttcaaaaatgattgcattaaacaatctagctggcatttatagtaaaaatggcgataaaaccacagcactcaattactatttaaaagctagggttattttagagaaattaaaacctgacgcgacatcgttgtgcactatttacatcaatattgctactcactatagcgctctaaatcaaattaaaaagacaaatgaatacctcaacctatgttatcctttattaaataaggcaaaaccatatttaaaacacctttattggtctgagaaagtaggtttagcagacaatatgaaaaatggcaaaatgtataagtcttatatggactctttaaagaaaaacctaaaaactaacgagctcagtgattttgaaaaagataattaccgaatggcactgtacgaaatggaaggtaaatacaaccaaacgtacttaaagaacatacctaaagccatcagcatttacaaaaacaaattagctttagctcaaaagattgaagatgtagcagaaataagttataccaataacaaattaggtgaaatctattacaacctaaacgattataaccttgctaccgattaccttaaaaaagcaaatgagggtgctaaaaaagatgccatccaagagattgtactttcatcttcaaaattattaagtgagatttattacaaacaaaacaaaagtgatagcgcatatcgctccctatcttcttctttcgccataagagacagtcttaacaccgaaaaaaacttagcccaattgaactttttagagaatggatatcaaaccgaaaagaaagaaaaaacaattgcgcaacttaaactactgaatattgaaaaagaacttgcagccaatcagcggaataaattactgctaattgtaattatctcaagtattgctttgctaattatattggtgttattgtacagatctagtagacaaaaacaaatcattgctgataaggatagcgtcttaaaaggagagcaaattaaatttttagaacgccaacaacaagtagtttccttacaatctatggtaaacggacaagaaacagaacgcaatcgaattgcccaagatttacatgatggtttaggtggtcttttctcgaccattaaaatgcaattaagcacccttaaacacgaagaaaaatatttagaaagtaacgaattgtttcagaaaagctacaaattggtagacatggcttcggttgaagtaagaagaattgcgcacaacatgatgcccgaagtattgataaaaattggtttagtaccagctatacaagagttgtgcaatagcgtaaatgcgggtaaattgttaaatgtttctgtacaagcttacggaatggacgaaagattaaatgcatcaacagaaatgatgttgtttagaataattcaagaattattaaataacattattaaacatgccaatgcaactgttgtaatcattcaatttaatagagaagccgaaaggttaagtgtaaccgtagaagacaacggcagaggctttgatttgaaagaaaacaataccaccgcaggtttgcaatctgttaaaaatcgggtagattatctacaaggcaaattatcgatagattctgaacatgaagtgggtaccacagttttgatggattttctgataaataatcagtaatttaacagcattaaaataaaataatgctcatctctttctaattgtttaaatgattacaatcttaattatagatgaccacccgcttgttggagatggaatatcaactatgttaaacggcgaaagctatttaaaaattttaggaatttgtaaaacggctaaagaggcgttggcttttttaaaaactaaccagccagaaattatcttattagacattaatttgccagatatgaatggcttggccttgtgcgaacgcattcgtgaaaacaataacagcagtaaaattatcggccttacttctaccaacgaggcaggcattatcgtacaatttttatcaaaaggtgccaatggttatttgctaaaaaatatggaacgcgacgaattacttttagccattagggaggtaatgaacgataaaatatttttaagcaaagctgcaaatcagaaactattagagcaatacaacaccgtaaaccaggctttaaaaagtgtaccgattttaacccgtagagaaaaggaaatcctcggtttattatacgaaggctttaacggacctcaaattgctgaaaaattattcattagccactttacggtagaaacacaccgcaagaacttgatgcaaaaaatgaatgccaatactacacagttattgcttaaaaaagcgaagggttttaatttggtttgataggttggtagacctacaaccttatacttcttaatcagtttgcggatattgagcaaaaaaaatgcccccgtttaaagtcgagggctacttaatgttttcacaacggaataatccttattgtgatttgctttcaatttcaaatatagaacttctttttatatccgcattacgggaatccgtaatttttaaaatatttttttgattagctttaaaaatctattgattaacgtatgaaaaaaatattaggacttgatttggggacgacatctataggctttgcgcaagtaaatgaaagcgaagattttcaaagctcaacaattgagagaattggtgtacgtgtaaatccacttactacagatgaacaaaccaatttcgagaaaggtaaaccaataacagttaacgcagataggaccttaaaacgaggagccagacgaaccttagaccgttatcaattaaggcgctcgaacctaatagatgctttagcaaaagctaatgtcataacaaaggatactgttttggcagaagatggcaaaaacactacccattctactttcgccctacgggcaaaatcagcaacagaaaaggtagagaaaaatgaatttgcaagaatattgttagctattaataaaaaacgaggttacaaaagcagcagaaaagccaacaacgaagatgaaggtcaagcaattgatggaatggcaactgcaaaaaggctatatgatgaaaacctaacacctggtcaattagcttatcaattattaaagaatggcaagaaacatctgcctgatttttaccgttctgatttgcaagcagaatttgaaaaagtttgggattttcaaaaacaattttatcctgaaattttaaccgagggatttaaaaaagagctaaatggaaaagggcaaagagttacatcttctcttttttggctaaaacaccaatttaatacagcagaaaataaagaaaaaactagagaagctaaaaaactaaaagcatacgaatggcgagcagatgcaataaacaaacaattagagaaagaagaagttggttatgtaattacagagataaacagcaacttaaataattcgagtggttatcttggtgcaattagcgatagaagcaaggagctgtacttcaataaacaaacagttggcgagtacttatatagtcaaattctaaaaaattcgcatacaagattaaaaaatcaagttttttatcgccaagattatttagatgaatttgaaaaaatttgggaaacacaagcaaagtttcatactgaattaaccgaagagctcaaaaaagaaattcgtgatatcattattttttatcaacgaaaactaaaatcgcaaaagggattagtaagtttttgcgaatttgaaagtagagaaatagaaattgatagaaatagtcaaaaagtaaaaaaaacaattggtttaaaatcagcaccaaaatcttctcccctatttcaagaatttaaaatttggcaagttttaagtaatgtactaattagaaaaaaaggtagtaaaaaacgcattgtaaaccaaacagacagagaagaagagctattccttttagatttagaaacaaaacaaattttatttaacgaactaaatataaaaggaaatttaacatcaaaaaaaattatagaattattaggatatgatgtaaaagactgggaaattaattattctgctttagaaggaaacaggacgaataaagtgttatataattcttatttaaagattttagatttagagggttatgacacaaaagatttattaaaagtaaaatcaaacaaggatgaagtagaactcgatgacattgaaatatcagccatagaaattaaagatatggttaaaagtatttttgaaacattagaaataagaacagaaattttagattttgatgctgaattagatggaaaagcttttgagcaacaactttcttatcaattatggcatttgttactttcttatgagggggataattcggcaagcggtaacgagaaactgtacgaattgttaaatcaaaagtttggtttcaaaaaggagcatagtcaaattttagctaatattgctttacaagatgattatggcagtttaagcgccaaagcaatgcgcaagatttatccacacattaaagagttgcattttgacaaagcttgcgatttagcaggatataaacactcggcttcatcattaacaaaagaagaaattgctaaccgacctttaaaagataaattagatttattgaagaaaaatagtttgcgtaaccctgtggttgagaaaattttgaaccaagttgtaaatgttgtaaatactttaattgaaagcaatagcaaaaaagatgcagatgggaatattatagaatatttcaaatttgatgaagtaagaattgaattggctcgcgatttaaagaaaaatgcaaaggaacgagcagaattgacaacaaatattaacgcatcaaaaattgtacacgaaaaaatatttaaattcctacaaacagaatttggcataaaaaatccaacaagaaatgacattattcgttacaaactgtatgaggagttaaaaaacaacggttacaaagatttatatacaaatacttacatcgcaagagaaattttatttagtaaacaagtagatatagaacacattatacctcaatctaaagtttttgatgatagtttttctaataaaactattgtttttagaaaagataatttagataaaggcaataaaacagcatacgattatattgacagcaaatttggcaaagaaaaacttacagattttgagcaaaggatagagtttctttttgagctaggaaagaaaaacaaagaagaaggaatatcaaaagcaaaatatcaaaaactccttaaaaaagaagctgatattggtgatggttttatagaacgagatttaagagatacgcaatacattgcaaaaaaagcaagaaatatgctctacgaaattttcagagtggttaccccaacaactggaagtataacagatagattacgtgaagattggggcttaattaacattatgcaagaacttaattttgataaatttaagcaattaggtttaacagaaatggtagagaaaaaagatggtagctttaaagagcgtattgtagattggagtaagagaaatgatcatcggcaccatgctatggatgccttaaccattgcatttaccaaacatagtcacattcaatacctcaactttttaaatgctcgaaaaaatgagagccacaaagagcacaatgctattattggtatagaagaaaaagaaactataattgttattgatgatttaggcaataaaaaaagaaggttcaagttaccgctacccaattttagagaagaagccaaaaaacagttagaaaacgtattggtatcgcacaaggcaaaaaacaaagtagttaccaaaaataagaataaaacaaaatcggccaagggcgaaaaaactaagatagagcttacgcccagaggccaattgcacaaagaaacagtatatggtaagtatcaattttatgttggtaaagaagaaaaagtaagcgcaaaatttgatgaacaaactataaaaaaagttgcaaacccacaatataaaaagcttttatttcagcgtttggcagataacggaaatgatgtcaaaaaagcttttacgggcaaaaatgttttatctaaaaatccgatttatttggatgaagccaaaacagaaacacttccagaagctgttaaattaatttggctagaagatgatttttcgataagaaaagacattaacccagaaaattttaaagatattaaagtaattgataaaattttagatgaaggtgtaaaacgaattttaaaagaacgattagcaaaacacaataataatccgaaggaagcattttctgatttgggtaaaaacccaatttggttgaatgaggaaaaaggaatttcaattaaaaaagttaaaataagtggaattaacaatgcagaacctttgcactacaaaaaagaccatctgggcattaagattttagatgaaaatgataaacccattcctgtagattttgtaagtacaggcaataatcatcacgtagcaatttacaaagatgaaaaaggtaatctacaagaaagagtagtttcacttttcgaagctatagaaagagtaaaccaaggcttgccaattattgataaatcctataattcatatttaggatggggatttttatttacaatgaaacaaaatgaatattttgtattccctaatgaaaaaactggttttaatcctaaagaaatagatttactagaccctaagaataataagataattagcccaaatttgtttaggacgcagaagattgctacaaaaaattacatgtttagacatcatcttgaaacgacagtagaagaaaaaaagcaattatttggtgtgacttataaacctatttggactacaaatcctttaaaagacattgtcaaagtccgcattaatcacattggacaagtcgtaaaaataggagaatactagctacagaaattatgaaaaagtataataaaaatactgaagagattaaagaattaaatgactcttcagtatcctatcaaaccaagaacagaatcagattttacaactcttttgaagaagaagccgaagataattataaacatttagcatcgttaaatgctgaacagcacttaataaatgccaaaaacttaattgaaagagtttttagtaattacctaaaagataacaaacgaagcaatagaataaactttagctaaaatggatattttattagaggatcataagcagcttttactttcgcttttagccaacaaagttgattttatacttattggtggttatgcagtaatacattatgggtacgagcgtactacttcagatatggacatttggctaatgcctgataacaataataaggaaagactgataaaagctctcaatgaatttggaataattgaagaggatttgaaaatattaaatactattgatttcagcgaagtatttgtttttagtattggcgaacaaccaaataaaatagactttcttactaaagtacaaggcctaaattatgaaactgctaatgccaaaaaaatattttttcctttaaaggacaaaaaagtaccgattattcaatatcatcatttacttcaaattaaaatgattgccggaagaacccaggataaagcggatgttgaaattcttcaaaaaattaaccagtttagagagaacaaatggtaaacaaataatttatgattaaaagaacgctccacttctccaatccagcttacctcaacctacaaaaagatcaattacaaattgatttgcctcatttaaaagttttgggagaaaaggaatctaaaaaatcagtacctatagaagatattggcattgtgattttagatcatcaacaaattaccattacccacgcctgtatagctgcgctgttagataataatgcagcgattattacctgcaaccatagtcatttgcctactggcatgttgttgccaattgatggccatgatatacaaagcgagcgttttcgctatcaaatagatgcttcgcaacctttaaaaaaacaattgtggcaacaaacggttcaggcaaaaatattaaaccaagcagcggtattgttcgaaagaaatatcccttgcgataacatggtacactgggccaaaaatgtacgctctggcgatccagacaattacgaagccagggcagcagcttattattggaaaaatgttttcccgaaaaaggtcgacttttttagaggtagagatggcgacccacctaataatttactcaattatggttatgccattttaagagcaatcgttgcaagaggtttggtaagttctggtttactccctaccctaggcatccatcatcgcaataaatacaatgcctattgtttggcagatgatatcatggaaccctatagaccttatgtagatcaaatcgttttacgaatcattgataacggagaaaacttcttagaattaggtacttctattaaaactcaattgttaggcattgccactgttgatgtacaatttgaaagaggcaaaagtccgctaatggtaggtttgcaaaacaccacttcttccctagccaaatgttatgaaggtgtaattagaaagatcaattatccttacctaaataactttgatattaaaaaaacaaataatgccagaatgttagacaatgaggtaattagcggtttggagaatgaaggtgaaactgaataattaaatgaatgcgcttaaatgaatatagaattttgtgggttttagtttttttcgatttaccaaccgaaaccaaaaaagaacgcagcgttgctgctaagtttcgtaaagaaattatgcgagatggttttgcgatgttccaattttctatttatttaaggcattgtagcagtagagaaaatgctgatgtacacattaaacgagttaaaaacttattaccagaaaaagggcatatcggtattatgaccgttaccgacaaacaatttgggatgatggaattattttatggcaaaaaagaaacagctttaccagatacaccacaacaattggagcttttttagattcttcgcgtcatttcgaacgcagcaaagcaaggagaaatctttaaacaaaattttaaaccattatttaatttcctttctacctatcttaatcccttcattacaattaaaataaagtattagaatgaaaatccggaagcttttgcaaccggattttttttattctaattttcgaactaactaactgatatacaattttttgaaccatggtctgttgttgtaaatatcagtagttcaaagaatgaaagcaaatcacaacgcccttacgttatggataacacagtattaagttgttgtaaatatcagtagttcaaagaatgaaagcaaatcacaaccatttttcgcaaataaataattcatcacttgttgttgtaaatatcagtagttcaaagaatgaaagcaaatcacaacaagatagtcctggtagattcttccaaggtgttgttgtaaatatcagtagttcaaagaatgaaagcaaatcacaactacctgtttgatatccccctgttgaagtatgttgttgtaaatatcagtagttcaaagaatgaaagcaaatcacaacacggtacaaataacattttcacatcggcatgttgttgtaaatatcagtagttcaaagaatgaaagcaaatcacaacactttactgatagatcggtttacaatggttgttgttgtaaatatcagtagttcaaagaatgaaagcaaatcacaacaggggttaaacctgtattagtttactttgcgttgttgtaaatatcagtagttcaaagaatgaaagcaaatcacaaccatatactttagatgctggagttgcgccttgttgttgtaaatatcagtagttcaaagaatgaaagcaaatcacaacatattatgatagggttaatggcttaggtgagttgttgtaaatatcagtagttcaaagaatgaaagcaaatcacaacttagacgatgaaactgatcatctaattttagttgttgtaaatatcagtagttcaaagaatgaaagcaaatcacaacacattgcggtgctttctaaaattcaaatcggttgttgtaaatatcagtagttcaaagaatgaaagcaaatcacaacaccaatattgcggcccttgtcagaaacaaagttgttgtaaatatcagtagttcaaagaatgaaagcaaatcacaactagtttatgtaagttcattacaacggttatgttgttgtaaatatcagtagttcaaagaatgaaagcaaattttcgcttcgcgaaaatttgctttcattcttttttttgcttttaaggtagttggcattcaaataagaaagtgaataggcttacaccagccactttgatagcgtgaggtaaaatgaaaaccaacaagctaacccaacttacccaatgctttcaatttttcctcaactggactaaaataaacatcatcatcagttctcgctcctctaggctgaggaaatcgattaattttaccatgattttctatttcaaatcttcctacgtcttctccatcaatattaatgtggaaatttattccattttttctgacgattacatgtgccaatttttgattgatcaataagtcgaatataattttttcgccttccatttctggtgagttaatggtaactgggatttgttgatcagggttattgctggtttctacagttgttttaacattaccagtataggcatcatcacttaaggtatcgtaaccttgtgttccagtattgtctaatccgtcttttggagaagtttgcgctgtatgtttatcatttctattcgacatggcttttgctttaatatcaagataacaattgaagaagagatatgtttaggtagaaggtgttgagttggatagatgggaagttgttcgctcctaacgccaaactagtatcttgataccctcaacccctagcaaatgggttaggccaaccatcctgcatccctctcttttggagagggaaactaaccaaatgcattccaccacatactttgatagggtgaggctataaacacttgggttatgcccaccatcctaaaatccctataaacaggtattgcttaaaatagcttttaggagtaaatttatgtgatcaaattatccctcaatcatgaaaactacaacaatctcctttttaaccattttatttattttaactattagtacaaaagtattgtcacaaactaaacaagcaaacattagaatagataaaaatggaaacgaattgcctttaaaatcaaacgatgaagagaaaaaagagcagcttattaaacgctttttggagcatcccctagactctagcaagtttcttgagcgaagttttgcagatttttcaaaattattacaaacagacttttctactggtaaatctatgagttacgctactgtaaatgtaactaagcctactgcagaagtttcttatgccatacgaccacgtggtattggtaagaataaaattttaaaaaacagttttataaatcttgggttacaaggcggctttgggaatgatatcattagtttgatcagtactcaaaaacctgcatcaaacttcagcgctaatgtctcattttcatttattttaaagcaaaagtactggtatttgccaagcgataaatacgatttatactcaaccttcattaacaattacgatactttgtttatgacgaaggaagagggcattcaacaaaaaacacttttagctcaaaagcttaaattatcctataaacttaaaacctttgacgaaaaagtagacactacaaaaaatatgaatgatttaaaaaaattaaaagacagcatctaccttaatatgattgcctataatagtttagtcaatcagttaagtaaatatgaaaagtttgcaacaaagagggaaaaacttttagattcactaaacacaaaattcaactacaattcaagacatatattttggggtaccataagtcagaaagcaggtggcaaccgttttaattattacgacaaggtaaatccgcaaaacactactgctaatgctaaaaaaagtatcagctcctatgagtctacttttacgctaaactattttcacaaaacagaaaatccaagaggatatcaaaactttttgagcaacatgttgctaacaggaggtattacagctggctattttaacaactttgcggaattgagttctacggaatttaaaaaagtagaaaaaaccgatgttaccaatactagttataccaatacagcggttaccacggtttatgatttaagcgattttaaaacttatcatggcactaaagcatttgtagaaggatataaaatgtttacggctacaggtaatttaggtttacgttttaaatacatttgggatatgccgtatggcaaagctgatattgctaccaagcgaaaagctcagcaaaacatcgagacaggtattgtatttaataccgcaaaaaaaggatcaacaagagcagcaagccctataagttttgaagtgttttatagttttaacgatatacatggtagaaatgttagtgccgtaaacgttggacaaaaattttataaaagaaatcaaattggggtaaaaacagctataccatttaatttttaaaatttaccccatgcagataaagcgttatacttttctaattcaaacttcatttcaatatttacccattaaattgctacaataaataaataatcataaattcataaagctaaactaaagaatatcagcatttaacaaattataattattaaatccatctaataactaaccaaaccatgtcaacagcagatcacatcaaagaagaaaaaaatgaactggtactatcctacctcactttaagaaaccttatcggatttggtggtatgttattgccaattgtattggccatattccctaaaagaccttcggaatatgcaggctttgagccttctattagtgattattattttaccgaccgcggagatattttggtagtgatactgtgtatcattggggcttttttaatcagctattatggttatacttttaaagaatggctactaacttttgttgccggaatatgtggtattggagtagcatttgtacctactgagataatttgcaacgattgtcatctttcggtacacaccccacatggaggcgtgtttgatacccttgttggaactggctggcattttgcatttgctgctacctttctattgtgccttgctataatgtcaatcgtattttttaccaaaggtgatgaccgaaaaccatcaacggaaaacaaaggaagaacgagccaaaaatcaaaacgcaatttgatatttaagatttgcggctggactatcattgcatctttggttatacttggcctatattttattttaaagcattatacaggtatagatttaaaaccttttccgatagtttacgtatttgaagcaattgcagtagaagcctttggcttatcgtggttagtaaaagggcaaaccttatggcctgatggagaacattacttaacaactggatacaaaagattaaggaatatatggggcggatagagggttggaatagtgaaaattcttaccctaacccaaaaaacttatttgttttgataattacccaccaattcaattaaaacatcaggtttattggtgataataccatcaacacccatctttgctaaagcaatcatgtcttcttttttatcaactgtccatggtaaaattaacatctttttttcatgtacctttttaaccatttctgcatctacaccactataatatggactgtaaattgctggggtgaaccctaagttggcaagttcttcatcaaggccaccctttttagcattcatttgttttaaataagcctcaacttcttgagcagaaagtccatattttttaagctggtcttcagaaatattcattttaccttgtaccaataatgccaattttacggtaggttctgtttggtgtaaaacctgtagcgttcttacatcaaaagattgaatgattagtcgtggttttatatttttttgattaattacatccatcaagtttttcacaaatacagctggcttaggatggaatttatcatcgcctaagggagaacatttagtttcaatattataatatactggccttaagttattttttttaacataagcttctacactatcaattaaatcggttagcaatggcttatggctttttaacttttgttgttctggaaacatgggatggttttttacacctaaactatatttacgaacactatcatatccgatctgatagatgttatggtttttctcgtcagctttatcaatttcggtgccatttggcttgctcataaacgtagccgacatataattatcatgagatacaaccactttaccatctgccgaaatcactacatcaagttctaatgttttagcccctaactttacagcatttaacattgcgggtatggtgttttctggcaataatgccatgccaccacggtgtgcttgtacatctaacttttgttgtgaaaatgctgagcttgataacagcaagcctattaatattaaattcgctttcatgataaattacttttattgaatgttcaaatgtagcttgtcatcatgctcaattgtgttatgctaatattaaattttagtttttgaaataaatggagtatcgaaatttgttcgtttgtagtgcctcggctttagtcttttctaagtagatttgctaaattgtttaaacaactaatgaacagcgaattttctaatagcaagcaaattataaaagttagctcctttaatgaactgatagatacggtatttgagggagaaagaaatgcaatttgctggcagagaaatcttaatggagattttaaagaagtggttgcacaactactgcttaaagaaaatattacagatataggtattgaagagcttttagccctaactttatctaatgatggtgccgcagcaagatcaattttgttaaacgacattaaattattaacagattccggcgcatctccatcgctcaatttaattaaaaactaccaacgagatgatgaattggatttcatttctactgatgtatattcttatcatgttgatcgatctcctattgcaacagatacttttttatgcacttattttggtgcagcaagtgagattttacccaaccatcaagttgagcaaaagattttaatccctgaaattcggcaaaaacttaaagatttatatgatggtactgaacccacatttgaagactttttggaagcctacttcttcgatctccactaccaacctaaacccgatgctcatcctgtaaatttaggtattggcaacctatggaaactagcggtagaccacccaaagcaacaagctttaccttgtgtgcaccgagctcctatagaaaccaaaggagaatataggctgcttttgatttgttgagcttgggtgaagggtgttgattagttcattggttcattgcagtatgctttagccgatggaaattgaggagttccaaattcattctaacccctaaacttttaaactttgtagcttgtccgttctaaaccctaaccctctaaccactaaacaatctaattaagcttaaattgaattggtttgtgatcttttggtaatttctaaaatcgctttatctagctctgtagcggcagtttgaatatagtctaaaactactttgcgttcttggtgttcatcaacaattttaactacttctaataaacccaatattttagttaaaggcgctcttaaaatgtgcgaattgatccacgaaacctctttcagtttttggttttgctcctctatcgcttggatgtatttttcttgttcagtaacatcttgtgcaataatgagtttggctttgcgacctttaaaagtaaagtgcacactttgaatatttactgtgattaaatcgccattctttttttgatgggttaataaaccttggtgtaaatttttgtgtttggtttgcgttagcgctactttgagctgctcttgttcatcaatagttctaatgtctaaaatggtcattttcatgaactgcttgtacgagtaaccatagtggttaatggcagctttattcacatctaaaaaacgtaatgttttgatatcaaaaacccattttggcaatggactaagttgaaataaatcgctgtaacgtttttcggtagctaaaattaattgtttgtctagcttacgggtggtaatgttcctgaaatataccgataagccattatgagatggatacgcactaatatcgtaccattgggcggtaactgccgagaagctttcaaattgtactggcttttttaatttcatcgcctgctggtactggtggtaagaagaagaaccaacggcttccgaaaaaacttcccacaaattttggtgcagaaggtcttctttattacgctttacttcttcggcagccctgctgttccaaaaggtaattttccattttttatctactgcaaaaaatccatcagctatgctttcgaaaatttcatttttttcgttaatggttttttctgctaataattgtgctttttttcgttgatcaatgtcttgaaaacttccgctaactttctgacagtttccattgatcatttctggctctccaataatgcggatccactttttattcttcttggcagttaaaatttctacttctaaatcgaaggctttacctccactaatgtcattagaaatttgatctaaaacagcttgattttgtttggcgtgtttaaaaaagtaagcagtattggataggtctggattaaaatctttttttacttcataaatttgcttggtcatgttagaccaaaatatcttttggctgtgtggctcgtaagcccaactgccaataccagctaaacttgatgctttgcgtaatacgttttcaagctcttttttttcggttacatc

SEQ ID NO: 2133 - DNA, 24287 bp, synthetic construct
  source 1..24287: mol_type = other DNA
  misc_feature 1..24287: note = Synthetic
acttctactttatggagatgaacacccgtattcaagtagagcatcctgtgacagaggaagtgattgattttgacctcataaaggaacaaattaaggtggctgcaggcattcctattagcggtaaaagctattttccaacattgcatgctatggaatgcaggattaatgccgaagacgtatgtaacaacttcagaccgagcccgggtaaaattacctctttccacagtcctaaaggaccaggtgtacgagtagatacacacgtttatgccggttattcggtgccaccattttacgattcgatgattgctaaattaatatgtaaggccaggacgcgtgaagaatgtatcacaaagatgcaacgtgcgctagatgaatttatcattgagggtattcagaccactgttccattccatcaggcattgatgaaagacgaacattttagaagcggcgatttcaatactggctttatgaatacctttgatatggataaatgcaaggaggagttgtagaactcattatagattggcaaagatgaggcttaactcatctctaatacaaaattaatctaacggaccaaagataaatggagggattttggagattattatcccaaataaaacactataaaaggaattttatactcagtattctgtgtaatattctctactctatatttacaattgtgagtatccctctgctggttccatttttcaatatacttttcgaccgctctaccactgatatcgtccgacctgaaggaaataatatcaatgagtggactaaatacctgatatcaacctatattaatcaatacgggaaggaaacgactttgctgtatgtatgtctgatattaattgttgtttttttctttaaaaatcttttcagatatctgtcattgtacactatcacacccatgcggtatggtattgtttatgaccttagaaaaaagctatttaagaagtatctggatctgccgctcagttattattccaatgaaagaaaaggtgcactcatgtcgtctattactgttgatgtacaggaagtagaatggtctattttgagtgttatagaatccatatttaagtcgccgattatcatattaggagcagttttgtacatggtttacatcagccctcaactcactttgtttgtatttttccttgttatttttgccggtctagtgataggtaaaacagttagtaaactcaaagacatttctgtcaatattcaagaatccatagctactcttgcctctcatgtggaagagtcattaggcggtttgcgcatcatcaagggctttaattcagaagggtatcaagaaggtaaatttgatcaggaaaatgacaatctacgcaaaaaattgattaaagccgtcaatcgaagagatctggcctcaccactctccgaatttcttggagtgagtgtcgtgaccgttttactttggtatggtgccatactagtatttaagcaagaactggaaccagacattttctttgcttttgtttttgcattttatcaggttattgagccagccaagtctttctcatcagcatactttaacatccaaaaaggaatggctgcactagacagggtcgaaaaagtgctttatgtacccaatgatattacttcaaagcctaatgcggaggtcaaaaacagtttcgaccatgctatccaccttgaaaaagtgagttttgcatataaggatagccaggtcaatgctttgtcagaggtgtcactagaaatcaaaaaaggagagattgtggccctagtaggctcatcaggagccggaaaatcaacgctggtagatttattacccagattttatgacgtgactacgggcgcagtttatattgacggaaaggatgtcagagatttagacctaaagagtctcagaagtttatttggaattgtatcgcaagatgctgtgttatttcatgatacggtgagaaataatattacctttggacaaaatgattataccgacgaagctgttgaagcagcagcgatgattgccaatgcacatgactttatcacagccatgcctgaaggatatgctacctccatcggtgatcgaggtatgaagctatcaggtggtcaacgtcagcggcttacgattgctagagcagtacttcgtaatccaccgatatttttactcgatgaggccacttcggcactggattctgaatcagaaaaactagtacaagaagcacttgaaaaggtgatgaaaggtcggacatctgttattgttgcacaccgtctttcaacagtacaaaaggcggataaaattgtggtactcgaaggaggaaaaattgttcaagtcggaacgcatcatgaactagttgaggtcgatggcccttataagagatttgttgaaattcaatcatttgaagcataggatggaaggtagattgcaagacatatatttcgaaaaatttggcaagaaaccggaaatgcacgtgttttctccgggtagggctaacatcataggtgagcatacagactataatgatggatttgttttgccatttgctatagaacaaggtatcacttttttagcaagtacaaaccaatcctttgagattcggttatatgctgctgatgttaatgaatcgtgcatttttgatttgaatgcgctctcagatcgacatgattatggatggacaaaatacatctaccaagctattatggctatgggacaccaccacttacaaggtatggatgtagtatttggaggcaatctgcctattggtgcaggagtttcatcttcttctgccttgatttgcgggtttttaacggtgctgagcagagtctccgatgtgaatatgtcacaagaagcactcgtcgagatggcggtgacagctgagcgtggtcaaggtctgcgcggtggtattatggatcaattcagtatattccatggcatgcaaggcaaggcaattttactggactgtaaagactactcttcagtgatgatagatatgctgcaaggtgattatactttttatctttttaatactaatgtcaagcataacctagttaagagtgattacaatactcgtcgagatgagtgtgatcaagcggtggacattcttaacaaatcatataaaccgatccaaagcttaagagatcttactgttactgatatagaacccatccagtcgctgttgccatctttgctttggtctagagccagttttgtcatagaagaaaacgatagagtccatcaagcagtcaaagccatgcagtcgaatgatgctgttcagctgggagcactgctatatgcttcacatgaaggcttatctaaaaagtatgaagtcagttgctcggagctagactggctagtagaaatgacgcttgactacgatcagattttaggtgcaagaatgatgggcggaggtttcggtggttgtactatcaaccttgttgacggagttttatcaacaactttttgtaaggagatagaccaaaaattcaccgctcaatttgggcatcatcctgatatttttagtgtttatccatcagacggtatctttcagaagctaataaaaatttgacttttagcataattttaatatttcaacagctcattcaggcgttatattcattaaatagaaacattatgtcttcagggtcttttaggataaataccatgcatgtattgtactactatatggtattgctctcagttgtcgtgacaccgattacagtttttgggcaatctgttgatgtaagtcaattgaataagaaagaaaaaaaagcatgggataaagctcgacaactagcacatcatggcaaggtggacaaaagtattgatgcttttgagtcgctccttaaaaagcaacctggacttacagaaggtcatcttcgcctggcatcccagtattttgttaagcacgactatatccgagcagagcagtcatttcaaaaagctatagaaattgatcctgattttgatcctgaaatgtattattcattggcgcagacgcaggcgattctcaaaaaatacagtgaagctgctgctgctcttgatatctatatacgttccgctcctgaaggaaatataaaaataggtaaggccaaaaagcaaaaggataatttactttttacggagtatgctattcaacacccggtacctttcaaccctatgagtgccggctctggagtcaatacttatcaaaatgagtattcgccagttctttcaattgatgggagtagattgatttttaccagaaatgttaaacctaaaggtgcttttatcggtcaggaagatatttatgtagcggaattcaaagatggtgtactgatggacgcggtgccgataaaagatattaatacacctcgaaacgaaggtgcatttgctatttctgctgatggtcgctttattgtgtttacagcttgtgaccgaaaagatgccttcggaagttgtgatttgtactattccatgctgctggatggagagtggactatccccgtcaatatggggcataccgttaattcagctgcttgggattcgcatcctaccttgtcatctgatgggcggatgatgattttttcaagccgtagattggggacctatggtggtgccgatctgtggatgacgtacagagacgaaaaaaacaaatgggtaacgcctatcaatatgggcacagttctcaattcagaaggcgatgacgaaagtccgtttttgcatcctgatggtcagacgctctactttaggtctaatgggcgcccgggaatgggaaaatttgatatctactactctagattagatgttcatactggaaaatggtcagaaccagtcaatctaggatacccgattaatactgaaggagatgagggcgctttgaccttatcgccggatggtaagagagcttggtatgcaggcgatagagatgcacagacaggattacctctacataatctggatatcttttattttgacctctacgaagcagctaggcctatccctactacttatgtaaaaggatatgtgacagatgcagaagatggacaacctttgtcagcccaagtgagcattgttgatttagatacacaaaaggaggtttttttaaccagtacaagccatgatggatactttctagcagcattgcctatgggtaagcaatacagctgtacggtgagtgctcctgaatacgctttttattcgcagcattttgatttgaaggaaacattcaatgagtacataccttacacgcttaatatatcattgattccactgaaaaaacctgcattggaagacacaaaacctgctattatactccataatattttctttgctacaggctctgctgatttacttccggcatctgaaacagaaattggcaatatcgcgcagttgatgaatgagaatactgagatgaagattatgatcattggccatactgacgatgtcggagctgaggatgataaccaaaaactgtcagaagcacgcgctaaagcagtggtggatgcactggtacttaaaggtatcagcctaggcagacttcagtatgaaggacgtggagagcgttcgccagtggcagacaatagcacagaaaaaggccgcagtcaaaaccgaagaactgaaatggtgattctcagcaattaacatccgttatggtttgtattggaatagagagcatgagcacccaaagtagagctttgtagtgacaaatgtttaatcttcggagtattacaacaaagggtactgtagaaaaaccacacgcgttcctagtttgttactgtaaatccggtatataaaaacatcaactagctgatttttgcttacgcttcttttcggccatattcgaggcaatcatactcaatacaagcgccagacctaagatgatgatgagtaatgccagattaccaatcccctggagcaatagcgccagtaagataaaaacaatattgagcagaaataatatcccggttgcttgcatgtgagagcagcctaaatctatcagtatgtgatggatgtgctttctatccggactgaatggagacttgccctccatgacccgaagcgaaaataccctcaaagtatcaaataacggccatataaggatggcgatggccactgatggtgctgatttgatgatataaggagaatccttaattgtattgtgcagctctatgaattgtatagctaagatagagcaaatcagtcctaggaagagcgatcccgtatcacccatgaatattttagcaggtgtgatattgaattttaaaaatgccactaaagcaccaatcagagctgcagctaccatggctatctcaatgcttcccaccaagtaaaaccacgtgccgagcacaaaagctatcaggagtcccagtgagccggacagtccattgataccatcgatgagattgaaggcattgatgatgaccagaatggtaaatatagaaagtaatatactgactatttcgggaagctgatacacaccgaaaataccatataaactagtcagttttacattcgctttgaatactaaaatgccggcagccagtaattcacccatgaattttttggaaggagaaatgggatcaatatcatcttttgcaccgattagaaatatgatgataaatgcactcaggatatattgcaaatcaccgaagtagtcaaatggggtccacatgatgatggaaaaaagcgtacccgcaaatatggcaatacctcccagagatggtgtgctaaccttgtgagatctgcgctcaccgggttcgtcaaataatcccttcttgatagacagatgtatgatagatggaatggctatataagtcagtgcaaacgatgtcagaaaagccagtatgatatcatacatatttgtatctgttgaaattattcacgcaaatatattaaaaaattataatataatgccttttatgtttgcttattgaaaatagatagtcatttttttgattttggattgtagtcatacacttatgacaaagattgaatgactgtgctctaaggcgttaaaaatttttttaaaaagtgaatttcgtgctacaatagcagtagaattgtcgatttactagtaagaatagcaatattatcttatcacattcaaaacgatagaccatgagaaaattgatttacacaatagtattgatcaccagtgttgcgtcttgtacttctataggcaaactggtcgaaagaggtgagtataatcaggcttttaacctggctatcaagaagctcgccggcgataagcataagaaaaccgagcatgtgcgggcactcgaaaaggcttacgcaaaattattgcaaacctcgttgagagaaattgaccgacttaatgcgccttctaagccagaaaactggagtaaggtactgggtttatacgaagagatcacaatgcggcaagataaattagaggctttactaccactggtgagtgaggatggctattctgcagcatttgatatgacggattttagccatcagagcgcccaagccgaagatcaaaccgttattttttactataataatgcactaatgcttctagacagagcagaacaaaaaaacgatcggctctcagcgcgaaaggcttatgaccagttgagagcgatagaaagatataggagtaattataaggacatccgaactcagatggatagggcgattgaattgggaatgacgatggtcaaatttaacatttacaacgatatatggggagtacatgccagtggcattgaaagaggcctatatgatatgccggtgtcaagactaaatagcttctggatcgactatggatttaatcaccctttagagcgggctgattacttgatagaaatagaattggagcatatcaattttagtcctagcttggagcgaaccaatacttatcaggagaccaaagagatattagtccgtactgataaagtcaaggaaatcagagactctgtcgaggtgtgggtagaaaaggaagtgtatgagctagtcagagctagcattactgaaacattcagagaaaagacagctgaattgaacggtaagatacggatcatcgatcatcgcaccggcgaaaccataaggagcataccagtcaatgtattcagagacttcaaaggttatggcgccggttatactggagacaagagggcgctttctgaggagagccgagataaaatggatggctttctggagatgtttccttctgacttctcaatggcctccgacctgacagatgcctttaaggatgtagtaatgaatgaagtaaacagggcgggattgaaataaataagagcaaagcacaaatacttttaacatagcagtgtgagccggaagatgaccaaaagaggtcgatcttccggttttttttatccttaggataactcaacgacaaaaccattgtccttgccggtaaggcaaaaagaatgatagcagctcatattttcaaacatttatcgagggcaaaaccttttcttttttatatctttacgaaaaataatcatctgatgaaaaggtatgcatttttattcttttggatgttttttggccaccttatcattggtcaaataccggtcgatacgacacaacacatcatcccaggtcgaaagaacgatgcagcggcaatggcccgtccgtatgtcattttaatttctgctgatggatttagatacgattatatcgagaagtataatgccattcacctcaagcaccttgcacaaaacgggacctgggctaaaaaaggcatgagaccatcctacccgtcgattacctttcctaatcactatacaatagcaacaggtttatatccggcacatcatggtatagtggacaatgtattttacgatcctggccgtgatgagatgtatatcattggcagagagagcatcaaagatggttcatggtatggtggattgcctctttgggggctagcagaaaagcaaaatgtagtcagtgcgagcctgttttgggtaggatctgagagtgatgccggtggtatgcgccctacatactattattcctatcatgagatgtttgacggtgatgataaagcaagaattatcaaagattggttgcaaatggacgaagaaatacgaccacactttatcaccctttactttcctgaagtggacaagaatggtcataaatatggtcctgaagcgccagaaacgatggctgctattcactatgtggatgagtccatcggcaaacttgtggcagctcttgagcctttgcaactaccgataagttacgtgtttgtatctgatcatggcatgataggtgtagatcctaaagactacattccactgccagagatagacaaagacaagtacaaagttatcaacagcaatacaattacgcacatcactgcagtaaatgaggcggatatcatgccactataccatcaactcaaagcctcaaagcctaaggactacaacgtgtatctggccaaagatatgcctaggcgactccattatagcaccagagaggacaagacgcgccgtataggcgatatcatcctggtgccgaagggttctaaaatcatggtagatcctatacgcaaaccttctatcggaaaacatggctttgactggtgtgcagtacctgagatgaaggcaactttcatagcgtggggcgatgcatttaaaagtggaaaaaccatcaaatcttttgaaaatatccatatctatcctatgatcgccgagttgctggggctttcggtgttagagcccatcgatggcgatgctaaagtcctccataaaatcttcaaaaaaagtagtaatattgtgatgcaaatgatagtaagcaaaacgccacaaatgaggcaagcaagataacataaatgtagctatgagcaggagagaaattgaagcagtgaaagatgatggcgaatatgcaccactaaatgtagtgtaaaaatcgaaagcgggatcaataaaaaaagcgagttgccccgctttgaatgtcttcacaacggaataatccttattgtgaattgcttttgttcgatggcaaaattaagaataaaaaataaaaactaaaaatattatgacaaagaaaattttaggactggatttaggaacaacctcaattgggtgggcttacgtaatagaaagtgacaatccagatgaatcagaaattaagcaaatcggagtccgagttaatcctttaaccacagacgaacagactaattttgaaaaaggcaaacctttttcaattaataaagaaagaacccttaaaagaggagcgagaagaaatcttgaccgttataaggatagaagaaataatctgatagaagtattgaagaaagcaaacatcttatcccaagattctatccttacagaagaaggtcaacataccacgcatcaaacttggcaattgagagcgaaggcagcagttgataaaattgaaaaggaagaactggcacgtgtattattagcgatcaataaaaaacgtggttataaaagttcccgaaaagcaaaaaatgaagatgaaggacaggcaattgatggaatggcagttgctaagcgcttgtatgatgaacaaataacctgcggacaattggtttatcaacttttgagagagggcaaaaaatcaattcctgatttttatcggtcggatttacaagctgaatttgacaaggtatggaatttccaaaagcaattctaccccaaaatccttaccgatgaattttataaagaattaaaaggaaaaggacagcgtgccacttcagctctgttttacaaaacctataactttaatacagctgaaaataaaggatcaagagaagaaaaaaagatacaagcgtataaatggagaagtgaagcaatttctcaacaattggaaaaagaagaagttgcatttgttctgacagagataaacaacaaccttaacaattcgagtggttatctcggggcaatttcagaccgaagcaaagaattgtatttcaacaaacagacggtcggtcagtatttatatcagcaacttcaagaaaaccgacatgcgcgattgaaaaaccaagtattttaccgtcaggattatttggatgaatttgaagctatatggaaggagcaagccaaacatcacacggagttaacagaagaactcaaagccgaaattcgggatatcattattttttatcaaagaaaactgaaatcacaaaaaggcctaatcagcttttgcgagtttgagagtagagaaatccaaatagatggtaaaaagaagacgattggattacgagtagcaccaaaatcttcgcctttatttcaggagtttaagatttggcaaaacctgaacaatgttttagtgcgcaaaaaaggaagtagaaaacgtaatgtaaaacaggaaattcagggtagtctttttgaagaagaaaaagaaatttttgttttcgatttagaaaccaaagagaaattatttgaagaattgaacctaaaaggcaatctttctgccaataaagtcattgaactattaggacataaacccacagaatgggaaatcaattattccgctttagaaggtaatcgaaccaatcaggctttgtacaatgcctacctgaaaattttggatatagagggttacgatgaagacttgttgaagttgtcagataaagacgatattaatgtggcagatttaaaaacgcctgcatctgagatcaaaaatatggtcagggatatttttcaggtattggggattagtacagatattctagaatttgatgcagagttggacggaaaagattttgaacaacaagcctcttatcaattatggcatctactgtactcgtatgaaggcgatgattcgcaaagtggaaacgaaaaattatatgaactgttagaaaagaaatttggctttaaaaaagagcatagtcaggttttggctaatgttactttatctgatgattacgggaatctttcttccaaagcgatgcgaaagatttatccatttatcaaggaaaacaattacagtacagcttgtgagttggctggctatcgtcattctaaacattctttgaccaaggaagaaatagaaaacagaccgttagatgacaaattagaattactgaaaaagaacagtttacgtcaacctgtggtggagaaaatcctcaatcaaatggttaatgtagttaattcgttgcttgaaaaaaatcggaaagaaaatcctgatttccgatttgacgaaatccgtatcgaattggctcgagaattaaagaaaaatgccaaagaacgagcagaaatgaccacaaatatcaattcggcaaaaactgagaatgaaaaaattttcaaactattgcaagctgaatttggcttaaaaaatccgactcgcaacgatatcatccgctatcgtttgtacgaagaattaaagaataacggatacaaagatttatatacgaacaagtatatcccgagggaaatcctgttcagtaaacaagtggatattgaacatattattccacaatcgaggctctttgacgacagtttttctaacaaaaccatagtgtatcgagaaaccaatctggataagggtaaccaaacagcattcgattatatagatagtaaatacggaaatgaaaaagtggaagaatatatactgagaatagaggcattgcatgatgcttggaagaaaaacaaagaagaaggcatttccaaagccaaatatcaaaagttgcttaagaaggaaacggaaatcggagatggatttatagaacgggatttgagagaaagccaatacattgccaaaaaagcaaaagaaatgctgtttaaaattactcgttctgtggtctcaacttcagggagtattacggacaagctgcgtgaagattggggcttgattaatataatgaaagagctgaatctccctaaatacagaagtttggggttgaccgaaatgcaggaacgtaaattcggtcaaaaagtggaagtcattaatgactggacaaagcgaaatgaccatcgtcatcacgctatggacgctttgactgttgcctttaccaaacataatcatatccagtatttgaattacctgaatgctcgaaaaaacgaaaatcacaaattacacaataatataattgcgattgaaaatttggaaaccgaaacaatgattgacaataatggaagcaaaagacgtgttttcaaagcacctatgcctaatttccgtcaggtagccaaagaacatttggaaaatgtattgatttcgcataaggcaaaaaataaggttgttaccaaaaacaagaataaaattgcagggaaagtagcagcacaggaaactttaactccgagagggcagctgcacaaagaaaccgtttacggaaagtatcaatactatgtaaacaaagaagaaaaaataggaacaaaattcgatgaagagacgataaacaaagtttctaatccccagtatagaaaattacttttagagagattatcagccaatggcaatgatcctaagaaagctttttcaggcaaaaatgcgttgagtaaaaaccctatttatttaaacgaaactaaaacggagaccgtacctgaagtggttaaactcacatggttagaggaagattattctatccgaaaagatattactcctgacaatttcaaagatgaaaaatcaatcgataaaattctggatgaaggcgtaaaaagaattttgaaaaagcgattacgcaaaaatgataatgatccgaaaaaagccttttctgatttagacaaaaacccgatttggctgaatgaagaaaaaggaatttccattaagcgcgtaaccataagcggagtgaataatgctgagcctttgcattacaaaaaagaccattttggcaatgatattttagatgaaaaaggagataaaatacctgttgattttgtaagtactggcaataaccatcacgtagcagtgtacagagatgaaaaaggaaatttacaagaaaatatcgtttcattttttgaagcagtgatccgcgtaaaccaaggattacccatcattgataaagcctataatcagcatttaggttggcagtttttatttaccatgaaacaaaatgaaatgtttgttttcccaaatgaaaaatcagggttcaatcctcaggaaattgatttacttgacccaagcaataagaaaaagataagcccgaatttgtttagggtgcagaagatgtcaaaagttatttatggtaattctccggtaagagagtatgtctttcgacatcatttagaaacaaatgttgatgaaaagaaagagctaaaagatataacttttaaaaatatcaaaagtcttggttattttgaagatattgtcaaagtccgtatcaatcatttgggagacattgtaagtgtcggagaatattaaaagcgtaaattatttatcatgcatataaaaacgataataatggatttgatatattcatgacgataggctgtaatttgaaacctagtattatattctctattatgcaaatggtggcgacaatttgtttttgcaggaatagacttatccattctttcttgacaaataacgtagtcctattgacgctaatgctctaaagattgccaagtgtctgatgcctaaccattttcatctgctagtaaccataaaaagcgaagcggatatcgtcgagtactttttaaaccaagcggatccgcctgcgtcgttttatcatttaacttttctaaagttccgaactttagaaaagttgatgatccggaagccttaaaatcgaagttcctttcgaagcagttttctaatttcttcagctcctactctcaagcttttaataagatatatcaacgtcgaggttctttatttctaaaaaacttcaagcgaaaagagatagaaaacgatttctaccttaaaacgatcatcctctacattcatctcaacccgataaaacacgggtttacacggcaaattgacgattgaccgtggtattcctattataaatttgaaaagacagaagcagaacttatagatttattatttgtcgataccaatggttatcatgttagtcatcgcgaaaaattagcctattttacagaatacgaccaactagaaaaaagaccttggatgatgggcgtttttttaccgtattcaactttcaaccataaaatttacttgtttcaaacttaaatatctataaaagactatagtctaaagtcattatttggcaaagtatttggtgttaccataataaatacttaactggtgattaaacgtacattatattttggcaatccggcttacttatcggtcaaaaatagacaattggccattaagcggcctgatcatgagatggatcatacgattccgatcgaagatatcggggtggtggtggctgatcaccaacagataaccatgacccatgcggtggtcacatctctacaagagaataatgctgtcattatttggtgcggaagtaatcacatgccgatatcgatgagcctaccggtgacagcccatactacacaatcagaaaacgtacgctatcaactggaagctagtgagccactcaaaaaacaactatggaagcagaccgtaactgctaaaatcagtaatcaagcggcaatactcaaaaagatggggctcacctcacctcacattgagaagatgatacctcggattggcagtggcgatcctgataattacgaagggcaagctgcggctatttattggaaggcactgcttgatcgttatgatgtgagtcgaggtcgctacgaaggtggccctaatgcgctttttaattatggatatgcaatattgagagctgtaattgcgcgcaatctggtaggaagtggtctgctcaccgtcacaggcattcaccatactaataaatataatgcttactgcctggcagacgatatcatggaaccttataggccggtggtggatcagtatatcatgaattatttagaacagctttctgattttgacggcgagctaactaaggaagacaaagcctatcttttgcagatcccggtattagacatcagtattcagggtaagaccagtccgctcatggtcggagcgcagcggacgacagcgagccttgcggcctgttatcaaggcaaagcacgtaaaatcctatatccggatgtaagatgattactagactaaataaatatcagattatgtgggtaattgtacattttgacctgccaaccgaaacaaaaaaggagcggaaggcatatgctaaattcagaaaatttttgctagaagacggatttaatatgatgcagttcagtatatatgtgcggcattgcagtagtcgcgaaaatgctgctgtgcataaaagacgcgtcaagctacaactacctactaagggacacgtcattatatttgatatcacggatgcacagtttggcaagatggaaactttccatggtatcaagaaggaaacagtgcgtaaaaatttgccaaaacaacttgaattgttttaacccaacctctctttagactttgttatctatataaatgatataaaatagctatgaggtccggcttttttatgcttcagacctagtttaactatggtaagtacagaaatacgcgtaccaaaataaatatgaagtagcgtttcagtacagtaaattcctaatgcgtcatttgggataaatcgggcgatatagaaacaaaaaaaagatcgatacaagaccgatctttttaatttgcaacaacaaattgtgttttctattgatacttgcatcatattgatagccaatggattaaatcagggtatgctgttgcaaatatcataatttcaaggaacaaaagcaattcacaacgacgcacttattatcaatctagtattcagactgccaccgaaacactcaaaaatttccaaaaatttattaaaatctttttatctttagcatttattaaaaaccttagaatgggctattttatattatatctggcataattcaaggattaattttccaaaagtacttttttatgaacctctatgtactttagttgtttgtaactattaataaatcaaaatatctaatcatgtcggtaactaaaaaaatcgttaaaacttatcctctttttattttgttgatggctactgcattgctgttgttgccgtcatgtgccaattctgataataatgctcagaaaacttcaaataatagtgaagagagtgctgtgcaaaatcttcctgctacgccatctcaagcatcgggagtgttccattacacatgtccaaacggacaccaacacggtgcggatgatgcgggtggttcttgtccagagtgtggtgctgcatttgtgcacaacgatgcataccatgctaatatgaatatcaatgcgcccatgcaacaaccagatatcagcgctccaaatattcaaatgggaggagctaaaaatggagtttttcactacatctgtcctaatggccatgaaggaggtggtgataatgccggaagtacatgcgcagtttgtggagcaagtctagtacataaccaggcttaccacaattaaattattcccttgaggagttaatcggctctttaatcattttgagtcaagtgcagtcctctctttactttataagtcatgagtaagcttatgacggttttggctattatatacgaaaggaaaaggtaattgtatgagattattttatatctctttacgtcagctatacgattttgcttggttaccttgtagcgacatctaaaattccggattttataagatgtgttatttagtatagccccaaagtacattgcttaataagctattggtgtcaagattatactaatgggttatgcagccaacttggatacagtatgaaggatttaagtactactgacttgagcgtaggcgagcctatagggattgtttcttattatccaggcgtgatgtcgccatttgaacatatcctgctatctgaagacatctttacggtcgctgattatatctagctagctgaaaatatataatttttcaccctaagtatgttttaaaatcagggttattcactaggatttcgtaccattcaactcaaatatttatcatacctttgccgttgttatttataatggattcggtaatatcttccttgtaaatatttgtacagacctgagaagtattgatatatgaagtcactgattcagcgtactattgttgtagtactggttctttttaatctttcggtccaggcacaggatactattccgcctatcctgatagcgtctgcacgtgacacggcttttgagtgtggtaaaacatcacaattgactgaaaagctcacagactggtttaataatgctggaggtgctatttttcaggataattccggttcatatacgattcagacgaatatcactctagcccaagccattgatatttttaatcaatctaaagactcactttgcggaaatacacagcaggttcaggtcatttttacggctgtagatgctgacaataatataagcctgccggacacggctgttttttatactaaggatataacgccacctacagtacgatccgtacctaatgttgcttatacatgtcaggaaggaattagggatacactcattcagtggataaaaaataaagcaggatatgaagctaccgatgattgttctgactcagtgcaatggactatatttacctatggaatatttgttggcaatacacaggtgatggccggcaatggcaatattaataccgggccttatcctgaaattcctgacggtctatgtaactggacactcaggatcaatttttttgtcaaggaccaatgcggaaatcagctgatcacgcccggcactactcagtttagtgtgctcgataatgtagcaccggtatttatcgggtttccggatgatgtaactgtttcatgtgataagataccgcctgcaacaccacccactgtactggactattgtaccagaaatatcctccctcaactagaggaaacttccactcagaatgccgatcctcaatcatgtggtcattacgtttacaccattacaagaaagtggacagctactgacaattgtggcaattcagcggaagcggttcaggtgattgaggtaagagacaaggaagctcctgctatcgctggtatgcctgtagattctgtacaatgccatgtatttgatagccatcctgatagtttgtttgtacaatttgtagatgcatgctctcctgtagtgaccactttttctgaccgacaactttccagtggttgtgatgaagtgatagagcgtacttatgtctcaaaagacgtttgtgcaaatgagaccacttacgtacaggtactcaaaatcctgcatgatacagcgcctatcatcactcagccagccaagaacagcgcttttgcctgtacggatcagcctgacctagatgccgaattgtttttgtgggtgaatgatatgggaggttcacgagcagaaggtatgtgtgatacgctacgatcttttgcagcgttgaaaggatcttatgatatcaatgacccaacaactttcccggggacatttccgacccacgttcctgcaggaatttgcccatctacactgaagggatggctccgatatgtagaagtagattttgtgtattatgatgattgtggaaattttgcagtaacttcagcagtatttggaatagaagataatcaacttccagtagtgagccagtgtcctcaagacatcactaaagaggtagcgacaggttgtagtgcctttgtgcgcattccggttcccaccgctatggataattgcttagaaccatcatcaacagtagtaaggaaaattgtaactacagtcacttcccaaagcccaccagggccagaatctattattgatccggtgaaggtacgggttggcccattcagcccattcaccgcagcacccttgacagatggagagctgcaagtcaaactggtcaatatggatattgatgatgcgactgaatattttaatatctatgatgaagatagcactttcgttggtaggtcaccgcttgggcctgagcagtgttcatctgtatcatttactattccactcaataaggataggctgaccagctggattcaggatgggtttatcgatctctattttatacccaatgtcgtatccactgaaccggtattggccatcaataatatttgtggatctagcacggtgcaaacaacgatcacttacgaaacggatctgagcaatgcattaagggtattttatcagctcaatggtaaagaagaagtggcgatcagtactgtggatacacttgatctggaattgccggtaggagaaagcgaagtacgtttcattttcagagattgtggaggcaatatgtcttcatgcaccacgcgagtgactattaaagataagattgcaccagtcatcaactgtcccggtgatatttcatcagttttagctgacggcgtgtgtaaggataccatcagactgccactggactttgtcgttgatgaaaattgtactggcaacagattgtaccagcagacagctccatcatcggcggaagcagcacaaatttcttttaaatttaatgatcaagaaggcagatatgaagcaaggagcaaacaacttgtttttcctaatgtttttcctattcggtttatgtctcagcctgtgttacttgaggttgagttttttggcgataataatgatctgggggaatcttttgaaattttaggccccggtggttattctataggtcataccgatttatttgctggtgaagggtgcacaggtagtagtatcacaaagtttgaattgcctaaagccttatttaattcatggatctctgctaatcaattaaccttactcgcagttcctgttaatggtggtgatggaatcaatccatgtaaagagttgactgctggaatgacagtggacaatcaatcattgatcagagccaggcttgtttactctgatgcacgtttttcctatgctgtgactggcgcgacagagcaaacgcagactgttttgccggatgatgccacaacgcatgactttattttgaatggaggaaaatcattagtaacaatttacactgcggataatgccggcaatcctgcttcttgtaagtttgaggtcaatgtgatagatcagcagcttcctgaagtattgtgtaaaaatgcgaccattactattccaccatccggactggaaacaaccactttattgccagaatgggtggacaatggaagttcggacaattgtggatcagttacccttagagtagagccttttgtttttgattgctcgatgctcaattctgatgtaactgttcagttgatagctactgatcaacaaggcaatgagaatacatgtactaccacggtacgagtaaaacccatcgagttgcaaccatcattttcggctggtttgtgttccaatgatacactgaaactttttgctaatgtgccaccttccagcgtacctggtacctacacttttagatggcaaggccccggaggaattgaattttttacagaaaatcctaaaatccctaatgttgatgaaagttttaatggaacctatatccttacaataactgggtttaatggatgttcagctgtcgggtctgttatcgtcaatattaagccgctcactaatcctgagctcactgctaatggatcagaaatttgtgcaggtaatgaggtaattctatctaccaccaattacagtggcgacgttacttatgactggtacgaaggtatttttccgcaaggcgtattgctgaataccactaccattccggaattgatattaagcccgcctacatctgggccacacttttattatgtgatagctcgtgggcctgattgtagttctaatccgtcttccctattgaaagttacagttaaggaagtaccggtagcagctgttcgtgacttatttttatcaccatgcgaaggtggagatatagagcttgcaagtagtactttcaatgctcaatacgagtatgtgtggacaggaccgagaggttttatggctatgggtgcgcacccaccagtcatagagcgcatcactccatctcatgctggcgaatatctattggttgtcaaaaacggaagttgtgtgtcagatactgcggtaacaagggttacgatttttgaatcgccagcgacacctatcattaccggccttggcatattctgtgaaggagatgtctttaccctagtagccacagcctctcccggttcagaaaaatacgaatggtataaagatggccaattatttactgtaacccaggataacagtctgattattcctaacgctcagacgtcgctgcaaggagactggactgtcatttcggtcaaaggcaactgtaaatccaaagtatcggaaaagaaagtggtcgccatagatgcaagccttcagattggggtcattaattccggccctgtgtgtatgggcgatagtgtacagttgcaagctacttttgtacccaatgcgacttatgaatggtcagggccagtatccaatattccttcgatttataaccctatagtcagtggagtggcaggcgattatgcggtgacgatcactactcctacaagctgtaaaagctcggctagtacaactgtgtctatcattcaggtgccggagattaccgcattgagtagtaccgctttgccttgcatgaaaaagacagatactttgacatttaagccttctgtatttcctaatgctctggattacgtctatcaatggacgggaccaaatgggtttacttctggggataaaagcccggtattgaccaatttgagtttgcaagatactggtgtttacactttagtgattttgaatcggaattgcccttcagaggctgtagatgtgcgggtcaattttaatattatcactgaccagccggtgatcacagctgcacctttttactgtgaaggagacaccatacagatcagtagcaattcttcaattcctggcgcaagctatgagtggacgacgcctatgggtaccgtttttaccacaacagacacgcttttcattgcagcagcgagagcagctaatgcaggtgattatagccttaaaatcatatccggcaactgtgcttcagatccatcgatacctgtaaagatatcggtaagaaaacgtcctgaagcacctataataacacctatcttaccgatttgctatgattcggatcttacaattcaatgtacttcgcttcctgatgctgtatatcaatggacaggacctatggatacattgactactacacctgcatggatgattttacatgcccaaactcaaatgagtggcttatatgcagtggctgcagtagtagatggctgttcgtcagcactatcggcaccggtagaagtgattgtaaaggataaaatcgctactcctatttttacatctgatgtgatcaacagctgtagcgctggatcgggtactgtagaaatatgccttgaaagtagtacacttacacccggagccgtttatgaatatacactattgcctgatcatgaagtggcgggtgtatcttcaggcgtttgtcatacattcaataatcagggcatctttaatgcaggagccaactttatcacagtgagagctgaagtatatggctgtttttcagattatgctacctcgtcaatactgaatatcaacacacctcctgaaataaaagcccaagcagttgaaaaaaacattatcacttgcccggatgaaactgtgaggttgatatcaaaacatgggccaccactggttgatgtgcactggacagcactgcgaccggagaatagaatcagcgatcctaaagtggtatcaccggtgatatccggcttaataccgggactcaacacgatttatctcgattattcagtgcctggctgtcctaattttagcagtgataccatatttatttattcggaatttaaaccactgcctcaacctgatgaatataccttgctctttggacaaagtgccactttggatatcacagaaaacgatgtgctccctgataattattcactgactattgctgctctgcctgcgagtggtactgtcaaaatcatagataagaaggtagaatttatacccgatattaaatcgctttcagatttgacttttaagtacaaggtttgtgcggatttctgcgaccagctttgtactgaggaaacagttgtcattcatattgatgataatattgattgttttgcacctacaatcttcacgccaaaccaggatggtattaatgatatcttcatcataccgtgtctggaaaccggcaggtatccggatagtaaagtgtcgatattcaacgaatggggcaatgaagttttttatgctaatccatataaaaatgactgggacggtacttataacggcaatctgctgcctgtagg

SEQ ID NO: 2134 - DNA, 24287 bp, synthetic construct
  misc_feature 1..24287: note = Synthetic
  source 1..24287: mol_type = other DNA
aattcctaaatctacaaaacacccgaaagcggtaatattgttgacaattcctggaagaatcattccggtttttaagtcggtaatcttttttacatttggatcaaattcaaaaacttttgctgcttttctaggatctaatcccggcttttccagttctttcaaaatatcttttattcctaaaatcccgatgtcttccgttatatatttttcaggttgaattaaattgattttctctttattggcaactaattcattggttttaatgcctaaatctttcgccattttttcgataatcccatacgcctcaggatgaactgccgaattgtctaaaggattttctccattggtaatcctgatgaaagctgcagcttgttgaaatgctttttcgcccagtctcggaacttttttcaattgttttctgttttcaaaagctccgttttcagcacggtaattcacaatattttccgccatcttttctccgattccggaaacgtagcttaagagtgatttgcttgcggtattcaaattaattccgatagaatttacacatttcattaccgtagaatccaattcgtttttcaattgagtctggtctacatcgtgctgatattgaccgacaccaattgatttagcatcaattttcaccaattcagccaacggatcagaaagtcttcgtccgattgaaaccgcgccacgaacggttacatcaaaactaggaaactcatctcttgcgattttacttgcagaatacaccgaagctcctgcttccgaaacaacaaagacctgcaatggtttatcaaaaccgatttttttaatgaaaaattcagtttcacggcttgcagttccgtttccgatagaaattgcctgaatattataagcatttaccatcgaacgtatttttttcatcgccattccgctttcgttttgtggagcatgcggataaatggtttcgttgtgcagtagatctcctttttcatccaaacaaaccactttacaaccacttttgaaaccaggatcgatcgctaaaattctcttttcacctaaaggcggagctaataaaagctgacttaaattttcagaaaatatttcgatggcttttttatcggctttttcttttgcttcctgaagagtttcgttggaaattgctggttctaaaagtcttttataagaatctttgatggctaaagcgatttgctctgaactttcatttttagatttaataatcgcattttcaataaaatcaacagcttcttctttgtcgatttcgatattgatttttacgaagccttcggcttcagctctaagcattgccaaaagtctgtgagaaggagttcggttgaggctttctccccattcaaaatattgtgaaaatttttgtgctgcttcatcatcttttttagctttaacaactttcgaagtaacaatggtttttctttgaaaaagacggcgaagattttttcggacgtacatattttcattgatccattctgccatgatatctcttgcaccttgcagagcttcttcctcagaagaaacctgatcattcagatattttgaagccaaaaactgaatatcctgagctttttggctcataataattttagctaaaggctcaagccctttttctttggcagtatcggctttggtttttctgcgttttttgaaaggtaaatacaaatcttccaactcctgaatatcaaaactttcttcaattctttgttttaattcaggatttaaagcatcttgttcttctatagattttaaaatactttccttacgttttactaggtcttcaaactgtttgttgagttttgagatttgctcaatttgtgtttcatctaaatttcctgtagcatcttttcgataacgagaaatgaaaggaattgtacagtcttcagataatagttttaaagtagcattaatgcttttatcggatatgttaagtgttttatgtataaattctgttacaatcatgaggcttttttagaatggctaaaatactgacttttttagaggaataaaatatctgtgaatggcaatttatactttgcagaattaataggcaaacatatttaaaaaaccgtgtaatgaacaaaatatattaatttattaaaaaagataaataatctacatttttagtagattatacgattgttttagataattatgttgtggtatgaataaaaatactatatttgtgcaacatcacaaaataatatgcctatgaggaaattttctacttcttctattccttttgtatttacaaactcagatgtttctctaatccaaaaaaacatcttaattactaatccatattctatattatgaacagatttttaacaattctggggattttgctgtgctttcagctcaaagtctccgcacaatgtacggctatgcccgtccctttcttacaatctttcagcgcgggagtattacctccctgctggacaagtcagaaccctacaagtacatcaacaagtttatatgttaaatggagatttaacacatctgctggttatggggtaaccggaaacggaggaaaacctgcaggaacttttgcctgggttgatgcaacttcaccatatgataacgtgcatacggtcgaacttatcagtccacagattaatctgaccggattgaccaatccttatgtaaaatttgaatggttaaaaaaccatcttacctcagcaacaggaacggttcctccttacgaaaataatagcatgaagcttgaggtaaataacggaagcggatgggttgaaatttagtctgataatagtaatgccgcagaatggagaacggtaggagttcctcttgccgcaagctatgtaggagcgaccattcagcttaagtttactgttgacaaagatgttgctaacaacggaaatttttatgacgatatacttcttgatgaggttcaagtaatacaggcaccgacttgttttgaacctgttattgcacccgcaacaaatattactcccaactctgcaactctgaattgggcagcaccattagctccgtctccgacacctgcaggtggatatgaatattattacagtacttcaaatactcctccaactgctgcaacagtaggaagcattgttcccggaatttctgctaatatcactcctttggttgggggaacaacctattattggtgggttcgttcggtatgttctgcttcagataaatcattatgggtagcaggagaaccttttactcctggacagattggtggcggaacagcaacacatgcatttttaccggtgtattcttgctcaggatataattattctcaacaaatctatacggcaacagaaattgcaacagcggttggaacaaataatatgattacagctataaagttttttgtatctactactgcagcaaatcaggcaaattacaatcaatgggtggtttatatggggaatacagctcaaaatgattttgctacaacgacaagctggattcctgctggaacaatgactcaggtttataccggaacattaccatcaatgactgcaggaacatggattgaaattcctcttgcgacaccattcctttgggatggaacgagtaatgttgtgattgcagtagacgaaaatgctacaagcacatcttgtacagctaactggggaagctactctgcaggacccaacagaggaatgctttattataatacgaccactaatccggatccattgaatcctccaacagcaacaagcagatatgcagttttgccaaggcttcaacttatcggtacagttttaccttcgtgtacgaatgtgccaccatctaatattatagtcaataatatcatggccacttctgcttcggtatcatggactgcaactcagaatgcaacctatgtcgtaagatacagagttttaccatccggagcatggcaaacgattaatattactacaccatttacaaataatgttctgctttcgggtcttattgagcaaactcagtatgaagtagaggttgctacaatctgtggaactcagggaactttctctgcatcaattccttttaccactccagctcttatttactgtggttcaggaactgctacagtgaccaatggttttattaataacattacaatgataggaaccaatgttccaacggtaactaataattccggatcaagtacttatacagattattctactgatccatccaagacaattactttattaaggaattctgttaacaatacactgtcagtaggaagaactattgcttcgagtacttatactacttatgcatggattgattttaatggtgatggacttttcaataataatcccgtaggaactgcaggaggggaacgaattatgaatctcgggtattctaatacaacacctgtaactgcaaattttgatgtaccagccaatgcttatgttggcaacagtaaaatcaaaatgcgtgttatcgtctattcaggcactccaacagatccttgtatgaaccttacgggtaacggagaagttgaagattatcagattaaatttattgatcttcaaccatgtactacagcacctccaacaagtatttctgtaggaaatcttactcataattcagcatatgtatcttggatgccaacagcaaatgcgacttatgttatcaggtggaggcaaggtactacgggagcatggttgccaagtgcagctggattgactcttcctgcaggtcaaagctttcatactattactggtcttattgagcaaactgcttatcaggtacaaatagctacagtatgcggtggaaatcagggaactttctcgtcattgatagactttacgactccaccggttacttattgtaatatgaatggaagcgggacgaatgattacatttcaaatgtaaaagtaacgcctataaatttcccggttatggagaatatttcacttcaaaccaattatattagttatacaacgcctgcaacattaattaacctggaagtaggttcggtgggtaatcaaatttcagtatcaaaagcttgggtaggaactacctatggagactcggtacatgcttggattgactgggatagagatggaatatttacggatagtgaaaaaataatgactactccttccaatactacaactcctcttacaattacatttaatgttccggcaacaggagtttatacaggaaataatacaacgacaatgagagttgtattgaagcgaggaagtgcaccattgatgtgtcaggatgcagttaacggagaagtggaagactacgcagtaagattaaaaccctgtaacaatgctactccaggagcaccaacttttactacaattactcataattcggttattgtcaactggactcctgcagcaaataataatgcatttgttttagaatacagaccggtaaccaatccagcttctgcatggacaacgatgaacctttcggttttaggagggaatccaccagtgagtattacaggattaacaccggcaacaatgtatgaagttagggttgccgcagtatgtggtagtggaggagcaggtgcttttactcccgcagaaacatttacaacaagatgcgatcctacaccaccgaacgctgtgatatctaatattacatcaaattcagcaatggtaacatggaatccgattgtaccaaatgctacttatgttttaagatggagagaggttgggactacagtatggaatatgccaacattgcctcctccaccaataaatacttatgtaataccgaatcttgaatcttataaaacttatgaagtgcaagtagcaagtatttgtaatggggaaacaaatcctaatccatggtcgattacacagatatttaccactgtaagagtgtgtgaagtacctcctccaggatttacgattactcaattaactcctacaactgcagaagtggtttgggatgcttatacgggtaccggagctaccaataattacacattaaaatacagaaaagtaggaataccaagctggacgactattaatgtgagtaataatacctatacaataacaggattattagaactaactaaatacgaaatgcagattgcaaatgtttgtagtggaggagcagggaattatacacctccttactattttacaacacctacagtgatttattgccaaatatgcattcaactaactttgcttctgaatatatttcaaaagttactgctacaccgaatggtaagcctgaaatgattaatgtttcaacaggagctgcttattctgattttacaggagattcaactaaatttattgaattgattcagggatcaacaggaaatcaaattactattgataaaactcagggagcagattccggagttgcggtttggattgacttcgacagaaacggaacttttgatcttaatgagagaattcttgcagacggacctaattcaaattctactgcaaatgcaatatttactgtaccatctgatgcttttatcagtatgaccagttctaaatatgttgtgatgagagtagcgatggctaaaggagcaattcctgttaactgtaccagttttgacgatggggaagtagaagattatacagtaagaatatcaaaattaccaattgtcaattcagttaatcagacagatattttgatttatccaaatcctgttaaatcagtcttgaacgttaaaaatattagtgagaaagcaaattataagatttatagtgctgctggaaggctagtttctagcggattaatcgtgaacaataaaattgatgtaagcgcacttcttagcggagtatacgttattgatattgaagataagaaaggaaatgtgcagaaaaaattcattaaagaagaataactgatttaatttccgtctataaaaataagctctcaattttgagagcttattttgttttattaaagatatattgataaaattttatattaaaacctcattgtaatatagtaaatcattattttcgtcaaaaccaataatcatcacacggaaattttttgcatcatcgttattataccattgtacaatagtcggttctcccgatttactttctaaataaggattccaatacaaaatgcttcttttatcttcgggcacagattttgcgctttcttcatcgtaaattccattattaaaaggcacttctttatcatatccattgagtttgacctctgtaagattagaggatagagtagtgtctaccccagaaccggtagttccgccacggcgggtatagattgcaactgctccatttcctcctccaaagcttcctgcaaaatttcctttaattacttttaccattgcaatgtttgagacaggaatattagaaatctggtttgcgtcaactctcatttcatccaagaaaaactccataggtccaccacgatttgttgcagtataactaccaccctgcatctgaatctgaagacctgcaactctaccctgcagatattgtaaaatattttgagagccttgtgcattttggttttcattcaccaaatcaaaaacagtttcgtttccacttctaaaaaggggactgctgagttcattattaagttttttggttaaatctttcttttgtgctttaattttaacctcttcaataagcgtttctttttctcgtaaatttgtctgtgaactcttattcgctacagcacgttctatttcgataggtattgtatctgttgaattgcgctgtacaagtgtataattgttagatggtagattgtttctaaaaggtaagaatgaaaatgagggttggaaataaacccgtaccgaatttttgtttgttttctcaccattaagttgataagaaaatgccattgaatcttcgaaaaccaaaccattcaaagtgaacattccctctttatctgttttaattaaattgtatttaattccctggtccggcattttgaaaattaaattaatctctgcttccgatgccggttttcccagttttgtagcttttcctttgtaagaaagaaagttttcgggtttatattttatagcaggaaaatttccggacatgatggtctgccaattaaatcttgaccatttttctgaaatcagtaatgcatccaatgcatcaatatttctgtttttactgaaatattgggcaggattataaagttttgaagtaatatctccagtaagccaaagtgtactcaataaactgttttcattctcaggattttcactttcattatctgttacgcttacaagataagtcgacatagatgagtcattaccgatgttaaaagaattgctgtctctaggctttaaactaaatgaagtaccttttaaagaaggttgtttaagtttaagggattgaggttgtacaaaacaaagtcgctgagcaacaatattctcagattcgtcaaaaatagtgagattaagaatcccgttcaccaattgactggttggaattgaataaacccgatctgaaatattagaaacattagctttataaaccaactgactgttaatggttgctataattttatattttgagttttgatcaatatttttaccctttaaaacaaactttatggcatcagattggctttgaacctgtaaattcactcctgaagaaacgacttcgggtaaattaatagtcagtttgattcctttatcgtcttctacaataagctgatattttttcccgctgataggcgtgaaattaaaagagccaatattctgatcaaaacccttaaaagtaactaatttagtttgtagattctgagcttctgtaataaagccattccaatttattggtgtttctccttttgattgtaacctaactgcaaattttgtattgataccatcaataaaagttccgctctccggaaaaatagcggcagtccatggagcagatgtattttttactagcttttcaggcgatgaaggattgtatactgtgatcggtatgatttcattaaaatcatcactgaaattccccatccatgtggtataagctctgatgtaataaacatcttctttcaaattagcaggcaaactaatacttccgctgcctttaccattaattagaggatatatttttttgctgatctgttttttattttggtcatacagctctagaaaaacattggtggaaattgtagaaggactgtatccgtcaaatacaaaagaagtaaaccacagattttcgcctgcaacataattttttttacttaaaaggaggtgtattttttcctgaggataattttcttcaaactttttaagcgcttcttctgctttgttctgggaaaaataaaatggagcaacaattaatgataatgcaataagtggtttttgcgagaaagatatattcatatgcggattcgtgtttttattgtatttcaaaaatacattttttcttttatcagagaaataattgaaagtttttttatgaaattaatattaaaagatgtgtttttataccttaaatcttaatttacatagacattaacggaatattcagacataaaaaatgccccgcagataggcgaggcgctaaatgttttcacaacggaataatccttattgtgaattgctttcggatacaaatctaaaaataatatttttaatcagtttacggttttccacatttttagctttataaagttaaataaaaaaaataaatatttaaaatgtattgtgatttataaaatatataatctatatttgtattgtcaaaaataaagtcatctaagataactttatttagggggtatagcataacggctaatgcggcggcctgaaaattcgtacatacgggttcgattcccgttacctccacgacaaaattaatgatttattttcttataacgattatatatttaaataaatcagttgtgaattgctttcacatttagagagattgcgaaagtaatctctctttttaattggttgttgttgtgttttctatgaaatacgggaatccgtataaatcatatatcaaaatattttatttttatactttcttgaaaaaaactttttgttatggtgaaaaatattttaggattagatttaggtgttacttctattggatttgcacatattctcgaaggtaaaaatcccgaacaatcttctattaaaaaaataggagttcgtgtaaatcctttaacgaccgatgaacaaaccaattttgaaaaaggaaaacctgtttctgtaaatgcagacagaactttgaaacgtggcgcaagacgaaatctcgaccgttatcaagatcggagaaaaaatcttattgatgctttattgaaagctaatattattacaaatgaaactattttagccgagaacggaaaagacacaactcattccacttatcttattagagcaaaatctgcggttgaaaaaatagagaaagaagaattggctagagtttttttagctattaataaaaaaagaggatataaaagcagtagaaaagcaaaaaacgaggatgaaggtcaaatcatcgacggaatggaaatcgcgaaaaaactatacgaagaaaaccttactccaggccaattggcttatcggttattaaaagaagagaaaaagtatctgcctgatttttaccgttcagatttgcagtcggaatttgatagaatctggaattttcagaaacaattttaccctgaaattttgactgatgaattttataaagaactaaaaggaaaagggcaacgtgcgacctctgccatgttttggacaaagtatgggtttaatacagcagacaataaagcgaaaacgagagaagagaaaaaactgcaagcttatttgtggagaagcgaagcgcttaataagcaattgggaaaagaagaagttgcttttgtggttactgaaatcaataataatcttaataattccagcggatatttaggtgaaatcagtgatagaagcaaagagttatattttaacaatcaaacggttggtcaatatttgtatgaaaagttaaaaacaaatcctcatacgagattgaaaaatcaggtattttaccgtcaggattatttagatgaatttgagagaatttgggaaattcaggcaaaatttcatccagaattaacggaaaaatggaaaacggaaattcgggatattatcattttctatcaacgaaaactaaagtcgcaaaaaggtttggtaagtttttgtgaatttgaaagtcagaaaaaaatcatcaacggacataagaaaacgataggcttaaaagtagctccgaaatcttcgcctttgtttcaggaatttaaaatctggcaggttttaaataatgttttagtcagaaaaaaaggaagtagaaaaagagttgcaaaagcagatgctccaactttatttgatgaagaaaaggaaatttttattttcgatttggaaaccaagcagaaattatttgatgaattaaatagtaaaggaaatttaaaatctgcaaaaatccttgaacttttaggttataaatcgaccgattgggaaatgaattattccgaattggaaggtaacagaacgaataaaattttatttgatgcatatctgagaattttagaattggaagggtatgacgaagatctattgaaacttcaagggaaagacgacattgatatttctgagctgaaagcatcagtttgggaaataaaagatatggtaaaacgtgtttttgaaatattgaatatcaatacagaaattttagagtttgatgctgagctggatggaaaagatttcgaaaaacaagcttcttatcaactttggcatttgctgtattcttatcaggaagataattctaaaaccggaaatgatactttgtttaggcttttagaagaaaaatttgggttcaaaaaagaacattctcagattttggcaaacgttgctttttcggatgattatggtaacctaagtacgaaggcaatgcggaaaatttatccgcatattaaagaattgacttatgataaagcttgcttacaggcgggttataaacattctgctttatctttaaccaaagaagaaattgcaaatcgtcctttgaaaaatcaattagaattactcaaaaaaaatagtttacgaaatcctgttgttgaaaaaatattgaatcaattggtaaatgttatcaacactatcattgaaaccaacagcaaaaaagacgaagaaggaaatattactgaatatttcaaatttgatgaaatacgtgtagaactgtctcgtgatttaaagaaaaacgcaaaagaaagagcagaattaacgaccaatatcaacgcttcaaaaattgcccacgaaaagatttttaaattgcttcaaaatgaatttcatattaagaatccaactagaaatgatattatccgttaccgtttgtatgaagagttgaaaaataatggttacaaagatttatattccaatacttatatttcaagggaaattttgttcagtaaacagattgatatcgaccatcttattcctcaatctaaaatgtttgatgatagtttttcaaacaaaactgtagtttttagaaaagataatttagacaaaggaaacaggacagcctttgattatatttcagaaaaatttggagaaaacggaattgaagatttcaaatcaagaattgaaatgcttttcgagcaaggaaagaaaaataaagaggaaggaatttctaaagccaaatatcaaaaattattaaaacaagaagctgaaattggtgatggttttattgacagagatttgcgcgacagtcaatatattgctaaaaaagcaaggaatcttttatatgaaatctgtagagtggtaacgccaactactggaagtgttactgcaagattgcgtgaagattgggatttagtcaacattatgcaggagcttaattttgaaaaatttaaagctttggggttaattgaaaaagttgagaaaaaagatggaagcttcaaagaacgtattgtagattggagcaaaagaaacgaccatcgtcatcatgcaatggatgctttgacggtagcttttaccaaacataatcatattcattatctaaattttttaaatgcaagaaaaagcgaaaatcataaagagcataatgcaattatcggtattgaagataaagaaacgacttggaaatatgatgatgaaggaaataaaaaaagagttttcaatttgccgattccaaatttcagaaaacaagctaaagaacatttagaaaacgttttagtttcacataaagctaagaataaagttgtaaccagaaataaaaacaaaatcaaatctaaaaacggcgaaagaactaaagttgaatttacaccaagaggacaattgcacaaagaaactgtttacgggaaatatcaatattacgtcaataaagaagaaaaaataagtgcaaaatttgatgaagtaaccattaataaagtggcaaatccgacttataagaaactcttacttcaaaggctttccgaaaatgaaaacgatcctaaaaaagcattttccgggaaaaatgttatgagtaaaaatccaatttatttgaatgaagaaaaaactgaacttttcccggaaactgtaaaattaacttggctggaagaagattattcaattagaaaagagatcacgccagagaattttaaagatataaaaatcattgaaaaaattttagatgaaggcataaaacgaattttattcaatcgcctgaaggaatttggaaatgaccctaaaaaggcattttcagatttagataaaaatccaatttggctcaatgaagcaaaaggaatttctgtcaaaagagtgactatttccggagtgaaaaatgcagaatttttacattacaaaaaagatcatttagggaacgaaattttagatgataatggtaagaaaattccggtagattttgtgagtacagggaataatcatcatgttgctatttaccgagacgaaaaaggaaatcttcaggaaagagtagtgtcgttgtttgacgcggttcagttggtcaatgcaggagagtctgttatcgataaaaactataaccatggtttaggttggcaatttttgttcacaatgaagcaaaatgaatactttattttccctaatgaaaaaacagggttcaatcctaacgaattggatttattagaccctaaaaataaaaatgtgataagtcctaatttgtttagagtacaaaaattagcaactaagaattatatgtttaggcatcatttggaaactgctgttgaagaaatgcaacaattaaaagatgttgcttatataagtataagaagtacaaatcctttagggaatattgtgaaagtacgtctcaataatctcggagatattgtaaaaataggagaatattaacccatgatcacccgctccatctacatcggtaatcccacctatctgaaactaaaagacaatcagatgaaaatactatgtccggaaacaaaagcagaaaaagggagtgttccggtagaagatttgggcttgttgatgttggatcattttcaaattaccatttcacatcagctcattcagaaaatgatgggcaataatgtggtggttgtgagctgtgatgcgcaacatttaccccacggaattatgttaccactttatggacataccgaacattcggaccgaatcaaagaccagttggaagccagcgaaccgctcaaaaagcaactttggaaacaaactatcgaatgtaaaattgaaaatcagaaagaagttctatggcgtttgggaaattattacgaaccgatgctcgagtatcaaaaaaatgtgaaaagtggtgatattaccaatatggaaggcattgcagctcaacattattggaaacacctcatcagtctggatttcctcaggcaacgctttggcgactcgccaaatcagtttttcaacttcggatattctgtgcttagaagcattgtggcgcgtgcgattgtagaaacaggtttgcttcctgtcctcggaattttccataaaaacaaatacaacccttactgtctcgctgatgatttaatggagccttatcgcccgttcgtagaccaactggtcatgatttggcttaccaaaaatcccgactcagatgagctgacaaaagaattcaaagcacacatcctccagattgccaccaaagacgtaaggatagatcaagtcacaagacccttattaatcgctgtaaaaatgacgacttcctcactccacaaatgttatacaggcgaaaaacgtcagatttcttatcccgaattcgtatgaaaatgcaaattatttgggcgtgccccattgtttttccaaccgctcaacctcatcggtttcaaaaaccgttgagatttttccttgctcaaaaacaaagggtcggtctccgctttcaatcttttcccgccaccgcatttccttcgctagaaaaggatttccagctgcgccctcacgcagaacaccgcttccgaaacaacattttcacccatgaaacaagaccgttttaacgcttaccgaattatgtgggttttagttttatacgatttgccaaccgagaccaaagccaatatgaaagacgccaaccgctttcggaaaagcttgttggatgatggtttcacactatttcagttttcaatgtatgtccgtcattgcccaagccgagaaaacgcagaggttcatattaaaagagtaaagtttatgctcccaaaagcaggaaaagtagccattatgtgcatcaccgacaaacaatttggagatatagaaattttctttgctcggaataaagaagaacctccaccaacctttcaacaattagaattgttttagggcttgatattttttaagtgcactagttgttatttttaattatgtccaatttttcttttggctttagtttatcttatgacttttatagttgaaatattaagcttggtaataatgtaagttttgtggttgccgctagaattactttagttttaatattggtattcttacgaatcaaaaaatgacagaaattaattttaaactccatctaaaaacgcaaaatttgaaattctaaaaacaaataaaacctactgataaacagtaggtttagcttttgaggttgtgttatatctcaaagatactcaaaaatgaaagcaattcacaacactaatggtggtgctgggtacccatcgtatgttgtgttatatctcaaagatactcaaaaatgaaagcaattcacaacgctaaggccctgcaagggcttgcgcctggagttgtgttatatctcaaagatactcaaaaatgaaagcaattcacaaccggtcggcaggtagtagcaccagcgtaagtgttgtgttatatctcaaagatactcaaaaatgaaagcaattcacaacgcagcggcgaacttttgtacttcttccttagttgtgttatatctcaaagatactcaaaaatgaaagcaattcacaactgttaatttacaagccattgtatttatattgttgtgttatatctcaaagatactcaaaaatgaaagcaattcacaacagggggtcgagtgatatttatttatacattgttgtgttatatctcaaagatactcaaaaatgaaagcaattcacaaccttgatcttattggaaagttgaaagcagaagttgtgttatatctcaaagatactcaaaaatgaaagcaattcacaacatagtggaagctctcttataaatttgaatagttgtgttatatctcaaagatactcaaaaatgaaagcaattcacaacccatacgtcggaaacacctactcgccctttgttgtgttatatctcaaagatactcaaaaatgaaagcaattcacaactttgaccttttctttaggaagatcgattttgttgtgttatatctcaaagatactcaaaaatgaaagcaattcacaacataatcttcaacctaaacaaccagaattatgttgtgttatatctcaaagatactcaaaaatgaaagcaattcacaacacatcaggacaagtagttgtgatgggtagagttgtgttatatctcaaagatactcaaaaatgaaagcaattcacaactggatgataaaggagtcgaaccttcgaagcgttgtgttatatctcaaagatactcaaaaatgaaagcaattcacaactatcggaagttttgggaattacagtaactggttgtgttatatctcaaagatactcaaaaatgaaagcaattcacaacccgtcatgatgtctaccggataatctttcggttgtgttatatctcaaagatactcaaaaatgaaagcaattcacaacgcagtcacagatgagccacatgtcctttgggttgtgttatatctcaaagatactcaaaaatgaaagcaattcacaacgatgataaaaatcgtttagccttttatgatgttgtgttatatctcaaagatactcaaaaatgaaagcaattcacaaccctgaatcccatagaataacatatttatttgttgtgttatatctcaaagatactcaaaaatgaaagcaattcacaactgaagaatacactcagttagcggaagcaatgttgtgttatatctcaaagatactcaaaaatgaaagcaattcacaacattaaacttatgacacattcaattggttgggttgtgttatatctcaaagatactcaaaaatgaaagcaattcacaacgtattgccaatcagggataaattgattaacgttgtgttatatctcaaagatactcaaaaatgaaagcaattcacaaccggctaataaactcaatacacctcccataagttgtgttatatctcaaagatactcaaaaatgaaagcaattcacaacatgccatctgtcagtaaatatggtagctcggttgtgttatatctcaaagatactcaaaaatgaaagcaattcacaacatgccatctgtcagtaaatatggtagctcggttgtgttatatctcaaagatactcaaaaatgaaagcaattcacaacgttctgaatttaccaagaaatcaccttccagttgtgttatatctcaaagatactcaaaaatgaaagcaattcacaaccagctactcaattagctacaatggctcagggttgtgttatatctcaaagatactcaaaaatgaaagcaattcacaacacagtacaaaaacgggacttgaacttgttgttgtgttatatctcaaagatactcaaaaatgaaagcaattcacaacacagtacaaaaacgggacttgaacttgttgttgtgttatatctcaaagatactcaaaaatgaaagcaattcacaacacagtacaaaaacgggacttgaacttgttgttgtgttatatctcaaagatactcaaaaatgaaagcaattcacaacacccttgtggggcggctgttagagattgttgttgtgttatatctcaaagatactcaaaaatgaaagcaattcacaacgcaagggcgaaaactgacaatgacaggtgagttgtgttatatctcaaagatactcaaaaatgaaagcaattcacaactcaatgagaggtggatcgagattcagagaagttgtgttatatctcaaagatactcaaaaatgaaagcaattcacaactatcatttctgcagttaagtaattaagtccgttgtgttatatctcaaagatactcaaaaatgaaagcaattcacaacaaagaagtattccgttatcaatgaccagtggttgtgttatatctcaaagatactcaaaaatgaaagcaattcacaacatacgattgaaccttccagaacttcagattgttgtgttatatctcaaagatactcaaaaatgaaagcaattcacaacacgagatgcagttgctattgctttgaacaagttgtgttatatctcaaagatactcaaaaatgaaagcaattcacaacccaacgccaaacgagcaaacaacatttaacgttgtgttatatctcaaagatactcaaaaatgaaagcaattcacaactaacaaatgttcttgaaactctttttcaaagttgtgttatatctcaaagatactcaaaaatgaaagcaattcacaacaacggtttaaatcaattaaaaaacttagaagttgtgttatatctcaaagatactcaaaaatgaaagcaattcacaacataatacaatattcgcatttggttttgtgaggtgtgttatatctcaaagatactcaaaaatgaaagcaattcacaacagactaagcaaatgactgagattaagatgtgttgtgttatatctcaaagatactcaaaaatgaaagcaattcacaacactgtggcaaatgtaataagaagatgtagggttgtgttatatctcaaagatactcaaaaatgaaagcaattcacaacccgttttcaatgttgaagatttcaagtggtgttgtgttatatctcaaagatactcaaaaatgaaagcaattcacaacagatctcacatggtcggcaatatcatttctgttgtgttatatctcaaagatactcaaaaatgaaagcaattcacaacacgacctttcaagttgtccttaatagcatcgttgtgttatatctcaaagatactcaaaaatgaaagcaattttaaaaataaaaaagttcccaaaataatttcaggaactgcaagtttaaattttatatacttaaaaattattaaggcaacaacttttcatagtaaacaggagtgtatttttcagcatcaaatcccataatcataaaacggaatttttttgcagtatcattattgtaaaaatcaacttttgcgggagtatccggatctatctccatattaggattccagtagagtacgggtctgtaatcgctagttattttagataattcagaattttcataatcagaatcgggatatccttcagattcattataaccttccatcacaaaaaagttgaggttaaccatttctgaaagtgtatttgctttggctacaggtttcatatctcctcttttggtataaatcagtacaccaccactaccaccgccactcataccaattgcaccgtctttgataatttttaccatagcgatattatctgccgataagccggtaagagtacttgcatcagttagcatttcatccagataaacattcgcttttgcttgccggatgtatggggttggaattccattttcgtaattaattgttaatccggcagcgcgaccttgtagccattgtaatatattttgtgaacccgcagcagattggttctcattgacaaaatcaaaaacaatctcactcatgcttctgtaaagagagctactcagtttgttgttaagttcatctttgaggtttttctttttcgcttttatttttacctcttcaattaaagcaactttttcgttgtattcctttttatatcttcttgcatcaatagtttttgttaattctgccggctgactgctttctacagtagaatttctatcaacaagtttatatccttcaattgtcggtagttctttttttaatgggataaaagtattggcgggatgcacatacacattggttctgctttttaaagcggcattagctccattaacctgataagtaattttaataggtttttcaaaaatcatattatcaaaaaggaattctccgttactatccgtttcaacctgaaaaacctgatttccggatttgtctccctcaacaaacatgatgaggttttgctgaggagcaggtttagcgtttaccgttaattttcctttataggaaatatattttgaggcattattaattatttccggatgttttccagaaataatttctttccagtcaaacattttccattgttccgaaatgagaagagcatccaatgcatcggtatttcttttttcactaaaatattgggcaggacgatctattttagacttaataacacttgaaagccataatgagcttaaaagattttcgttcagcaaagattttttatcttcaggatcaaatactgcaatagaataactcggaatatctttaatagctttcacattaaaagaattaaaccctcttttttccgtacttaaagtttcagattttacttccggaacagaaatatttaagttttgtggcatcacaaaacacattctgctcaccaatacattttctttatcatcaaatacagtaagctgtaaaataccgttgataagttgattggttggtattgcctggaatgaatcttttaactgattaactttcgctttgtaaaccaactgatcaccaatattggctataacagtgtaataagggatgttttctccggtattttttattttatatttaatattgtctttttcactgatcacttgcagacttactcctttttcagaagcattcggaagggctacagatttttgtaaaccattattgtctgtaatcaccgcttcgtaaattttatctttctcaggagttaatgagaaaactccaacattttcgtctaaacctttaaaagttgtgattttcttttcaggatggtctttttcaatgatatatccttcccattgcgagggaggtattccgatattatgaagacgtatagctattttagactgatttccaacaataaaagaatttccttccggatgtactgtcgcagaccatgaagaagacttatctgtaactagttttttaggtgaagaagggttgtagatagggatttgcttaatgtattggaaatcctcactcagattgctcatcatcggagtataggctctgacgaaataaatatcttcactcaagctttcaggaatctgaaaacttccctgaactaccccgttaaaaataggaaatctttttctcagaatctgttttttatttttatcatagagctcaataaaaaagttggttgaaagatctgatatggtgaagtttctgaaaaccattgcattaaaccacagcgtttctcccgaaagatacaaatctttatctgtaaggatataaagattttcctgtgaaagattttcgttaatatattgaagagccttgtcggcagattgttgtgagtgaatgtggctgaaagatgccaaaagaaaacagaatgtaattattcttttcatattctatactacattaagagtatacaaataaagtgaaaactgtttgtctgataaaatatttaatatactttatgatttaataatttattagagatgttttcaagcaattttataattgataaaattattcatacggaatgttttaggtcatttattttgatttaatccctctttttcagctattttaaaactgtttaatctcttaatttgctgtaaagtagtttgttgttaactgatgaattgttgattaaaattgtctgtaaaatggaattcgctcattatgaatttgttaataaataaatattgatagtggttaattcattaaaaatcactaatttcgcacccgtaaaaatcattcatgcaaaacattagaaatattgcgattatcgcacacgttgaccacggtaagactactttggttgataagattattcatgctacaaacattttcagagaaaatcaggaaagtggagaattaataatggataacaacgatcttgaaagagaaagaggaattaccattttatcaaaaaatatttctgttacttataaagatacaaaaattaacgttatcgatactcctggtcacgccgattttggtggtgaggtagaaagagtattgaaaatggcagacggtgttatcttgttggtagatgcgttcgaaggaccaatgcctcaaacaagattcgtattgcagaaagctctagaattaggtcttagacctttagttgttatcaacaaagttgacaaaccaaactgtcgtccggatgaggttcacgatcaggtatttgatctattcttcaatcttgaagctactgaagagcagttggatttcccaacattctacggttcatctaaacaaggatggttcaacacttcattagagcaaactgacaatattttcccattactagatggtattttgcaatatgttcctgagcctaaagtagaggaaggtaccttgcaaatgcagattgtttctctagatttctcttctttcttaggaagaattgcaatcggaaaagtaatcagaggagaaattaaagaatctcaatggattggtttagcgcaagctgacggaaaagttgtaaaaggaaaagtaaaagaactttacgttttcgaaggtcttggaaagaaaaaagtaactgaagtaaaagctggagatatctgtgctgtagtaggtttcgacgctttccagattggagattctttcgtagatcttgaaaaccctgaaccattgccaagaactgcaattgatgagcctacattgaacatgacgttctcaatcaacaattcacctttcttcggtaaagatggtaaatatgtaacttctaatcacttaaaagaaagattaactaaagaattagagaaaaaccttgcgttaagagttcagcagactgatgatgcaaacacattcttggtattcggtagaggtattcttcacttatcagttttaattgaaacaatgagaagagaaggttacgaaatgacgattggtcagccacaggtaatcttgagagaaggtgaaaatggtgagaaattggagccttatgaatctttggtagtagacgttcctgaagaatttgcttcaagagtaatcgacttagcgactcagagaaaaggtgaccttcacattatggaaactaaaggtgaaatgcagcacatggaattcgaaattccttcaagaggtttgatcggattacgttctcaaatgttgacagctactgcaggtgaagctattatggcacaccgtttcacagaatacaagcctttcaaaggagctattcctggaagaagtaatggtgtattgatttctaaaactcaaggtcctgcaactgaatattctattgctaaacttcaggatagaggtaagttctatgttgatccgggtgaggagatttatgcaggtatggttatcggtgagcaaaacaagccgggtgacttagttgtaaacatcgttgaagcaaaacaattgaacaacatgcgtgcttctggaaaagataaagatactggtgttgcaccaaaaatcttattctctcttgaagaatgtatggaatatatccaagctgatgaagcaatcgaggtaactcctaacttcatccgtatgagaaagaaaatcctttctgaagaagaaagaaaaagaattgaaagaggagcgaaagcataaccctaaattctcaaatatatttaaagcctcgatttttcggggcttcttttatttcattaatgaaatcatagtaaagagttttttattcttttctgttttaactaaattttacagtctgagatttctc

SEQ ID NO: 2135 - DNA, 24284 bp, synthetic construct
  source 1..24284: mol_type = other DNA
  misc_feature 1..24284: note = Synthetic
gttgccccgtctgctcgcaggcacgcctgaccactccggcgaagcgaagggcaagcgtgctttccgccattcccgtgccataaagctgttcccattctgtcacagctttttccagctgtttgtccaagctgtccggggtgtcatacttccctatattcaggtcgatgtgcagcacggggcgttttatccagtctttctccagcttctccatcgccagcccttcaaagagttccttctttccctggaagtaggcttcgagggtggagatgagcaggctcttgccgaagcgccgggggcggcttaggaagtagtagctgcccgtctttaccagccggtagacaagggcggtcttgtcgacgtagaaatagccgcctttgcgcatcttctcgaagttctgtatgccgatggggtagattttgttgctctgtatgggttccatatttccggttctcctttcttatatatcacttttcttatatattacctgtaactttcttatatattacttgcaacgcacaaatatacgaatagttcttgtaactgacggcctgcaatctgttaaactataggctctgtgcatggttctgcggacttgtccggcaaagtctcccggtactgcacgggtgtcatgccaagcagtttgttgaacgccacatagtaggtgttgcggctcttgaagcccgaagcggtggctatggcatctatggaatacattctgttgtctttcagcatcgatatggagtgctccacgcgcaggcggttgatgtagtcgctgaagccgtcggcaccggcatattcgcgcaggaacgggttgaggcggttcttgctcaaggccgttatcttcatcaggtcttcgcggttgaagtcggggtttaggaagggcaggtcggtgagtagggcatcttccatctgcatgaaccggcggcggttgtcttcatcgtcggcagcggagggggaagtgttggcttgagcggcaggcggctcttcgttaggggcatcttccgggtgaagcggctgccggcggtatgccttgcgcagttcttctttctgtgccagaagctcttctatctggcgggcggctatctggttgcgttcgcgggtgcggcgcaggtggaggtgcttttcccatagcaggatggcgagcaggatggcgatgaagctggtggtgatgaacagtacgcgttgccgtgccagcttgtgttgggcttcgcgtatctgcgcatccttttcctgggtttggtagatgatggcgaattcgtgtgcctggccggccttttcgcgggcatagatgctgtcggtcagcatggtgatgcgctgttggtagctgtcggccagttccggacgtttcagtccgcggtaggtgcgggcatagcggtccagcagaatcaggtggccgtagttgaaggtatcggccggttcggccagggcggaagaggcgtcaagaagttgcagcactttatggtactgacgcgtacccagcaggtaggggacgatttctgtttgtcctgcctgcgattgtgcaaagccggtgctttggtatttccgggcggtttcggcggctttttcgctttgtccgttttgcaggtagtaccaggcaagtttggagtagaggtaaccgtattgctggtctatgtatccgggcggcggtccgggcagcaggctcatgcggctgataacgtcgagacgcttctcgcagagggcaatggcttcgtccaaacgctcgttttcggccagataggcggacaagtcgccgtaggaggtggatagttgggccagttcgcgcacattgtccgtgccttgcagcagttcgatggaacggtacatgtaccggaacgctttgtcgtcgagcttcatgccttgatacatgcggcccaaagtgaacagcagttcgctttctttggccttctgtccttgctcctgtgccagctcgatggcttcggtacagatgcggatgccttcttcgtatttgttcaggcggtcgagggcggtggcgagctgcgtgaggacttgcagtttccggagaggagtgtgctgcacggagtcgctttgcagggcgcggcggatgtaccgctccttgaggtggtacataccttgacgttcgtagactgtgccgcgcagcatgtcgatgcggaattgcggcaggtggggaagacggcgggcttcggcttcgtccagcagtgacagagcgctgtcgggcagggtgtaatagatgctgcggatatgctgttcggtcagcaggctgtcgggcagggaagcggaggttttgtatcggttaggggtgcttgcggtggaaaataggcttatggtgagtgccagagcaagatagaggggacggaagtaatgtattttctccattgtttattttctcttttgtatggcaaagatagggattatttttatctttgcctgcgtttatcataagaagttactgcaatgaatatatacataaaatctgtcattttgtcttttttctttatatctgtcggggctcgggcacaagaggcttccttcactccgccttttgattttcccatcattttctccggtaactttggcgagatacgtgccaaccattttcatggcggactggatttcaagaccggtggcgccataggcaaaccggtacgtgcgctggcggacggatatatttcgcgtatccgtgtcacccacggctcgggctatgtgctcgatgtggtgtatgataacggctataccgccatctaccgtcatcttagcgcctttgtgggtgaagtggcaaagcgagtgaaggctcttcagtacgaaaaggaaagctgggaagtagagataattcccgagcctgctcccgtgtcagatgagggagacgatagagatagaggcagtaataatctcggggtgcatatcttgggcgaatatcccgtgaaagccggtcagataatagctttaagcggaaacaccggatactctttcggtccgcacctgcatctggatatgatagagacggctacggacgaatatatagacccactgcctttcttcatggacaaagtgaaggacaagactgccccgcgtgccgaaggtatcatgttgtttcctcagccgggcaaaggagtggtggaaggtaagcagacgcgacgggcttttccggcacatcctacgaaacccattaccgcctggggattgattggtgcaggcatccgtgcttatgattatatggacggagtgcagaataaatatggcgtgaagacggtgattctcgaagtggacggcgaggaagtcttccgcagtacggtagaccgctttgcatacgaggaaaaccgctatatcaattcgtggacacacggccagtatatgaagtctttcatcgagccgggaaaccacttacgcatgctgcatgcatccaacggtaaccgtggactggtggacatcaacgaagaacgcccttaccggtttgtctatacgctgagcgatgcgctgggaaatacctccaaggtctgcttcacggtgcaggggcagaagacgacaattgctccggtggaacatcgtgagaaatacgccctcaagtgggacaaggtgaactatctgcaggaaccggggttagaattggtcattccgaaaggaatgctctacgataacgtcctgttgaactattccgtgcgggctgatagcggtgatatagctttcacctatcagttgaacgatacccgcattccgatgcacgatgcctgcgatttgcgtatcggcttgcgccggcgtccggtagaggatatgaccaaatattatgtggcgggcgtaacggcgcgcggtggaaaataccgcatcggcggtaagtatgaggatggtgtcatgaaagtgcgtatacgggatttggggacttataccgtggcagtggatacggttccgccggtgataactcccgtgaaccaagcccaatggggacgtacgggaaaaatcatcttcaaggccaaggacaaggaaaccggcatcaatacctatcggggtacgattgacgggaagtatgccttgtttggaaagcccaattccatcagtggtaacctggtgtgcgagctcgacccgaaatatgtggagaaaggcggcaagcatgtggtggagatgacggtgacggatggctgtggcaaccgtaccaccggacagtttgaatttgtatggtaaagactgaaatatttagtaacattataatttagaagtatgaaaagtaaaagactgactctttccgtcttgtttgttgtggcagccgtggcgaatgcactggcctgcaccaatcttatcgtgggcaagaacgcttctgcggacggttctaccattgtttcctattctgccgattcttatggtttgttcggcgagttgtatcattatcctgccggtatgcacaagaaaggtacgctgattgacatacacgagtgggacaccggcaaataccttgggcagatagagcaggcgcgtcagacgtacaatgtcatcggcaatatgaatgagttccagctcactatcggtgagacgacattcggcggacgccccgaactggtagacactaccggtattatcgactacggtagcttgatttatctcggactgcaacgttcacgcactgctcgcgaggctatcaaggtgatgacggaattggtgcaggaatatggctattacagtagtggagaatccttcaccattgccgaccccaacgagatatggattatggagatgattggcaagggacccggtgtgcgcggtgccgtatgggtagctgtccgcgtgcccgatgattgtatctccgcacatgccaaccagagccgcattcatcagttcaatatgaatgacaaggaaaactgcatgtactctgccgacgtcatctcctttgcacgtgagaagggttactttgatggtgtgaacaaggatttcagttttgccgatgcctacgctccgctcgattttggtgcccgtcgctattgcgaggcccgtgtatggagctatttcaatatgtttaccgaccgtggtaacgagttcttaccttatatattaggtgagacgaacactccgatgcctctgtttgtgaaacccaaccgcaaggtttccgtgcaggatgtgaaaaatgccatgcgcgaccattatgaaggtactcctctcgacatcagcaaagatttcggtgcaggcccgtatcataccccgtaccgcctttctccactctctttcaaggtgggcgaccgggaatatttcaatgagcgtcccatctccacccagcagagtggtttcgtattcgtggcacagatgcgttccgagttgcccgaccctatcggtggagtactgtggtttggcacggatgatgccaacatgacggtatttacgcccgtatattgctgtacggacaaggttcccgtatgctatacccgtgtggacggcgccgattacatcactttctcctggaactccgctttctggattttcaattgggtggccaatatggtatatccccgctatgacttgatgatagacgacgtgcgtgccactcagacagagttggagacaaccttcaacgaagcgcaggagggcgttgaggctgctgctgccaaacttttggaaaaagaccctgccaaagcgaaggcattcctaaccaactatacgaacatgaccgcccaaagcactttcgatacctggaaacgtcttggcgagtttcttgtcgtaaagtacaatgacggcgttgtcaagcgtatgaaaaacggtcagttcgaacgcaattccattggccagccggcaggcgtaatccgcccgggatacccgaaggagttccttgaagagtatgttaagcagacgggagacagatataaaatgcctgaataaaattaggatatttgaacttattcttctacatttgtgtcttacaaaaaagtttatattaacccttaaaataataacagtcttatggaaaatcaggaactgattaagcaggtgactgagaaagccgaaaaatggcttaccccggcatatgatgccgaaactcaggcagaagtgaaacgcatgttggaaaatccagataaaaccgaattgatagacagtttttacaaagacctggagtttggaacgggtggtctgcgtggcatcatgggtgccggtacaaaccgcatgaacatctacaccgtaggtgccgcaacacagggcttgtccaactatctgaacaaatgttttgccggaaagaaggatatttccgttgttgtggggcacgactgccgcaacaatagcgacaagttcgcaaagatttctgctgacatcttctctgcaaacggcatcaaggtatatctttttgatgaccttcgtcctacgcccgaagtttcattcgccatccgtcacttcggctgtcagagcggtatcaacatcacagccagccacaaccccagagaatacaacggctacaaagcttattgggatgacggtgcgcaggtgctcgctccgcacgacacggccatcatagacgaggtgaacaaggtgacggtggccgacatcaagttcaacggcaacaaggacttgattcagattatcggcaaggaagtggataaggtttatctggaaatggttcactccatctctatcgaccccgaagtcatccgtcgccagaaagacctcagcattgtgtatactccgcttcatggcgcaggccgcgtgcttattccggactcattgaaggagtggggatttgagaatatcaactgcgtgcccgaacagatggtgaaggacggcaatttcccgacagtggtttctccgaatcccgaaaatgccgaagccctttccatggccattgcgctggctaagaagattgacgctgacatcgtaatggcaagtgacccggatgccgaccgtgtcggtatggcctgcaaggacgataagggcgagtgggtgcttatcaatggtaaccagacttgtctcatcttcttgtactacatcatcaagaaccgtattgcaatgggtaagatgcagccgaacgacttcatcgtgaagaccatcgtgaccaccgaactcatcaaggctgtggcagacaagaacaagattgaaatgcgcgactgctacaccggcttcaagtggattgcccgcgaaatccgtctgagtgaaggtaagcagcagtatatcggtggtggtgaagaaagctatggcttcctggccgaagactttgtccgtgataaagacgcggtttctgcctgctctttgctggccgaaatctgtgcttgggccaaagaccagggcaagacactctatgacgtattgatggaaatctatgtagaatatggattctctaaggaaaccaccgtgaacgtggtgaaacccggtaagagtggtgccgaggaaatcaaggcgatgatggataacttccgtgccaatcctccgaaggaaatcggtggttcggctgtcagcctgattaaggattacaagacgctggaactgactgatgcccagggcaacgtaagcaagctggatatgcccgagacttccaatgtacttcaatatttcactgtagacggcacgaagatttctgtccgtccttccggtacggaaccgaagattaagttctatatcgaggtgaagggcgagatgggttgtccgaaatgctataccagcgccgatgccgaagctgagaagaaagtggaggcagtgcgcaagtcactcggcatttgataggaaagaggaaaaaatgtgtatatagtgttcggagaggcgtaacccgtgagggctgcgcctcttccttttgcttctgtgttgaaagaaaacttaaataaagacttaaacccgatggttgatgaacaaaacgtttgcagggaagtttagtatatgcagattgcggttacacaccgattggttgatgtgaatgagagtcgtttcattcgtagttgttcgtttgtgagtgtgtgttttccgcaatttgcttttttaaatttcttcccccctctttttaattctttaatttttaattgttctccatccaccagtctatcagccttcttgcgatactcagctttcgtggaatttcgggcaggttgtctttggaatagaaggcggcagcggtcagctcatcttcctgcagttttatctccccgctttcgtagtcggcaatgaaacccaccatcaatccgctggggtagggccagggctggttgctgaagtaggtgatgttctttaccttcagccccgtttcttcaaaaacttcccgttctacacattcttccagtgtctcgccggcttcgaggaagcctgccaccagtccgtagaaggttcctcggaagttccgggcatgcaccagcaggatttcgtctcctttgcgtatcagtacaatgatggcggtggaaacgggagggtacatctcattgccgcagttgggacacttcttcatgatggggggctggtgctccatggcggtgccacacacggggcagaagcggctgtgctcgtcccaatagagtatctggaaggcctttcctgcagaacggtactcgtccggcgagatgtagtcgtacgatgcgcgcaggcctatcatgacccattcatcggtttcggccacgagctgttccaaagcaaatgcacgtacttgcttgccgttgggtgggaacacttcgtgtatattacttccggcttccggtgtcagaggaggctctatactgacgggtacgctgtattttatttctcctttgtctgtatatccttttttcagcagcagttggtctttgaagaagacgaaccactgcgtgcagggttggggttctgttgatttttccattgtttgttgttttattatttggggggatgaacacgaaaatacaaaggcacagagattcttttcaaagagataaagcattaatttctatgtctttgtgtctctgtgttcgccccccccctaaatttcgtttgctgtgtctttttcttgccgcacatagaccgttgaccttcccattccgcggcggcgcaggaacccttgccggatgaatttgttcagctcgtctatggcggcatgtctggttagtccgctcaattggatgtattcgttcttgttgatgcatacattctgcttgaggaacagttccagttcggcttttcttgttgcttcggtggtctctactacttttttcgatttcttggtagtggagtgtacacgttccaacgtcattttcttcttgatgttgttgcggaacgtgctgctgatgcgcaggtgcacgttttggaattggacggattcggaacggattttctttttctcatcgtcggtctcgcgcaagcatttcagtgaagtgctgaagaagccgagttctcccagttccacgatgtttccgttggcaaggaggtcgcacaactcgtcaatgcaggcatccaatgctgctcctatcacattcttgggcagatgttggaaagttgcgatatgttccacaaactccttttgggtataagtccttttcgggcagatacgtgcatggagtgatttcttgtcttctttcccgtcgggcgaaggcgtttcgtaaaggtcgtaatacgcgctcataagatatttatttttgtttatagcgataaacagttctcgtcgcttcggggaattatttttgtcgctaagcggattaattttcttcttcctaaaaactaatcgtccgacaactgttgcattatcgtccaacagttgtttaattatcgtccgacagctgtcggacgaaacagaaatgggtatgggacgattatttcttagtgaacaaaggtataaaatattgtgatacgaagggtagtgtttggggaggaaagttttagtaggcaggaagttttttaaggaaagaaaaagtagtttctttgatggaaaaactcgtttattgaaataaaaaatcccccgttaaggacgagggaacctaatgtcttcacaacggaataatccttattgtgatttgcttcattttagtacgacaaagataagaataaaaatgatatatcctgcaatcttttcaaatgctttttttacatttgtggaaattaactttaaattattgttatgaaaaaaatattggggttggatttggggaccagtagcattggctgggcattagttaatgaggcagaaacgagcgaagagaaatcgtcaataattaagcttggtgtgcgagtaaaccctttaacggtggacgaattgcagaattttgaaaaggggaagagtatcactacaaatgcagataggacagcaggtcgaagtatgcgacgtaatttgcagcgctataaactgcggcgtgaaaatctgattgaggtcttgaaagaatataatttcattaccgatgaaatgatattgtctgaaaatggtaatagaacgacttttgaaacatatcgcttaagagcgaaagctgctgtagaagagatttcattagagcaatttgcacgtgtgttattaatgattaacaagaaacgtggttataaaagcagtcggaaggccaaaggagcagaaaatgggactttaattgacgggatggaagtggccaaaaaaatgtatgatgagggtattacacccggcgaattatgtttgcaacttcttacagcaggaaaaagatatttccctgatttttatcgctcagatttgcaagctgaatttgatagaatttggaattttcagaaacaattttatccagattccttaattgataaagtcaaagacgaagtaagaggaaagaataagtcacagacttgggctatattagcgaagtattttgtatggaaagaagttgaaaatagttggaatgaagaagaagcccaaactagaagagtagaaaaagaatacagacttgtgggaattaaaaggggagtaaagagagaggaattgaaacttgaaaacttccaatggcgagtaaaagcactttccgagaggatgaatcctgaagaacttgcaatcgttttgcaagagataaatgagcagattagtaattcgagtgggtatttaggtgcaattagtgaccgaagcaaggaactatatttcaatagacaaactgttggacagtatcaaatggctgttttggataacaatcctaatataggcttgcggaatatggtgttttataggcaggattatttggatgagtttaatacgatatgggaaaaacaggctgaatttcataaagagttgacggaagatttgaaaaaggaaattcgggatatcgttatcttttatcaacgtcgtttgaaaagtcagaaaggtttgataaatatttgtgagtttgaaaggcggcagatagaggtggaaatagatggtaagaaaaagattaaaactattggtagtcgggttattcctcgttcttcacctctattccaggaatttaagatatggcagactttaaacgatatagaggtgtcggtgcttggtgtgaaaaataaacgtaaaaagcaagatgataattctactacactgctcgattctgccgaaaatattgattctttgaaattgaatgttagccgtcctctggatgctgatgaaaaaagcttacttgctaaagaactttttatccgtgataagctgactaaatcagatgtgctgaaattgctatttaataatcctcagaatctgaatctgaattttaaaaatattgatggaaatagaacaggaagtgccttatatcaggcatttagtaagattcttgaaatatctggtcatgagtctattaatttcaaaaaatcagctgacgaaattgtagaacaagtaaaaacgatattttctgctttgggttggaatacggaagttttgtgttttgattcggaaaaagaattggacaagcaaccttactttaaactttggcatttattgtactcttttgagggtgatagtacgccgaccggagatggaaatctgattcaaaagatagcagatttatgtggttttgaaaaagattatgcttcaattttggcgaatataacttttcaagaagattatggtagtttgagtacaaaagcaattcgtaagatattacctcatctaaaagatggaaatcagtatgatgttgcttgtgaatatgcagggtataaacattcaaaatcctcattaaagaaagaagaaattaagaacaaggtattgaaagataaattagagcttcttcctaagaatagtttgcgtaatccggttgttgagaagatactgaatcagatggtcaatgtgattaatgcgattattactacttatggcaaaccggatgaaatccgtattgaactggctcgcgaattaaagaaaaatgcaaaagagagagaagaactgacgaaatctattgtggatacaacaaaaacgcacgaagggataagagctattctgcaaaatgatttcggaatgtctcatgtaagccgtaatgcaataattcgttataaattgtatgaagagttgaaagataatggttataaaaccttgtattctaatacctatattcccaaagaaaaattgttcagtaaggattttgatattgagcatattattccacaggctcgtttgtttgatgattctttctctaacaaaacattggaagtgaaaagtataaatattgagaaaggaagtaaaactgcttatgattttgtggaggagaaatatggcgaacaaggtttgcaggaatatttaaatcgttgcgaggtactgttcagggataagaaaactaaacttagaaaattgaaaatgcaggagagtgaaatccctgaaggatttattgatagggatttacggaatacacagtacattgcaaagaaagctctttctatgttgaatgaaatttgtcgtcgagtggttgctactactggggcgattactgatgaattgcgtgaagattggcaacttgttgatgtaatgaaagaattgaattgggaaaaatataaagtactgggattagtcgaatattttgaagataatgatggaaggttgataggtaggattaaagattggactaagcgtaacgatcaccgccatcatgcaatggatgctttgacagtagcatttactaaagatgtatttatccagtattttaataataagaatgctagtcttaagcctgatacgaatgaagctgcaataagaaataagtattttcaaaatggaaaggctattcctcccatgtctttagatgaatttcgtgctgaggcaaagaagcatttaaatgatacgctaatctctattaagaccaagaataaggtagttacaattaatctcaatagaacaaaaaagaaaaatggaataaacaaaaagcagcaacaaactccacgagggcaattgcatttggaaactgtttacggtagtcataaacagtatgtggttaaagaggagaaagtgaatgcctcgtttgatgcagctaagatagccactgtaaataaacctgcttatagagatgcattattgaggcgtttgcaagaaaatggcaatgattcgaagaaagcttttactggtaagaattcattggacaagcaacctgtttggttagatgctaagcagaacgagtgtgttccggaaaaggttaaaacagtaatgcttgaaacggtttatacggtacgaaaacctattgatgaaaaattgaatgtagataaagttgtagatgcgagaattcgtaaacttttgcaggatcgcataaaagaatacggtaatgcgaagagtgcatttgccaatctggatgaaaacccgatatggctcaataaagagaaaggtataactataaagcgagtgagtgtttctggtatcagtaaagcgcaatcacttcatgaaaagaaggataaggatggtaattttattttagataaagacagtcggaggattccagttgattttgttaatacaggtaataatcatcatgtcgcaatttatcgtaaaccagttttagacaaaaagggacaggctgtatttgatgaaaatggtgaattgaagtttgaacttgaagaggttgtagtttctttctttgatgcagtgacgcgggtaaatcttagtcaacctattattgataaagattataagagaagtgaaggttggaagtttctttttagtatgaagcaaaacgagtattttgtgttcccaaatgagaagactggctttgaccctaaagaaattgatttgctgaatcctgagaattatgctttaataagtccaaacttgtttagagtgcaaaaaatagcctctaaagattatgtgtttaggcatcatttagaaacagttgttgcagataggaaagaattgcaggagattacctggaaacgaatttcttctctaagtatattgaacagaattattaaagtccgagtcaatcatattggtcaaattgttatgataggggaatattgagatggagaataaattgaaattgtttcaaggtaagagtattcgttccgcctggaatgaagaagaacaacaatggtatttttctattttagatgttgttcaggttttgacagataatgcaatgctaagcaatatacaaagcgaatgtgttcaagagatgaaatgttgaatttgaactggggtacaatttgtaccccagttcaaatgactgctgaagatggtaaaagaaggaaaatccaagcggcaaatataaaaggactttttcgtatcattcagttattccttctcccaaagcagagctttttaaactgtgatcagcccagattggctatgatcgtgtacaagaaattgagaccccagaattagctcaagggtgaatgaaagaactttatgaacagaaagggtgtctcctcagttaccgtttgaagaaggtgatgaataatattcactaaaattgaagtactatgattaagaaaacactctattttggaaatccaatttatttatctttaaagaatgcacagttagtaataaaactaccggaagtagtgaaaaatgaaactttaacgggaggatttaaacaaaaggcagaagtgacaaaaccaatagaagatattggtgtagttgtattggataataagcaaattacgattacctcaggagtactggaagctctacttgaaaataattgcgctatcataacctgcgatagtaaaagtatgcccgttggcctgatgcttcctttgtatggcaatacaactcagaatgaacgttttcgtcaacaattaggtgcttctcttccattgatgaaacaattgtggcaacaaaccattaagcaaaagatagagaatcaggcagctgtgttgaaaaaatgtgcaggggaagaaataagatgcatgaaagcatgggctgctgatgtgaagagtggggattctgataatctggaagctcgggctgcagcttactattggaaaaacctatttaaaatagatggtttcacgagagatagagagggcattccacctaataatttgttgaattatgggtatgcgatattgcgtgctgttgtggcacgtgggttggtatcgagtggacttttgcctacgttaggcattcatcatcataatcgttataatgcgtattgcttggctgatgatataatggaaccttatcgtccgtatgtggatgaactggtttgtgatattatgaaaaaaggaggagattatgggatgttgacaaaggaactgaaaggacagcttttgacgattccgtcgttagatgttattatttcaggtaagcgtagtccgctaatgatagcagtgggacaaacaacagcttctctttataaatgttttaatggagagttgcgtaaaataacatatccggaaatgtaatggaccgttttagtgaatatcgcattatgtgggtactggtgttatttgatttgcctactgataccaagaaggataagaaggcgtatgcagacttccggaagaacctgcagaaggatggatttactatgtttcagttttccatctacgtacgacattgtgccagcagtgaaaatgcagatgtgcacataaaaagagttaaatctttcttaccggagtttggacaggtgggaattatatgtattacggacaaacaatttggtaatattgagctcttttatgggaaaaaagttcaagatgtgaatacaccggggcaacagttggagttattctaaaagtaaaaatcccacttgttggtgggatttttagtggaaaactgtttgctttttgtgattcaaattgattgtttaaccatttgattattagattataatgaatagtctactgtttccaatggttcaaagatactaaaatgaaagcaaatcacaaccctacatacttgctacaattacgtttattactgtttccaatggttcaaagatactaaaatgaaagcaaatcacaactaatatgtgatgaaattcttcattgggatgactgtttccaatggttcaaagatactaaaatgaaagcaaatcacaacttaggtagctagctgtggagaaagtgcttactgtttccaatggttcaaagatactaaaatgaaagcaaatcacaacgaaagctgatatttattgcgcttctgcctaactgtttccaatggttcaaagatactaaaatgaaagcaaatcacaacccttaagtttacggagcaaacggttagttaactgtttccaatggttcaaagatactaaaatgaaagcaaatcacaacgcttcgctatctgcgaattctttgtttccgactgtttccaatggttcaaagatactaaaatgaaagcaaatcacaactgtcggttatacttgttctcgtgtccacggactgtttccaatggttcaaagatactaaaatgaaagcaaatcacaaccgtctggccgatttacttaaacggttcaagactgtttccaatggttcaaagatactaaaatgaaagcaaatcacaactcggagacaaggtgtttgatagcgagggcaactgtttccaatggttcaaagatactaaaatgaaagcaaatcacaactagcagaagcagctaaaagattttacaacgactgtttccaatggttcaaagatactaaaatgaaagcaaatcacaacacctacgttgtaactctgtacgttttcactactgtttccaatggttcaaagatactaaaatgaaagcaaatcacaacagtttctgcaggacggtctgaattctttccactgtttccaatggttcaaagatactaaaatgaaagcaaatcacaacgtgtgtgcgtgtctgtgtgtatttgttttccaaagatagtgaatcttaataagactctctctgatttccctactattttgtatctttacacacttttctttatacatgagtactgactataaataaatcatattgtggaaataacccaacgcattcgtctcctcctttccgaaatgaaccggggagtatacgaaaaagaaactgaaataaacctctccctgctggcagctctggcaggcgagagcatcctgctcctgggacctccgggagtagccaagtcaatggtagccaggcggctaaagtcggcttttacagatgcccgtgcctttgaatatctgatgtcccgcttctctacgcccgacgagattttcggtcctgtcagcattagccgactgaaagaatccgacaagtatgaacgtgccatcgacggctatctgcccacagccgatgtcgtgtttctggacgaaatatggaaagcaggccctgccatacagaacactctgctgaccgtcatcaacgagaaacttttccgcaatggcgacaaggaactgcatctccccctcaaactgctcgtagctgccagtaacgaactgcccgctcaaggcgagggactggaagccctatgggaccgcttccttatccgcattctctgcacctgcgtcaagcaggaagagtctttctacaaaatgctgctggacgattctgccgaccatctggaaacgactgcctgcgaatggcaaatctccgaccgcgagtatgccgaatggcaagctgagatacgccgcgtaaccttgcctctcgatgttctttcctgcatcacagccattcgccacggactgacaagcgtagagatgcaagactccgacctgcgccgcaatgtctacgtcagcgaccgccgctggaagaacatcgtgaagctgctcaagacctccgccttcgtccacggccgcacggaagtctccatgaccgacctgcttcccgtctaccactgcctatggagtgagcctgatgagagcgttgccatccgtgacatcgttatccgtgccttattcgtgtcccacacaaaacagattgccggtatcgcctcctcgctgaaatccgatttgaaagtcagccgtgtgcgcgaagccctcgacaaagcccgccttgccggcgaccgtagggacgatgacctgctgataacggaacacttctactaccaggtggagaaacatggtacgggcaacacctacatctttatcgtggactacaaaaatctgaaggagtacagcgccaaagatgcccccaccttgggcgtaatgtatgccgaccccatcaatcccaagcgtaccatcatccgcgcctttgccgacaccggcgccgtgaaagaggaaggcaccgaacgcgtcaccctctaccgcgacgacaagcatctctacatcaacggtgtgcgcttccccatgcggcgtctgcaacgaggtgaggagcaacaactctggctgggaaacctctccgtcaccgaccgtgactacgagacggaactggacgccgccgccaccagcatagaccgcctggtaagagatttgtccgacaaccttttcgtctccgaagaagacaaaaagagcgtagctcaatacgtctccatcgtccgcaaggaaatagcctgggcgcgtgtggacatgcgcaaactgagatatggagacgaataatcctccagtaaccaagaagaagatgaacaccaccgtcacccgatatgacaccgccttctatgtgcaggcactggaccgttttgtagccaccggagagtgtgctgagacggataccgagcccttgtatgcctatctgctctccgtgatgaacgactccatggtcaaggtgcaggtgctgggcgatgaggtctgtgcacgtatcttttacgacaccatgattcagttcatccaattgaacttggagaaggagaggtacaacctccggaaaagccagtcggaacggaccgggatgaaactcgtgctggaatggtccatggcaaagcggaaagacggctggcaagccttgctccagcagatttccgacaaataccgggagtacggcttcgactcccgtttctaccgcagccacttcggcacagaaggaggatatgcggacgatgaagtctgggagaaaatggtggacgactgggaagacgccttccaactgaagatgcacgaagaaaaggagaaagagattgctttccgcaaagatgccctcgagcgcaggctccgttccaatctgaaagacatccccgagtacatccgccagaaccgggtggataaggacgaattcttccagacctggggcatgatgagcggcttgtggaatactgtcgactttgagcgtatacggaaaatcgtgcgcatccagcgctcttgccccgagatagtgaaagtggcccgcaagatggggcgtatggcagacgacgaaggacgtgagcaaatccgcgttgccgagggaaacgtctacaaaatggagcactcctctaaatgtgacatcctgggcatcagtaccggcaacgacctcaatgctctgcttcccattgagcttgcccattccgccgacagtgaactggaagatttgttcgtctacaaataccttactcgcaagctccagaccttccgttataaatcggaaatcatgcagcctgcccggcgcatcgaaaccaagcccgcccgtcccaaaggtccgatgattgtctgtctggacacctcgggaagcatggctggcaagccggagaagattacccactccctgctgataaagctcctggagatagccgaccgtcaacggcggaactgctttctgatagccttttccgtctccatccatccgattgacgtaaggaaagagcgggcaaggctgctcgaattcttctcaaagacagcttgcggggatacagatgccacccgcatgctggaagccacgttccaccttctcaaagaaggcaaggagtatatgaatgccgatgtgctttgggtcagcgatttcaagattcctcactcttcacctgcctttatggaggagattcgccgttgtcgggaagctggtacacacttctacggtctgcagattggtatcacggacaatgagtgggcaccattcttcgaccatatctatcgagtagaatatactccttcgcaacagtattaaaagttgatatttacgcctcccatcaccgtggctttcggcatggggaagcctgcattgatttcatagcgttgcgccagcaggttttcacccttgacgaagacgtcggcaaaactgcacagacggtagttggcacgcaggttccagagtacgaagctttcctgcttctccttacccggggtgaccgaggtatggagacccttcacgtattgtataccggtagacaggccccaacgtccttgcgtaaagtccgcaccggcatagagtttgtgctcgggagccgccagtaccggattctccatgtgcagccagctataattggcattcatctgccagtggcggttgatgcggtatccgaggttggtttccacaccccagttctctatctcgccggagttgacgttcttgcgcagggcagggtccgtcatgatgatgttgtccccgttgatgtagtagaggttcaccccataggacatggcccctcccaaaagctgccccgtaaaggagagttcatagttcatcaggctctccgctttcaaatcggggttctgtggagggaacatgtacatctcccggatggtggggttacggaatcctttgctcaccattgctttcagttctgcctgccgcggcagatggaaagccagtcccccttggggaatccattccgtgcctacgtgcgaatggtggtctatgcggacaccggcgtccagtgaaagccaactgttgatgtcctgcctgaaatccacatagcctgcaaattcatccatctgcttgtccacgccggggatgcggtcaccaatctgctgtccgggttttgcctcgtcgatggcgacaaccttgttccaggactctccgccgaagtgctggtaatcgaaacctacggtcaggcggttgccggtgaagagcgtggcgctttgataccacgatatgcccagcatccggtccttggagttgaagtgcgacttctggggctcttctccggggtggtagccgtcgttaatcctgtgccggccccagttatagaagaagctcacggcgccggaagtacggtcgtaacgattttccagtgcgaaggaggtcatgccgcgtgtgatgcgcgagtcgttgtctatatacggattgtcggcttcgccgggattggaggcgttgaagcgggtgatgttcacgtcgccccacagcttccaggtgtcgctgaagtcgtatcccagtttggcatagccgccatactgctcaaactccatgtcgtcacggtgtccgtcggtacggttgtacgagccggtcaccacgctgctgaaacgccctttcctcacgcggttggagacttccgtctgcagggtattgtaggaaccgtatcctatctgcgcattggttttcaccccgtcctcctgcatcttgcgggtgacgatgttgataaccccgcccattgcattggacccgtagaggacggaggcgggaccgcgcagcacttccacccgttcggccatcatgctctggtaggcgtcggcgatgggatgccccatcaagcccatgtattgcgggtgtccgtctatcagcaccagcaggctggttgtaggtcctccggcggcattcaccccggcgcctatgccgcgcaggctcatgcctcctgcggctcccgtggatacgccgtagcccatgatgccgcggcttgtggtgaaaagtccgggcacctgctcggtcagtgcaggcaggatggagggctggtaggtctgttccagttgctggcggcccactacggagatggtcattggcaggtggcggatgtctgtttcatttcttgtcccggtcaccacgacttcatcaagcttgtagcttttcagccggaggctgtcggcaggtgcggacagcatgccccctggcagggcaatacttattaaaatagccgttaaaatctttttattcatcgtttatctatggttctttctgcaaagttatacaaaaagaagaatctgtatatgattggtaatcctcgaaatgaaaacggatgtggaagataactccgttaaagggtttcctgcttcagtgcttccacaaaccggtctatttcctgcagtttcgccgggatgtcgatgccttgcggacagtgcgggttgcattggccgcaaccggtgcaacggttggcttggcggagacggggaacactgcggtcatagcctatcaggaaggcgcggcgtgcctcgcggtaattctcgtcttggctgttctgcggcacgttgccctcgttgatgcagcggttgtagtgcagcaggatggctggaatatccagcccataggggcacggcatacagtatttgcagtcgttgcacggcacggtggggtattgcagcattcgctgggcggtatcttccagtagggtaaactcctcttccgtacatggaacaagcggggagaaggtacgcaggttgtcttgcagatgctccatgtacgtcattccgcttagtacggtcagcacatcggggaaagtacctgcgaatcggaaggcccaggaagccacgctctcctgcggacggcgttgttttagacgtgccatcaagtggtcgttcaggcgggataggcgtccgcccagcaacggctccatgataacggcgggaatgttgcgcttcaccagctcggcatataggtattcggcatccgtgttgcgggtattcacttctttggcatgtcgccagtccacgtagttcagttggatttgtacgaagtcccatttcagttcgtcgtggcgggagagcaggtagtcaaagacttcgatgtctccatgataggagaatccgaggttgcggatgcgtccggcttcgcgctctttcagcaggaagtccagcatgccgttgtccagatagcgggaacggagggcttccatgccgcccatgccgatgccgtgcagcaggaggtagtcgatgtagtccacttgcaggtcgcggaaggagcggtgatacatggcaagggactcttcgcggctgtgcgtgctgggactgaagttggacagctttgtggcaaggaagaatttctcccgtggatggcgttttaaggcaatgcctgtggcgcgctccgacagaccttgcacataggcgggagaggtgtcgaaatagttcactccgtgagcaatggcatagtctatcaggtcgttcacggcttcctggtctatttcgtctccattcccatcggcgcgtttccgggtgggccatcgcatgcatccgtatcccagcagagaaacccggtcgcccgtgttggggttggtacgataggtcatcttgccggttggtatctcgcccagtgcggccgattcgctttccccgttgttcttgttgcccgaacagccgtatagggctgctgccgaggcaagcgttcctgcaccggcgagtttgaagaaatcgcggcggtttatcttgttcttattgtcttctttcattgtgataggactgaaattataaatggatattagggtgataaagttgcttcagacagttctgtgcatcacatggccttccacataaatggcactgaacggacgcgacggacaaaggttctcgcatgctccgcatccgatacagcgttcggcgttgactaccggtatcttgatggaggcttcgtcttccgggtctgaaggaaccatctgtatggcaccggccggacaatggcgggcacagttcccacattccatcttgtctgtgatgcagatgcaattctccttaatccatacggcatgaccgatttggacggccgatttctcggcgaggctcgtcagatggatggcatcggtaggacacacctccgcacacttggcgcattcggggcggcagtaaccgcgttcgtaggacatttccggctgcatcagttttgtcaagtccgaagaaggacggagcacttggttggggcataccgatacgcagagctggcaggctgtgcagtgttgtgcaaagtggcgggcgctcagtgagcccggaggagtgatgggagtggcgcgctcggggatttttttgtcctcgatgacagccagtccaccgtccactttcttctcctgcg

SEQ ID NO: 2136 - DNA, 24284 bp, synthetic construct
  source 1..24284: mol_type = other DNA
  variation 17224..17598: note = n is a, c, g, or t
  variation 15677..16907: note = n is a, c, g, or t
  misc_feature 1..24284: note = Synthetic
gaggaaattgatattgccaatctgatccgccttcagcagagagtaagagatcagcattcgttgcatgtgctaattcttgtgcaccacttaaaaaatcggcatgaatatgagtttcggttacatatttaattgttaaactatgtttttttgcatagtctaagtaagtgtcaatgtcccttttaggatcaattataatagcttccttattttcatttgcaataatgtaacttgcttgggccaatgtttcatcaaatattcgttcaaataatatatgttgtgcttttaaggcggtagaggttgtaaaaaaaatgcctaccaatatgaataggaaagttttaatataattgttcattataatttaaatttaataatcgaatataagcatttactagtctgaaaaatgtaacatatgttacaaaaggagtgatgttttaaagatacttttatacgttttagggaaatacttttaaagtatgtaagctcaagaatataactggggtaggatctactttttagagtctaaccctttcttgatagaagaattaaaaatggatcgataataacacctctattttcaaatatgttttggctattataacttcatgttgtgttatacaacagaaaaatctttatttttctgactcatttttcaacgtttttacgttttgccaagttccaccattgattacatttgtaaatccatgttgctctaaaatagctttggcttgttcacttctgttaccacttctacagaatacaacaattgaattatgattcctaaacttttgaagttggtttcccacttcattcaatggtatattgattgaacctttgacatgattttcaacgaattcagcaggtgttcttacatcgactaaaaaggcattattattaatacatgaaattaatttttcgttattatttcctgaaaacatattgattaattttttgaacatgattataattattttaaaattttactttgacatacgaaatctgtttttggaatagacgtttgagcaatagcatcaaatccaccttcaatttctgtaaagtttcgatatccgcgtgcttgtaaaatacttgctgcaatcatacttctgtatcctcctgcacaatgtaaataaaaatgttttgttggatcaataccattgatccaatcattgatagaagctaatggtttgctataggcgtcatttatatgttctgtggcatattctgtttctttgcgaacgtcaactattacaacctctttgcccttgatttcttcagcgagttgagaagctgtgatacgattaacaacatctatttctttctcagcatcaatccatgcttgaaatcctccctctagatgacctaatacatgatcaaaacctacacggcttaatcgtgtaacagcttcctcttcttcttcttggtctgtgattagtaaaataggttgattaacatcgacaatcatagctccaacccaaggtgcaaaatctccttttaatccaatgttaatggattgtggaataaacccttttgcgaaatcaatatttgagcgtgtatctaaaattaaagcagtactttgttctgctctattttcaaattcctcaatacttagcgctttcattccttgggataaaacatgatcaaaactttcgtatccttttttattcatagctacattcattccaaaataggcaggaggaggcaataagccatctgttacagcttctataaatgcttctttcgatggttgatttaaagcatagtttactttcttttgattacctaatgtatcaactgtctctttcatcatatttttaccacaagcagaacctgctccatgcgctggataaaccataatatcatctggtaaagagagaattttagtatacaaactattgtataataatccagctaaatcttcttgcgtcatattggctgctttttgtgctaaatctggacgaccaacatcaccaaggaataatgtatcaccgctgaaaagagctatttcttttccgttttcatcaaataataaataagaagtactttctaaggtatgaccaggtgtatgcaagactttaatccttattgctccaatttcgaagagttgattgtcttctgctataatcgcatcaaataatggattagctgtaggcccataaacaataggggcatttgttttttgactcaaatcaacgtgaccgcttacaaaatcggcatggaaatgtgtttcgaaaatatattttaattgtacgccatctttttctaaacgatcaatataaggttgcgtttcacgtaatggatctattattgctccttcaccattactttctatataataggtaccttgtgctaaacaccctgtatatatttgttctattttcataattatatagtttctattttgatagaacaaatttcataataaaatttaattcagtttgttacataggttacaatgcaatctgttgttttttaagcaggataaaagcatccttttcctcaaaaaatatttattcaaaaatagaggcaactaattcttaattggatgaattaacacttaatatttgtataataatatacttttatatgtttttaatatataaatatagtatacatttgtactattattaaggtttgaaataatatattaaaaataggattagccataaaataaataaattgagtaaaaaaggattattattagtgaatttaggatctcctaaatctacatcagtaaatgatgtaaaagaatatcttggagagtttctaatggatgaaagagttattgactataattggattttgagatctcttttagtgaaaggaattattctgaatacaagaccgtcaaagtctgcggaagcttatcaaaaaatttggacagatgcgggatctcctttaatagtagttactgaaaaaataaaaaataaattacaaaatattattgatattcctgttgaaataggaatgagatatgctgagcccagtatagaacacggaatttcaaaactagttgagcaaggtgtagacaaaattgtattatttccattgtatcctcaatatgctatgagtacaacagaatctgttattataaaggcagaaaaagttagaaaagagaaatttccatttgttaaaataaattatattgaaccgttttataaaaaagatatatatataaattgtcttgtagaaagtataagagataagttttcaaatgattttgatgggttgttattttcttatcatggtatcccggaaaggcatatttacaaaacagatcctacaaatacttgtaatttaagcgattgttgtgacagagaatttaatccaagtcatcaattctgttatcgacatcaatgttttgagacaacaaataaagtgatagaaaaattaaatttatctcgcgaaaaaacgattgtttcgtttcaatcgagattaggaaaagataaatggattgagccttatacagattctactctaaaagcattgccatcaaaaggaattaaaagattagcagttgtttgtcctgcatttgtatcagactgtttggaaactttagaggaaatagctatggaaggaaaagaaatatttcttgataatgggggtgaaacttatgaatatattccatgtctaaacgataatgattcatgggtacacgtaatcaagactttatgtgaggaaaaaatagatgatttttatttattataatctgtagacattcaacaatttatagctactaaatatacatgttaaacagtgattagtacaaatttttgaagatgtttcaacacttttaaatattaaagtttaaaaatgctatgaagctggtagattaaaattttgtatataagatttcgtacagtactttactttctatagagaggaggaggttaaatgcaatattttgttcattcgattagttttatgaatacagagaacaaatgaataaaattgtttaaggaaattggaacgaattaaagcacatttttattttaattaactgtgagaaatgaaaataagaaaagaatggttctgttaaaaaagaaatttataagagaaccatattcattttttacaaaaccataattatatcattacttttaattatcaacaacattatatttggaaacaaattgttcaaattttcggtctttatttatcaggattggaccgtgaccaaaacatataatagcaggattcaattttgataacttatgcaatgatttgatattaagctgctgatccgatgtgaagatgcttggaggaagctgtaagccggtcactgtcgttagcaggttcatatttgtcgcaacatctccgattattaatacaccatctcgttcgcgaaataaagaaatatgaccagttgaatgcccgggagtctctattaccttaaaatctccaatcttatcattttcgacaattgtttgttcaactttatgtccttgacctgcccaatattttttctgtaactttgctatccaatgttgaggagttgggtaatcatgggttaccatccctgtttcggttttaaaaacttcgccagggtgacagagtaagggtagttgaaattcagagcatatctgatcactacagccttgatgatcagcatgagcatgagtcagcaaatgtttgtgaacagttattttttgtaaaacttttttaatcatggtgtatgaatttcgtattcctgaatctaccaaaacaccttctataatataacagttaataccatttcgtggcatcagtgaaatctgaaatacctcgggagcaatttgacgtaacataattttttttcaaaactatattgttcacgagaactatataaggacatttgtcctataatacgttagatttgtatagttgtctttttgctcgtgtaagagatcgctgtgtgatacccaaatacgatgcaagatcctgagtcgttgtacgttttatcagcattggttcgttagataggatgtgaaggtatttttccgcagcagatttattattgtaattcagaagataacgttctttttgattaaactcttgctcaattactaattttataactccattccaagcatctagatgattaagtatatgctgataatcctggtaagttattgtatagattatgctatcttctatagttctgatactttttctagacttttcttgctttacaaactcaggaaatgaagtgataaattcattttcaaatttaaagcaggttatattttcctttccgtctttatcactagcgtatgcttttactgcaccatttgagataaaaccaatatgacgacagatttcattttcacgaattaagaaatcacctttttttaaatggatcttgttgaagaacttcatagaaaagttaatttcttcagctagtaattctcctgttgacgataaataattttcgaatacgttggtcattgcacaatcctttgattcattgatattctgctaaactgtctttgcatgacatgccaaagaacattcaaaactagcaaaaacagtgtatacttcacttaattagtacgtttaaatagtacgtttaaatttacactaatctctagattagtaaatatataacggcagataacgatgaatagtgtgtaataaaaaagcgataaacttataaaggatatcgcttgttaattcgttatatgtttgattataaatgttttttgttacttcccgatacagaaagtaataaaccttctgtttatgaggggtatagagtagcgaggtgtagtgatatttattaaataatttaacatattatagtaaaatatccatactaattttataaaaataattagatttattaattaaataatagatatgagatatataattttcatttttctgcttttcacaactgtagttggtgcacaattcaattcagaatattatatcaatcactcgaatgatactataaaaggggaagtaatgggatataattctaatgttgttcacttttttgtgaataacgatataattaaattaaaaccaaaggatatacaatcttttgtagtaaatgaagatgataaaaaagtgaaatatgttactttaaaaaataataaaaataatttttatgaagaagcagttgttggacctctgtctcattattatttaagaactgttaatcgttattacaatgaaaaactagtctattctttacttgtaaaaaatgatgaaatagtatatgttaacgcatcaaattcgaaaaaaagaatagctaaactaataagtgattgtccacaattactaaaagaatggacggaaactgataagtatcctgattatgatattattaaaattaccgaagcttataatgaatgtaaacgatgatttattcagtgcattatatagcactaattggtgccgattatattcaaaacttatattaaatcctaaaaagtgcatttagttgcactttccttgttttatattagatttattcctaaatttactataaaagtgcaatatatgacactattattaattgaacagataaaagaacgtcgtaaagttttagatattacacaagaaacattagctgaaatttcgggtgttggattacgaacactaaaacagtttgaaagtggtaaaggtaatccaacgttagaaacattacaaaagttatgtgatgcattaggattagaaattagattagagattaaaacgattgaataatgagaattgcttatattttgtataaaggtgaaaaggcaggggttttgactcagctagataatggtagttttcattttaaatacaatgaaaattggttatctgatgaatctaaaccttcaataagtttaacattacctaaaagtcaaatcgagtttgaatctgatacattgttcccgtttttttatcatttattacccgaaggtgtaaataaacgaatgatttgtaaaatgtttaaaattgatgaagatgatgcttttggaatattattacaagcatcaaaagtagatacagtgggtgcagtaacaatagaaagagtgtagaatgaatttagaattaataaattgtccgggttctttaaaagaaaattttaatacatatagtcccagcgtattaaaaaagatgtttgatggcagaaaagtaaatccaattttaaactatacttcaccagctgatcgaaaagataaaagcagctttaatcaaaatcaaacccatatttcaatttcaggatttcaggaaaaatattcgctaattcttgatggaaatgaattaagattgaccaatgaaaacgaaagtggacaatatattcttaagccaatttctgatttacctaaaaacagtgaacttgcaccagcaaacgagcatttgacgatgcaaatagctaaacaaatttttaaaattgaaacagcagaaaatgccttaattttctttaaagatggaagtcctgcatatataacaaaacgttttgataacgatgcaaatggagaaaaattagctgtagaagatttcgcttccttattaggtaaatcaccagcaacagatggtgaacaatataagtacgaaggcagttatttggaattatttgatgctttgaaaaaatatgttcctgcttggaaagtagaaacgcctaaattgtttacattaattgttttcaattatttattttcaaatggagatgctcatttaaagaatttttccttgatagaaactcaacaaggtgattttaaattaagcccagcttatgatctgttaaatacaaaaattcatattgatgattcagattttgctttaaaagaaggtttattaccaaaatctatttcaaaaggaaaaatcattgatcaattatttgtattgggtgagaaagcaggaatgacagagaaatcgataataaaaatcattcaaaatctaacttctaaaggagataaagtagaagatttaatctcaaaatcttatttatctgaaaaattaaaacgtaattatttacaaaattatcaacgaaggttaaaacggttaaatttagaattaagaaagtaaaggataaataaaatgtccgttattctacacaagttataattttttgtatgaaataacggacgtatattcttaaagtgaacttataattaattcttcaaattccaattttctcctttgtttcttgagtaatataattaaaataagagaaatacgtaaagctgattaggtaactataaccattttccaatatatttcattataagaaaacaataccaattaacaacactgatttaacttcgcaaacctttcatcttctgtaaaaatcttatggatattaaaagaagtaaatagtgatgacaaaaattgggatttacgtgatgcatcaaatggagaaataaaagtagagaaaggtttaaaagaaggttgggaaaaaacattcacccctgttatttatacaactttaggtattctaaataatgaagattggcatacaatgggagattttaaacttaatccagatttgatagactgcatgtaacaagtggcttatattaatataaaaaaaataggtggagggagtaatgcttcgtataatgaaattaaaaaaatttatgaagaaaataaggaagcattccatgagcaaattcaattgataaatccagatgttattatttttggaaatacaatgaattatttcgaagatggtatttttgataaaatgtttagacagttggatgtaaataaagaagatgataacttacatatttataaaaatagtcatcatctattattacatccttatcatcctaataatcgaagaatttctcaccaattatattgtgatacaataatcaatactgttcataattggataaagaataaagacaagtagaaaaattaagattataaaacaagcgataaactaaaagttcatcgcttgttttaaaatatgatatgttttttgttacttcccgatacagaaagtgataaactctctgttaatatgggatgtagtggagtgaggtgtagtattggtgtagtgatatttattaaaaatttaacatattatagtaaaatatctatactaatttttataaaaaaattagatttactaattaaataatagatatgagatatataatttaaatttttatactttttactactatagtcgatgcacaattcaattcagaatattatatcaatcattcgaatgatacaataaatgggaagtgattgaaaaagaggagtttgatgcgttctaaaaatcgtcttcaataatttcctgcacacgtccgatttgtccatccatcaaacgaacttttataccacgatgatggtaaggtgcagaagtcaataaatctttcactataccctcagtcaattcgctagttcgttgattctttttcaatacaatattaaccagcataccaggttttatatttgctcttgttttaccatccatattacaaatatcttaaaataaatggaaaagatattcattttatcgtaaatgaaattaaaaaatatattcatctggaaggtaaaaatgaaacgggattgaatatgaaatttataaattttaccttttattattttatttacaacccagctgaaaaatttgagattgaatatagaggttagaataacaaaaaaaaactactttcctttattggaaaaggatagaggcagaaatgataaaagaagaaatagggtttgttcgattgtccttcgacaacggttcggaaaaaggggtgctttgttgaacaaaataggggataagtgaagtaaaacaaacaggtttttatctgaaacggtagtttttttaatcttcttttacaataaaaatttagaattttagagagcggttttttgttttacgtaataagataaaaaaaccccgaagatagtcgaggcactaaatgttttcacaacggaataatccttattgtgagttcctttcaatacaaatatagatataaaatttttatatatgattacgtgaaaccataattgtgtaaattatttttgatgtaatttaatatgcaaaagaaaaagactcatggctaaaaatatacttggattagatttaggaactaactctattggttgggcatttgtaaaagaagctacaaatagcaatgaagaatcttctattgaaaaaataggtgttcgtgtaaatcctttgacaactgatgagcaaacaaactttgaaaaaggtaaacctattacaacaaatgcaggtagaactttagctcgttcggctcgtcgcaatcttcatcgatttaaacttcgaagagaaaaccttctacaaatcctgaaaacacataaatggattgataatgaaactattttagctgagaatgggaataaaacaacttttgaaacttttcgtttacgagcattagcagctgaaaaacaattggagcttcacgaattggttcgtgttctgtttcaaatcaacaaaaagcgcggttacaaaagttcacgtaaagtaaacaatgccgaagaaggttctttgattgatggtatggaaatcgctaaaaagttatgtcatgaaaatcttacaccaggtcaatatgttttggatttattaaagactggaaagaaaaaggttcctgatttttatcgttcggatttacaaactgagtttgatagaatatggaattttcagaagcaattttataatgaactatttacagataatctaaaagaagaattaaaaggcaaaggaaaagtagcgacttggacaattttaaaagtaccttttaatttagttggattaaagcgcaatttaaaacgagatgagttaaaattagagaattatcaatggcgaaatgatactttgtctaaccaattaaatttagaacaaattgcgattgttttgcaagagattaatggtcaattagctaattcttctggttatttaggtgcaatttcagatagaagcaaagaattatacttcaataaccaaaccgtaggtcaatatcaatatgctcagttacaaaataatccgcatgcacgtttaaaaaatcaagtgttttatcgtcaggattatatggatgagtttgaaaagatttgggaaattcaagcaaaaaatcgtgaaaatatatttaccaatactttaaaagaagaaattcgagatgttgttattttttatcaaagaaagctaaaatcacaaaaaggcttgatttccttctgtgaatttgaacaaagagaaataattaaagatgaaaagaagaaaacagttggtttacgtgtcattccaaagtcagtacctttatttcaagaattcaaaatttggcaaattcttcataatataaaactgaaaaataagattacaaatgaagttgtgcttttaaatgaaaatgataaaagttttttattcgaagaattagatctaaaaggaaatctcactgcatctgaagttttaaaattgttagttgataaacccaaagattgggaaattaattatgcaagtttagaaggaaatcgtaccaatcaagcgctttataacgcttatttgacaattctggataacgaaggttatgatgtgcgcgaagaactgaaattaaaattgaataaagacgatattactttggctgatattgacaaatcagcttctggaattaaggaaatggtacgagctatttttaatcatttaggaattaaacctgaaattttagattttaatgcagagttagaaggaaaagcttttgaagagcaactatcatttcaattgtggcatttgttatatgcttatgaagaagacaattcgccaaccggaatggatactttgtatcgattattggaacaaaaatttggtttcaataaagagcaagctaaagtaatggggacagttgcctttcaagatgattatggaagtctaagtagtaaagcaattcgtaaaatatatccttttataaaagaaaatgaatattctgtagcatgtgatttagctggatatcgccattctaaaaactctttaaccaaagaagaattagaaaatcgtgaattaaaatctcgtttagatattcttccaaaaaatagtttgcgcaatcctgtagttgagaaaattctgaatcagatggtaaatctagtgaatacaatcattgatatagaaaatgataaattggaaaaagctggaatgaaacgaaattttcaatttgatgaaatccgtattgaattagcacgtgaacttaagaagaatgcgaaagagcgtgaggaaatgaccaaagctatgaatgcaggaaaaattaaacacgagaaaattattaatattcttcaagtcgaagatggaattaaatttccaacgcgcaatgacattatccgttataagctgtatcaagaactaaaaaataatggttacaaagatttgtacaccaatcaatatatcgagcgaaaagatatttttacgaaaaaatacgatatcgagcatattattccgcaatcacgtttgtttgatgatagtttttcaaataaaactttagttccgcgccaaatcaatttagataaaggaaataaaacggcttacgattatatttttgatgtctttggacaagataaattaaatgaatttttgatacgttcaaaagctttgtttgatttaaatgatgagggaatttcaaaagctaaatacaagaaactaacaatgaaaggttctgaaattggcgaaggttttattcaaagagatttacgtgattcacaatatattgctaaaaaagcgaaagaaatcttgtttcaaattactaaatcggtgctttcaacttctggttcagttacagatcgtttgcgtgacgattgggatttggtgaatgtaatgaaagaattgaatttggagaaatatcgtttggctggcttaacagaaatgcaaataacaaaagatggtaatccgaaagaagccatcaaagattggacaaagcgtaacgatcatcgtcatcatgctatggatgcactgactgttgcatttaccaaatttagttttattcagtatttaaataacttaaatgcgcgtagaaacgacaaatatgatagtatttcaaatgcaaaagataaaaaggctattgatacaaatagcttaagaatttcgagtaaagatgcattaggaattgaagaaaaagaaacgcataaaataaataatggaaaaggaaattataaacgtgttttcaatgagcctattccaaatttcagacaactggcgaaggaacatttagaagctgttttagtatcgcataaagcgaaaaataaagttgtaactcgaaatatcaataagacaaaaggaagtgataaaattcaaattgctttaacaccgcgaggacaaatgcatgaccaaacggtttatggttggaatcgatggtcaagggtagatttatctaagaaactatcaaaaattgaaatcgaagcaataattgatttaaaaaaaaggcaatttattaaggattttatatctgaaaaaggaagtatttctaaagcttttactgatgaaaatcttgctaagcttatatttaataataaatctctaaaagaaattgaaatatccattccttgttatactcaaaaaatagacttaaataaagtattaactgatacacaaaaaacaatttcagcgaagaagaaagtaataaagaatattttggatctaaaagttagagagaaaataactgaaagattggtagattataatggtgattttaaaaaagcattttctgatttagatcaaaatccgatttggctgaatgaagaaaaaggaattgcaataaaacgtgtaacgatatcaggagttaaaaatgctgaagcattacataccaaaaaagatcatttaggaaatgatatttttgatgaagatggaaataaaattccagttgattttgtgagtacaggaaacaatcatcatgtagctatttacgaagatgagaaaggtaatttacaagatagagtgatttcattttacgaagcagtagctcgtataaaccaaggtttaccaatagtagataaagcctataatcatcacttaggttggacatttaaatttacgatgaagcaaaacgaaatgtttgttttttcatcagaagattttaatccaaatgaaattgatttgtttgataggaaaaatcagactttgataagtaaacatttgtttagagttcagaaattttcaaaagtagaatatggtaattccgcagtaagagattatgtttttagacatcatttagaaagtgttatttctgacgtaaaagaattacgagataaaacatataaagtttttaaaagtttgggagaatttaaaggcttaataaaagtccgaactaatcatttgggagaaattattcatattggagaatattaaaaatgtaaacatatgctaaaacgtaccatttacattggtaatccatcttatttgaaattgaaagacaatcaattgaaaatagaagatgtggaaaacaaagaactaaaaggttctatacctattgaagatttgggttttttggtattggatcattatcaaattaccttaagtcatcaacttatagtgacgttgcagcaaaataatgtggcaattattagttgcgacgatagtcatatgcctttagggttgatgttgccaatgaatggacatgtagagcatagcgagcgattgaaacatcaaattaatgtttcggaacctctgcgcaaacagttatggaaacaaacgattgaagctaagatttatcagcagaaagcattattaagtaagtttggttatgtagaagagccaatgcaaaattatttaacaaatgtaaaatcgggagattctactaatatggaaggaattgcagcacaatattattggaaacaattatttgaaaattttacgcgtgaaagagatggagatgcaccaaataattttttgaattttggatatgctattttacgaagtatggttgctagagctttagttagttccggattaaatcctacaataggtatttttcatcgcaataaatataatccttattgtttggctgatgatataatggaaccgtatcgaccttatatagatgaattggtcttagaatgggtaaataaaccttttcgtcccactgaaatgagtaaagatgctaaagggcatttattacaaattgccacaaaagatgtgaaaatagatggtttgaaaagacctttgttggtagcgattagctctacaacaagttctttatacaagtgtatgataggggagcagcgtgtgattcgttttcctgaaatgacatgagttttagtcgttataatgcttatcgtattatgtgggttttagttttgtttgatttgccaacggaaacaaaaaagcaaagaagtcaagctactcgttttagaaaagagttgatcgacgatggatttactatgtttcaattttcgatttatttgagacattgtccaagcaaagaaaatgcagaggtacatataagacgaacaaaatctaaattgcctgaatttggtaaagttggaataatttgtattacggataaacaatttggacaaatggaaatatttttttccaaaaaagaaaccgatttaccaacaggtccacaacaattagagttattttaggaataaaaaaatccgatagaaaactcaacttctatcggattttactttttttctcatttctaaatttcatctcaaacccttttatattgaggacttttaaaatgaggttgtaactacttacgtaaaattactaaaagtgaaaggaactcacaacnnnnnnnnnnnnnnnnnnnnnnnnnnnnnnnnnnnnnnnnnnnnnnnnnnnnnnnnnnnnnnnnnnnnnnnnnnnnnnnnnnnnnnnnnnnnnnnnnnnnnnnnnnnnnnnnnnnnnnnnnnnnnnnnnnnnnnnnnnnnnnnnnnnnnnnnnnnnnnnnnnnnnnnnnnnnnnnnnnnnnnnnnnnnnnnnnnnnnnnnnnnnnnnnnnnnnnnnnnnnnnnnnnnnnnnnnnnnnnnnnnnnnnnnnnnnnnnnnnnnnnnnnnnnnnnnnnnnnnnnnnnnnnnnnnnnnnnnnnnnnnnnnnnnnnnnnnnnnnnnnnnnnnnnnnnnnnnnnnnnnnnnnnnnnnnnnnnnnnnnnnnnnnnnnnnnnnnnnnnnnnnnnnnnnnnnnnnnnnnnnnnnnnnnnnnnnnnnnnnnnnnnnnnnnnnnnnnnnnnnnnnnnnnnnnnnnnnnnnnnnnnnnnnnnnnnnnnnnnnnnnnnnnnnnnnnnnnnnnnnnnnnnnnnnnnnnnnnnnnnnnnnnnnnnnnnnnnnnnnnnnnnnnnnnnnnnnnnnnnnnnnnnnnnnnnnnnnnnnnnnnnnnnnnnnnnnnnnnnnnnnnnnnnnnnnnnnnnnnnnnnnnnnnnnnnnnnnnnnnnnnnnnnnnnnnnnnnnnnnnnnnnnnnnnnnnnnnnnnnnnnnnnnnnnnnnnnnnnnnnnnnnnnnnnnnnnnnnnnnnnnnnnnnnnnnnnnnnnnnnnnnnnnnnnnnnnnnnnnnnnnnnnnnnnnnnnnnnnnnnnnnnnnnnnnnnnnnnnnnnnnnnnnnnnnnnnnnnnnnnnnnnnnnnnnnnnnnnnnnnnnnnnnnnnnnnnnnnnnnnnnnnnnnnnnnnnnnnnnnnnnnnnnnnnnnnnnnnnnnnnnnnnnnnnnnnnnnnnnnnnnnnnnnnnnnnnnnnnnnnnnnnnnnnnnnnnnnnnnnnnnnnnnnnnnnnnnnnnnnnnnnnnnnnnnnnnnnnnnnnnnnnnnnnnnnnnnnnnnnnnnnnnnnnnnnnnnnnnnnnnnnnnnnnnnnnnnnnnnnnnnnnnnnnnnnnnnnnnnnnnnnnnnnnnnnnnnnnnnnnnnnnnnnnnnnnnnnnnnnnnnnnnnnnnnnnnnnnnnnnnnnnnnnnnnnnnnnnnnnnnnnnnnnnnnnnnnnnnnnnnnnnnnnnnnnnnnnnnnnnnnnnnnnnnnnnnnnnnnnnnnnnnnnnnnnttttcattttctattttgttgtaactacttacgtaaaattactaaaagtgaaaggaactcacaaccttatcattgttctcatctgcaattctgtagttgtaactacttacgtaaaattactaaaagtgaaaggaactcacaacaaatttggctactgttacggacttacgccggttgtaactacttacgtaaaattactaaaagtgaaaggaactcacaaccccttttggtttttgatttgctaattcttcgttgtaactacttacgtaaaattactaaaagtgaaaggaactcacaactaccataacctaatttannnnnnnnnnnnnnnnnnnnnnnnnnnnnnnnnnnnnnnnnnnnnnnnnnnnnnnnnnnnnnnnnnnnnnnnnnnnnnnnnnnnnnnnnnnnnnnnnnnnnnnnnnnnnnnnnnnnnnnnnnnnnnnnnnnnnnnnnnnnnnnnnnnnnnnnnnnnnnnnnnnnnnnnnnnnnnnnnnnnnnnnnnnnnnnnnnnnnnnnnnnnnnnnnnnnnnnnnnnnnnnnnnnnnnnnnnnnnnnnnnnnnnnnnnnnnnnnnnnnnnnnnnnnnnnnnnnnnnnnnnnnnnnnnnnnnnnnnnnnnnnnnnnnnnnnnnnnnnnnnnnnnnnnnnnnnnnnnnnnnnnnnnnnnnnnnnnnnnnnnnnnnnnnnnnnnnnactaaaagtgaaaggaactcacaactcttctaacaattgatatatcgaatcaacagttgtaactacttacgtaaaattactaaaagtgaaaggaattcacaactcaattggttcgtcgtataattttaacattatctaaaactcaaatcgagtttgaatctgatcattgttcccgttttttttcatttatagcctgaatttataaaattttttatttggtggtatcattttatctacacgcaaactaataatagattgcagaaaaaagaaattatagatattcctgaaagtggagatttcggttatctgataactgagtaatattactgcatataataacttcgggtcgataaaaaactataacagaggttatgtaagtttttatatttcaaaatttgtacatatatttgtacgtaataaaatacataattatgttaatagcaagtgtttcagattttagaaaagatataaaatcttatttagatagagtttcaaaaaattttgaaactttaattatcaacagaggaaaggattctggtattgttgtaatgtctcttgaagaatacaattcattgatggcgacaaactatgaattatcttctcgtatcaatgaatcaagacttgattcagccattgaaaaattaaaaagtaatcaatctttcgaaaaagaattaatcgaagaataaatgaaatatatattcgtagatgaatcttgggaagattatttgttttggcaaaaaacagacaagaaaaaagtaaaacgaatcaatgatctattaaaagacatctctagaacaccttttacaggaatagggaagccagagcctttaaaacataagtattcgggtttctggtcacgaagaatagatgatgaacatcgtttaatatacaaatatgaagacgaacaaatacttattgctaaatgtcgttttcattatgattaaaatataaaattcatgctaatatgtatggattttttttatgtataataatgtttatgttaagtgaaatattttaattgaaagtataaattaaagaactttgtaatctatagaatgtctgacttaaaaaaatgtaaaattttaaatatataatcaaaatttcaactaattaataatgtggtattcaaaggttgtatttgtctgttatttcccgatacagaaagtgataaaatctctatttataaggggtgtaggggagagaggtgtagttttggtgtatcgaattttatcaaaaatttaacattaagtaacactatttattcacataaaagtaataaatagtgttatttaatgtcttaaattggttaatatctttttagttttaaatgatttgaaaaaaattaagcataattctcaacttttctaatgtaactttttacatcagttataaaatcagttgttagaaatgagtcatttatatattcttttttacttgtctccttaggtaatacaatatcttttaattcatggtttaatagaaaaacattttctattgctaataaattaatctctactatataattagcatcttctatttgagttttgtttattgctttatccaactcaatttttgctttttgatattcgtcaatataatatattagattatctaattcttcattaattcttccacttgtcataatttatgtttttggaaaaggtacactattattattacactatctcttttatctttaattataacatatatataacattaatgcaaaataatgatcgtaaattaaattatcattctataaattacaatccctaaatctgtttacatgacattaaatgtttaaaatgaaaattttaaattatgtttaatgtttcttactttatttaaaagttaatcgattatagaatagtttattttaaatgcatatttggcttaagttttattttaaaaacaataaaagtattttgtttaacaaaatagggtagaagtagagaaaaaactgtgaggtttttatttaaaatggtagttgaaaatataaaaaacatctatcctaaaattttaggatagatgttttgcaaaaacaaattaagatttggcgtaatacaatttgaataatagtagaattattataaaccaaaacattaaaaagagtggataatataacaagagtgaactgtctatataactcataataaatgttatgattcctacaatggaataataatagagtcctaatatagctcctgaaattcctaaatgatcggtatggtttattaaagcattactcaagcatactggtagcatacaagatagaccaaagaagataacaaatacagacattaataggaaactgatgactaaggtagaataagataaaaggaatgaaattgaaatcatatacagaattatccctaataagaagattaaattgcctgtgaaaaggatttgttgatttgttttctttatactcatctttttgcaatatttagcaccaaaaaaactagctaaagcaacaatacaacctaaacagccatattgaatcatgctaaatttaaaatactccataaaaataaatggagcctcaccatagtaactaaaaataattccatttagaatacctataaatcctccataaatccaaaaaactttatcatttataatcttttttgtgatttgtctaaaacttagtttaagcttcttatcttgttgtaatgtctctcttaaaccgaaagatgaccaaaataatgcaaccgttcccaataaaatcaacaagacaaataccatgtaaacatcccatatagaagctacaatacttcccaatagtggaccaattgcgggagaaaaagctaaaacagctgatatagtgctgaaaacagcagttcgctctttgttattaaaagtatctcttaaaatggtttgacttacattagaaccagcagcagctcctacggcttgaacaaaacgcgcaaataggagagcgacaaaattaggagattgtaagcaaagatatgaaccaatgatatacaagactattcccgttagcatagaggattttctaccaatgatatcagagagtattccccaaagtaaaacacctattgcaaagcctataaaataaatgctaagtgttttttgtatttgatgattagaaactccataagctgtagacaaaaatgtaagagaaggagtataaatggtttcactaatctgtggaaacccaactaagaatataattagccaaataaatgacttattttgatttttcatttttataaaaattagataatataaaccctgtcgaatgcaataaaagcatccgaataataaaatttaggctcgaaatgtgagcttaaataagggttttatcaactaatttttaaatagaaaaacatctcttaataaataatttgagttgcaaatatatgttattaaaaagaataaaaaaatataaaaagctcttatcaatacgaataagagcttttaatttataatttgattcgttctaaaaatagtcttcaataatttcctgcacacgcccaatttgtccatccatcaaacgaacttttataccatgatgatgataaggcgcagaagtcaataaatctttcacgatgccttcggtcaattcaccagttcgttgatcctttttcaatacaatattaaccagcataccaggttttatatttgctcttgttttaccatccatattacaaatatcttaaaataaatggaaaagaaattcattctgtcgtaaaggaaattaaaaaatacattcatctggaaggtaataatgaaacggtagttgttttttgattctctttttcaataaaagttgaaatttatattttttgagagcggttttttgcttttacgtgaaaatcgtaatttattgtgagatggttgttgtatgtttggaataatataacgaaaaaaagctatattttgcttcgcgaaaaagaatgttatatgccatttgaaaaacagaagcaacaatgaaagaaaaacttagaaaagctgtagaagacaaagacaaacaaaaacttattaagtgtctaaactttgacaatttaaataagtttgacagcaattgtttcgagtatcttgaaaaagccttatatatggtttatagtattaaagttaaaaatatagccaatgcttccaatttatgtagtttaaagttttagatacataaatttagaaaataggagtgtaatatttttatggttttacataattgacttcaaatacctacttgctctcaaaataggacgataaactcataatacgttcgttatttgccgggttaatgtatttcaggaacatgtgttcgctactatgtccggtggcctccattaataggggtgttggaatttttccgtaaaaattacttgcaaaacttcttcttccgatatgactgctgagcagttgccatttttccagtattagttcttctacacgatgtcctattcgtttttttccttttattgtacagtttaactcagccacttttgcaaccagccttatctctttgttgtattgctgaatatccattgtttttgggaaagaattttgatttcttttgagaatgttcattacaataggatgcaaaggtagaataatctctttttttgttttttgctgggtaaatttaacgcaggtcttttcgttaattgtgattaatttttcctggtcgaaggtaataaaatcagaaaaacgttgtccggtataacagctgattagtaaccagtcttttgcagcttgcaaatcgttcggaacctttgtttttttaatcgtcgagatttcctcttcattgagagttgtcatggttttctgttgcttttcgcgtcgaatttcaatctccctgatgttggttctgatacctcttctttctgcaaaatttaaaatagtcttgacaaaatgaatggtacgatataaggtattatcgctgtacttttcttctcttccaaattttataaattcagtaataaaatgactgttgatggtgtcaacgtaaagtctttgagtagcatatccttcaaaacgttctaataaccttaaaaaaacattatatcgtttataggtagaatgacaaataatatcctttctgaaagaaatataattttccataaagcgtaaaagcgcattctcaggcaattgtttttccttgttaatgcaaacttcttttatttcttttgaaagttctctttgaagtggaattttattaagatctcgtttaaatagaatatgctctgtaacctgcaatttaattttatccaatttcctatttaatctcttaaattttttcaaataaatattacaaggacgttgtttttgagcatcccactgatcagaagtaatgcgaagagaagttctaaaagtgtactttttattttgggattgatcaattaatgaaagatggatattttttacatctccattatccggcaagaaaaaattaaatgtcattcaatcagatttaataaattaataatgaacgaatttaacaaaaaaaagtagtccttcatagactactttttatgcaaagatattctttttctttaaaaaagcaaatagttgaaaaatactgctttaagaatcattttttacgtcttttattttaaagctatataggtttagtcacttattaagtgtttattttcctgtaaatcaaaaatctagtttattgtattggatatcagtgtaatgtttaaatagtctatgaaggactatttataaaacgatcaccaaacaatttaaaattatgaaaaaacatttaatcattttgatgagcttattttcatcggtttctctattttctcaggtaggaattaatacagaaaatccgcaacaacttttccatacagatggaaagtcatctgcagctacaacaaatccaactactggaacccctactgttgcacaacaagtagatgatgttgtcattaccaatcaaggtagaataggtataggaactattgcaccaactgaaaaacttgaagtcaatggtaaaacaaaaattaatgatctacctgttaatggaacaggaggttttacagcaactagaacattagttgcaaataataatggagtagtaggggttttaaatggattacctcctggagcttatgatggatataatttaacaggaatgcaagagtatgtatcatcaaatgctacttcaagaaattatacttataatcaaattgtaagtacaaactgtcataatgcagatgggacaccaaatgctaactctacaatgtgttatacgacttcaggattaagtgttaacccttcttattcaactactttcaataaagctagtacaagtaatgataaatacatttttttatcaatagattattctttaagaacacctacgataggtaatgttgttccaagtaagagtttttgggtaaattatgatattgaaattcttataaacggaactagagctaaaatttactctgcaaattatagtataccttctggagcaagtacaacatttgatggtaataaaattttcacaattaatttaacaggtataactataaatccaacaaataatacgttacagataaaattaatacctacgagaagtttaataaaatcaaacgctggtacagcagaaggaaattttgcaacaggtaatgcaactgtgatgactacttcagttaaagatgtttcgtttttcctttatgaaaaataaagtataaatgaattacaaa

SEQ ID NO: 2137 - DNA, 24284 bp, synthetic construct
  source 1..24284: mol_type = other DNA
  misc_feature 1..24284: note = Synthetic
agtagttccatctccaagttgtcctctgttattctctcctgtaccactgataaaaccgtcttggttttttgctaagacatgaagaaatccagtcactattttatcggtatcagaggatgttccaacttgggtgaatactaacacatttgttgagctgtttgtgccattgcctaattgtccttcgttgcttctacctgtactccaaagggtattatcagatttaatagcgtaagaaaaccattgacttgctgaaacctctttccaattggtatcggtacctagctgaataggtacgtttgcaatcagtggtaatgttccggttccaaattctccacttgtattcgtcccccaagcccataatgttccatctgtttttattgcaaatgaatgtccattacctgcgtctattttttgccagttggttgcggtaccaatttgagtaggaacaagtctagcaatatttgttccatcacctaatcgaccattagggttataaccccaagcccaaagtgttccattagattttaatgccaaactatgagaatgtcctgcagaaattaattgccagtcagtatctgttcctatttgagtagggacgattttatttatagttgagttatctcctaactgtccgaaattattttttccccaagcccataaagttccgtctgtttttagtgccaaacaaaagtcatcagaagagcttatagtttgccaatttgtgtcagttcctacttgaataggcgtgtgttgagcggttgtggttgtacccaaacctaaatcgccatcagaattccaaccccaagcccaaagtgtaccatctgttttaatggcaaatgaagaagaaaaatttgcacaaacttgttgccaattagtgtcgaacccaatttgtgttgggatggttttggtctgactgcttccgccacctattcctaatttccctgcagtattagcgccccaagcccaaagagtcccgtcatctttgatggctaaagagtgattgtaacctgcgctcatactttcccagcattgtgctgataattgtactgtcaaaaaaaataatagaatggtaactgtttttttcataatttgtttttaactgatttgtacttaaaaaatagaataaaaatctaccttttagtgtttcatcaatatttttgggtttaatagtggctatagtttgtttttaactattttgattgtttttacttctttattgtcatttttcacttttaccaaataagttccgacagccaaatttgaaacgttgatagctgtttcacttgcattaattgattttgaaagcacttcctgacccaataaattgtatattgtcactgatgaaattccctgttcgaatgaaatgtttaaaatatcattcactggatttggatatacttttacattactgtttttggtaatactattatcaactcctaaattgttagttggacatgctatagaggttaaggtgattctatcagttgcggtaccatcacctaatcgtccttgaccatttaatccacatacttttagtgaaccatcagtatgtaatgacaaggtatgaaatgctcctgccgatatttgtaggtgattattagaattggttaaactcacccaatttctattttcagttgttccgatacctaattgtccgtaaacattttgccctgttaatagcatgtttccaaatgttgttgttcctacagtataattccatccggcatcaatactttgtacttgatcgtaaaccgcaacaggcgttgatttgtttacataagttccgtcacctaattgcccatatacattgttcccccaagtcataagaattccatttgattttcttcccacagaatgatagtatcctgctgctacatttgcccaatcgttttctgatcctatttgtgtaggaactgataaattggttgttgtgccgtttccaagttgaccgtataagttgttaccccaagtccaaagtgtaccgtttgttctgatagctaaagaaaacccggatcctgcggcaactttttgccaattagtagctgttcctacttgattgggtacaattttgtttgttgatgtaccatcacctagttgaccgtcattatttaatccccaagaccaaagtgttccattgtcttttattgctaatgcaaacccttcacctgctgcaacgctattccagttggttgcaataccaatttgcgttggcgtcgttctatttgtagtacttccaatacctagttgaccgaagacattatttccccatgcccaaagtgttccatcagtttttatggcaattgtaaaaccaccacttgcagaaacgctttcccaattgctcgcagaacctatttgagttggtgtatttctagctgttgttgtcccgtcacctaattggccataaccattgtctccccaagcccacaaggtgccatctgtttttattcctgctgaatgggtgtaaccagcactaactgtttgccaacaagctgatgcagctgcgggtgtggtaaatgaaccaccgtaagcccactcactttgactgttaacacaatcagaagcaacccaccagtaataagttgtatctggtaataaatcggttagcactacatctgatgacaaagtatttccatccatcccaccaatcgttggcgttgtgttatatacatataaataccctccgtttggtgccgatgtagaaggtgtccaaccaattacagctgatgttgcagaaactacttcacttccaaaattagttggcgggttacaagaggatacatttgtacacgttatcgaacgaactctgcttacattttgtgacccacaatttgcattggtatgcaaaaagtaacggataacaccagatgttgaagctgaactccacaccaacggggttatgccactcgccaaaaccgtgcttccattgtcatttgtaattgtaatgtgatctgtagcaacagagcttgtaaatgtatattgtttattggctaaaatatttacgttggcatattctccagcccaagcatttgtcacaatttgttctgcctgtcccgagcaatttggcgtaaaagtaacatctggatataagccgtaatttgcactattacaagttagtgctgcatttgtagtaaaacttccaccagcaacccaagcacttttaacaccattacaattagaccgaacccaataataataggtggttgatgattgtaaattatttaccgtactaatatttgtaacattactagtgtggagcgataatgtagcaggtatcggagttgtgctgtaaatactaaaaaacaactcataggaagctgctgctggcgttggtgcgttccaagtaaatcggcacgaattagaagtaatgtttgatacggctaaattacttggcaagccgcaactagcttgagcaacacattgaatatatcgtattctgttcgtgttttgtgaatgacaacttgtgttcgcatgcaaataatagcggattactcctgaagttgaaccagaagaccaagttaaaggagttggtccacttgctaaaattacatttgaagcatttgtaattgtaataatatcagttgtaaaagaacttgaaaaagtatattgatgatttgcgtttacgttaacatttgtatattctccagcccaagcatttgaagcgattgtttcaatagttcctgaacaagctggtgtaaatgtggcagcagggaaaagcccatattctgcagtattacaacctgataaattgttggttacaaaattcacagctggtgtccagttactttttgtagcgccacaatttgaccttacccaaacataatatgatgttgcaggggttaagccactggctatgtttacgctggttgttgttgaggtataacttggtgtagttgtagcgattggggcaacattactagttgacaaatacacctcatagcctgaacctggagttggcgatggtgctgtccaaccaattaaacacgaagtggctcctaagttataaattgtggtattggttggcacattacaagttgatgcttgtaaggtgtaaaactctccaccataaacccaattagattgttgttcaccacaaacagacgccacccaccaatgataatcagtatttgatgttaaattttccaaagaaattgaggtagaggccgttgcatcttgaattcccccaattacgttagtggtattgtagcgaattacataactatctggagctggcacagccggaatccagttaagcgttgcggtagttgaggtattattgttaaaccacgtttgtgttggcgcgttacaggtggatgcagcaggtgtcattttagttaaacctaattgtaaagttcctgcccaaatagtcccgttagactgtgttcttaaagtacttatataattgtcaggtaagcctgagtttgcagtgtaagaaatacaatcgctaaaattttgcaaaccttcaccttgaaatgcaatccaaactttgttgttattatttacatccaaagcgtttagttgatagccaccaagacaagaggtgctttgataatatagttcataaacgccaccatttatagtgtaggtcattaaaccatcaaaagcatcaagataaatggtgttgtttgctattttaagtattttttgtacgccatcagttatgacattaaaatcagttccgttgaatttatacaataaatttccggtagttacccaaacaccgttattattatcggttgcaacagaattaatgttggtcaatgcactataagttgtccacgttgttccgttgaatcttgaaagtccgtttgcagttgctacccatagattatttaaaccgtccaccgcaatatcgttaattgtattgtttggtaatcctgaattggatgtggtgtaattggtccaagcggttccatttaaacggctgattccgctggattgtgttgccatccattttctattcagtccatcgatttcaatttttactattgcattagaaccaataccggaattagcagtattgtagttggtaaaagttgttccgttaaaagcagaagctcctgaatacgaagcaatccacaataatccactagaatccactttcaggtcgccaatatagttgcttgcgatgtttgagttagaggtattgtatgtggtataattgtagttttgagcgaagctcgaaatagatacaagtgtaataagaaacaagtaaagttttttcatattgacaaaatacagttaaatatttaaggttttttttggatagttttaacaaaagtagcaagtttataaaaatcaatcaatttatagttactactatttataaataatcgagatattcaagccggtttatgatattgataattagtgttttaagagctgttttctgtcttgtcaatataataattgagtgagagtccagtttgctttttgaacacacgaacaaatgtattggcatctttatatcctacctcttccgccattgcttgcaaggtatatttacgaaactgtggcgaatctttaagtttttgaagcacatattgaatacgtaattcttgtgtatattcagtaaaggttttttgcattgactgattaaaatattgtgacaagtaggccgtattggtatttaatttttttgcgactaatgctaatttaaaattcggatctaaaaagtattctttttcctctagtttttttaagcctagagacaatttctcaacaagcttgctatccatagtctgccttaaaggaggttcaactgtaacggcagatggttcaggcatcaccatttttgcaccttttaaattttgtataatatttaaaaaccgggcatgattttcttgctgctttttatagtaatgataaaatccatacacaactaggattaaaacaataagtatggcaaataataatattttgatgtgatttttagattgaattactttattagattctgcctctataatttctaaatcatagttatgcaaaaagtttaacgatttactcttaatggcttcaattgaccgaatcaattctaaacttttttgagcgaaagagtaggcttttcgatggtcttttttttcttgataacattgggtcataatgttgtaagccatcaacaaattttccttagaaacctttgtattttcataactctcaatatatttctgaccataaaataacgcggaatctacttgcttcaaatgatgaaaacagtctgccattcctaaatcaaataattgcagcgttcttatatgttcctttattacaggaaattttactcttgttcggtataatgacatagattgctcataatctcccgccaaagcagcgctctttgctttccgcatattgagcaaagcttgggtatattcaggttgaaaatgggcttcaagtagcatttttgcggattcatcaaaatagttgtttgcagaatctagaaattttttttgcggagactgtacataataattttgatacgcttcaccaataatattgtatttatccgcaaataattttttattcatcgcctctttttcacccacacctaattttaggtgtggcgttgtcaacagctcttgtttcaagaggctaatgccgttaacgtaatcgccagttgctactttaataaggccgtattgttcattaaatttgtttcgtggaacactatttttgtatttctcaaggtaaaataatgcagtatcgtattcgcctaaatttttatggatataaaaaagcttattcaccgccatccccagtaattcttgataaaccgcacccgatttgttctggtttgctttttcaatgttttcaattaacgttagcaaaagggttttagaatgattaaaatcggatttattgtaaaaataattggcgatgtaatagctcccataaaaacgaaacagctcatttttacatttgctaatttccaatgcttcggcataggctttttcgggattggaaataagatattcttgaatatttcgcgttttaattatttctgcttcgctcaattcttgagcattaacgctattagtcgatagtattatcaggattaaaataaaaatacgcattttagaaaagtgggggttctttattgcaaattatcgtgtgctaattaacaacaattctacattataatgaaaattttttttcaaaataaccagttcattttgacttttattgtgatatctgaaatatattgaatctttatttataaagtacttattcaaaagtacactacatttctttgcccccaaaaaaaaaccaaccgttgttgctatcttaaacgcaaaacagttggctgaatgtcaatcaatacccttgatttttgaggtcaaatagtagcttcgtttggctgagtactttctttgtaattaaaatataaaaaagcttcccgtccaaattctctcgccaaaagcaaatccttatcccgactgctgatgctgtcaattgcggcattgatgatattttccgaatgctgcatataattgtcaaagtccgcctgactaacatctgccaaaacggtgatgtaggttgcatcgtcaatttctttagccgtaaaatcttcttcgtaattaatgcttccatcgtaaggttttatactttcgagatggaacgtttttactttcaatatttcgttcacaatctcgttgtatttttcggtttggggatctgctaattgcaaatgctctaattttttatccatttttatttctacaagtgcttccataataacatagtgttttacctaaaattactgaagatttttattatgtaaaaaaaattaagaatgatttaagggacttttttggtaattatcagtatctcaattcaatatcattcttaaatctgtctataaaaatgatgtaagcctttcagtagtatttataacccctaaaataaaaatcaggtttaaatttactaaaaaaatagattgtgtcatggtcatgattaaagatttggatatattaaaggaagcgttttataacgaaggcgtgagacttgcagaagaaaggggttttattagtttggaagaaattaccaatcatttccctgatgtggatcaaaccacggagcatttcattgtttttatgggtgaactatgtaaagggtttgacagcgttccaaaaaaataaatcaattgccgtatttcaactgagtaaattatcaactgaacgatttaataagatgtttaatgtttttaattttcatttgagaatattagcgatttcactcttaataaacaagtcattataattcgataaatacaacggtcaacatgcataaaattttaaacaaattagtcatcgttttggcggacgatgatatcgacgacattcaaatttttgaagatgccattggcgctgtgattgagtactatgaatttcatttttttaaaaatgggatagaacttattaactatttatccaatccacaacataatcagccggatattttatttcttgatcttaacatgccacttatggggggatttgaagcattgaggattattcgggaagagctgcatttagccggaatgattgccatgtacactacatcttcacaagagcaacatgtatctcgagccttttcaggaggtgcaaatttatttgttaccaaaccccgcgatttttctaaattaaaaaatttgctgcacaaaattttgataggcactatcgaattcggaggcgcggtaccttacgttcggtcgggttaatgctttatacaaatttacaatctatccctttttaaataaaatatacaattataaaaatccggctatgcaaaaggtggcaaacattgagagattgaaatacgaattttacgatgaaggcgttcgaatggcaagggagcacggatttatcagcctagatgaattgcgtacaaaattctatgagctggaccaccacgacccaatttttattgaactcattgccgaactttgcaatggttttcagagtgtggaatagaacaaaaaataccgccgaaattttagtttttcgcttttaacttctgaattataaattagcctccaacctacgattaagtcttttaaaatactagccgttttgcgttttgatagtttaaaacaacttcctaaagctaaacaaaacaccgaatgttattaactcgaacattatgctttctagtcgttaaacctaatggaattacaatcaagctaatcgtttgtgaattttataacagtgaaatcagtaaaaatattcttctgcattgtgaattaccaaaattacttgatccactaatagaaaaaatagtagtggcatattactcttttaaataggtatcatttttttttttttttttagcaccaaaaaatcacgaaattttatggcataaaaaaagccccgaagatagtcgaggcgctaaatgttttcacaacggaataatccttattgtgaattgctttcagttgcaaatataaataaaaacttttttaatcggtttacggaaatccgtaaggaaataaaaaatcttcatcgtaatatgcgcgaattatagatttatagttaaattttcgaacgaattaaaacttattaaagaaatagttcaaaaaaatatattgtctaaaaaaagcaaaggaagacattgaaagaggaaagcaattcacagctcatcaaatgaaatacttgtttttttaatgtaaaaacgttagtgtctcatcgatgaaacattcgtcttcctttgcttgcaatacaatgtataaaatataattaatgaaaaaatattctattttttgtaactctaatgtggtcgaaattatcaattttgatctcattgctatgcaaaggtagaaaataaattttataaacaagtatttttttgatgaggatttgttatttactattaaatgactaaatttgataaaaattcaggattaaatcataatatgaattatcggctgtgactaatcacaaagataaaaattttgatggcaattcacaactaaaaaaatattaaaacaattaagaataaagctatgagtaacaatatattgggattagacctcggaacaacatcaatcggtttcgctcacattattgaaggcgatacacctgaacaatcttctattaagaaaataggagttcgggtaaatcctttgactacagatgaacaaacgaatttcgaaaaaggaaaaccggtttctgtgaatgctgacagaacattaaaacgtggagctagacgaaatcttgaccgttatcaagacagaagaaaaaatctgattgatactttattgaaagctaatattattaccaatgaaactattttagctgaaaacggtaagaatacaacacattcaacttattttttcagagcaaaatctgcagttgaaaaaattgagaaagatgagttagcaagagtgtttttagcaatcaataaaaaacgtggttataaaagcagtcgtaaagccaaaaatgaagatgaaggacaaatcatagacggaatggcggttgcgaagagattgtatgaagaaaatctaaccccgggacagctggcatatcaattattaaaagaggggaaaaagtatttgccagatttttaccgttcagatttgcaggcggaatttgataaagtgtgggattttcagaaacagttttatccagaaattttaactgatgaattttacaaagaattaaaaggaaaagggcaaagagcaacttctgcaatgttttggtcaaaatatggtttcaataccgcagaaaataaagcaaaatcaagggaagagaaaaaacttcaagcttatgcatggagaagtgaagcgactagcaaacaattagaaatagaggaggttgcctatgtgattaccgaaatcaataataatcttaataattccagcggatatttgggcgcaatcagcgatagaagtaaggagttatattttaaaaatcagaccgttggtcaatatttgtatgaacaaattaaagcaaaccctcactcaagattgaagaatcaggttttttatcgtcaggattatttggatgaatttgaaaaaatttgggaaacacaagcggaatttcatcttgaattaaccgaaaaattgaaaacagaaatccgcgatattgttattttttatcaaagaaaactcaagtcgcagaaaggtttggtaagtttttgtgaatttgaaagtaaagaaattgaaatcgataaaagcggacaaaaaaccaagagaaccatcggcttaaaagttgctcctaaatcttcgcctttgtttcaggaatttaaaatctggcaggttttgaacaatgttctggtaagaaaaaaaggaagtaggaaaagaaccgtaaagaaagagattgaacccactttatttgatgaagaaaaggagatttttgtttttgatttggaaactaaacaaaaattatttgatgagttaaacatcaaaggaaatctaaaatcagcaaaaatcattgaacttttgggttataaatcttctgactgggaaatgaattattctgaattggaaggcaacagaaccaataaagttttgtatgatgcctatctgaaaattttggaattagaaggttatgatgaagatttgctgaaattgcaaggaaaagatgatattgatgtttctgaattgaaagcatctgcttttgaaatcaaagaaatggtaaaacgtatttttgaagtattaaacatcaatatcgaaattttagaattcgatgcggaattggacggaaaagatttcgaaaaacaagcttcttatcaactttggcatttgttgtattcgtatcaggaagatgattctaaatcaggaaatgacactttgtttcgacttttagaagaaaaatttggttttaaaaaagaacattctcaaattttagcaaatgttgctttttctgatgattacggaaatttgagtgccaaagcaatgcggaaaatttaccctttcatcaaagaattgcattatgataaagcgtgtttgcaagcaggatataaacattccgcatcttcattaaccaaagaagaaattgccactcgtccgttaaaaaatcaattggaattactcaaaaaaaacagtttgagaaatcctgttgtggagaaaattttgaaccaattggtgaatgttgtcaataccatcatcgaaaccaacagcaaaaaggacgaacacggaaatataaccgagtattttaagtttgatgaaattcgtatcgaattggctcgtgaactgaagaaaaatgctaaagaacgagctgaaatgaccacgaatatcaatgcttcgaaaattgaaaacgaaaaaatcagaaatacgattataaaagattttccgcatatcaaaaatccgagcaaaaacgatattgttcgttacaaactgtatcaggaattagctttcaatgctttcaaagatttgtacaccgatgaaaaaattgactacgaaaaactgtacagcaaaaattatgatatcgaccacattatcgctcaatctaaagtttttgacgatagtttttcaaacaaagttttggtttcgagacaagccaatttagacaaaggaaacagaacggcaaatgattatatggctaataaatctccggaaagttatgagaaatacaaatcaattgtagaaactttatttaaagagaaaaaaattacaaaagccaaatatcaaaaattattgaaacaagaatctgaaattggtgatggtttcatcgacagagatttgcgagacagtcaatatatcgccaaaaaagcaagaaatcttttgtatgaaatctgtcgtgtggttactccaacaacaggtagtgtaaccgataaactgcgacaagattgggatttaatcaacattatgcaggagctgaattttgagaaattcaaaactttaggcttaactgaaatggtgcagaaaaaagacggcagttttaaagaaagaattgtggattggagcaaaagaaacgaccatcgtcatcatgcaatggatgctttaacagttgcatttactaagcaaagtcatattcaatttcttaattttttaaatgcaagaaaagatgagaatcataaactacataatgcgatagttggtattgaaaataaagaaactacttggatttatgatgaggacggaaacaaaaaaagagtgtttaaatcaccaattctcaatttcagggagcaagccaaagaacatctggaaaacgttttggtttcgcacaaagcaaaaaataaagtagttactaaaaacaagaacaaaacaaagacaaaaaacggtgagaaaactaaagttgaactcacgccaagaggacaattacacaaagaaaccgtttatgggaaataccaatattacgtcaataaagaagaaaaaataagtgcgaaatttaatgaagaaactattcaaaaagtaagtaatcctatttataaaaaacttttattgaaaagactttcagaaaacggaaatgacccgaaaaaggcttttgcagggaaaaatgtcttgagtaaaaatccgatttatctgaacgaagaaaaagcagaaacactacctgaaatagtaaaattaacttggctcgaagaagattattcgattcggaaagacattacaccagaaaattttaaagacctaaaaaccatcgaaaaagtattggatgaaggtgtaaaaagaattctcaaaaatcgattggaaaaatttgaaaacaatccgaaaaaagcattttctgatttagataaaaatccgatttggctcaatgaagcaaaaggaatttccatcaaaagagtcacgatttccggagtaaaaaatgcagagtttttacattataaaaaagatcatctcggtaatgaaattttagataaagacggaaagaaaattccagtggattttgtgagcacaggaaataatcatcatgttgccatttaccgagacgaaaaaggaaatttgcaggaaaaagtcgtgtcattatttgatgcggttcaattggtaaatgcgggagaatccattatagataaaaattacaatcaaggtttaggttggcaatttttatttacaatgaagcaaaatgaatattttgttttcccaaatgaaaaaacaggattcaatccaaaagaaatagatttattagatccgaaaaacaagaaaaaaataagcccaaatttgtttagagtgcagaagttggcaactaagaattatatgtttagacatcatttggaaacaacagtagatgataaaaaagaattgaaaaatatagcatttattcacattcaaagttgcaatttattgaaagatattatcaaagttcgtctcaatcatttgggcgacattgtgaaaattggcgaatattaaacttaaataattatgatcacccgctccatctacatcggcaatcccgcttatcttaaactaaaagacgagcaaatgtacattctttgtcccgaaaccaaagaagccaaaggaaaagttcctgttgaagatttgggattgctgatgttggatcattttcaaatcaccatttctcaccaactcattcaaaaaatgatggggaataatgtggtggtcgtgagttgcgatgcacatcatcttccgcacggaataatgttgccattgtatggtcatactgaacattccgatcgggtaaaagaccagttggaagccagtgaaccgctgaaaaagcagctttggaaacagacggtggaatgcaagattgaaaaccagaaaaatgtcctgatgaaactggggaattattacgaaccgatgattgaatatcagagaaatgtaaaatccggcgatataacgaatatggaagggattgcggcacagcattactggaaatacctcatcagtctggactttttgaggcagcgttttggagattcacccaatcagtttttcaatttcggatatgccgtgctcagaagcattgtcgcaagagctatcgtagaaaccggacttttgcctgttctcggcatttttcataaaaataaatacaatccgtattgccttgccgatgatttaatggaaccttatcgtccgtttgttgatttactcgtgatgcagtggctaaaaattcatccggaatcaagcgaagcgtatcttgaccgtagggaaaaaaccgaagaactgacgaaagaatttaaagcgcatattctccagattgcgaccaaagatgtgcgtatcgatgacaaaacaagaccgttgctggttgccgtaaaaacaacggcttcgtcgctttacaaatgttacacaggagaaaagcgactgatttcctatccagaattgatatgaatgccgaaaggtttaatgcctaccgaattatgtgggttttagttttatacgatttaccgacggataccaaagcagccatgaaagatgcaaaccgttttagaaaaagtttgttagacgacggatttacactctttcaattttcgatgtacgtccggcattgtccaagccgagaaaatgctgaggtacatatcaagcgtgtcaaaaacttgcttccaaaagctggcaaagtcgccattatgagtatcaccgacaaacaatttggcgacattgaaatcttttttgctagaaataaagaaaaaccaaaaaccggaagccaacaactcgaattattctaaattttgatttctattataaaaaataaccttctgaatttcagaaggttattttttgaggttgcgattaatcacgaagataaaaaaaattgaaagcaattcacaacatatgatttcggcaggaattaggaattttggttgcgattaatcacgaagataaaaaaaattgaaagcaattcacaacatgcttataaatttatgtttaatcaaaaaggttgcgattaatcacgaagataaaaaaaattgaaagcaattcacaaccaccggcaactccacttattacaaaggatggttgcgattaatcacgaagataaaaaaaattgaaagcaattcacaactttgattttttagtttaacaataagaagccgttgcgattaatcacgaagataaaaaaaattgaaagcaattcacaacaagattatgcgttgttgaaatcgtgggaaggttgcgattaatcacgaagataaaaaaaattgaaagcaattcacaactaagtggtgttgtactcacctctaacgtcggttgcgattaatcacgaagataaaaaaaattgaaagcaattcacaacacccgcaagtgaagttcgttcaatattagagttgcgattaatcacgaagataaaaaaaattgaaagcaattcacaacaaaagttgcaatgccattttgttaagttcagttgcgattaatcacgaagataaaaaaaattgaaagcaattcacaacttcactaagttctttacatacatcatatatgttgcgattaatcacgaagataaaaaaaattgaaagcaattcacaactccagaatgttttgctttgctaccagcaaggttgcgattaatcacgaagataaaaaaaattgaaagcaattcacaacaggcaaactatcggtataatcgaaaggcacgttgcgattaatcacgaagataaaaaaaattgaaagcaattcacaacagtttaaattacttcaaatgactaaagggagttgcgattaatcacgaagataaaaaaaattgaaagcaattcacaactatcgggcaacaaaatcaatatcactatatgttgcgattaatcacgaagataaaaaaaattgaaagcaattcacaacaaatatcttcaatttaacagtgaagaatgtgttgcgattaatcacgaagataaaaaaaattgaaagcaattcacaacccaaaccaagtcataaacaaattgaattaagttgcgattaatcacgaagataaaaaaaattgaaagcaattcacaacagttacgaaataggcaaaatatacaatcatgttgcgattaatcacgaagataaaaaaaattgaaagcaattcacaacttatttaaaataacgcttattattcattttgttgcgattaatcacgaagataaaaaaaattgaaagcaattcacaacttagcttaattttagaaaaaaccggaacaagttgcgattaatcacgaagataaaaaaaattgaaagcaattcacaactaaacctctttgagtgattaatactttcacgttgcgattaatcacgaagataaaaaaaattgaaagcaattcacaaccaagcaaaaacagtattataatcaatccctgttgcgattaatcacgaagataaaaaaaattgaaagcaattcacaacccgatgctaagattgaatagcttttacagtgttgcgattaatcacgaagataaaaaaaattgaaagcaattcacaacaagttttacctcagcccaagaaattaccaagttgcgattaatcacgaagataaaaaaaattgaaagcaattcacaacaatttataaaatcgttttgggtattttttagttgcgattaatcacgaagataaaaaaaattgaaagcaattcacaacgcagggtcgtacgagtaattattagttgaagttgcgattaatcacgaagataaaaaaaattgaaagcaattcacaacatcaaatactatttgtctttcgtttttagtgttgcgattaatcacgaagataaaaaaaattgaaagcaattcacaactaagattatagaagtcgcatttttattttcgttgcgattaatcacgaagataaaaaaaattgaaagcaattcacaacgaatggggaagataacctatatccttacgagttgcgattaatcacgaagataaaaaaaattgaaagcaattcacaacatataatccaaacaacagcaaagtaataaggttgcgattaatcacgaagataaaaaaaattgaaagcaattcacaacaagtagcaattttaccgaagtaagtgccaagttgcgattaatcacgaagataaaaaaaattgaaagcaattcacaactttcttagaaatttccttacattttgaaacgttgcgattaatcacgaagataaaaaaaattgaaagcaattcacaacgaacgtgtcataataacagtataaggacttgttgcgattaatcacgaagataaaaaaaattgaaagcaattcacaactaacgcttcaaacgtacgattcagacctaagttgcgattaatcacgaagataaaaaaaattgaaagcaattcacaacaatccagttgctagtattattttttgtatagttgcgattaatcacgaagataaaaaaaattgaaagcaattcacaacgcgtataaaaatcagttaataaaggaaatagttgcgattaatcacgaagataaaaaaaattgaaagcaattcacaactacgacagataataagattataattaatgggttgcgattaatcacgaagataaaaaaaattgaaagcaattcacaacgctaataatctaccgcaaagggttttagcagttgcgattaatcacgaagataaaaaaaattgaaagcaattcacaacggcagcaacgatgttgttaactggaaatgtgttgcgattaatcacgaagataaaaaaaattgaaagcaattcacaacccggaacaattgtctccagagcaaaagcttgttgcgattaatcacgaagataaaaaaaattgaaagcaattcacaacgctcaagattatcgtttattctaagatttagttgcgattaatcacgaagataaaaaaaattgaaagcaattcacaactcgattatcatttcttctaattttttatgagttgcgattaatcacgaagataaaaaaaattgaaagcaattcacaacttgtgaatggtaagcctgtgcgtgaacttggttgcgattaatcacgaagataaaaaaaattgaaagcaattcacaacactcgtttgagtgggttttattaaaaaggggttgcgattaatcacgaagataaaaaaaattgaaagcaattcacaacgaggaaagcgcagtattattatcagcttttgttgcgattaatcacgaagataaaaaaaattgaaagcaattcacaacgacaagacgtgccatagacttctcttgattgttgcgattaatcacgaagataaaaaaaattgaaagcaattcacaacaaaacacaatccatagtctatttcttttaagttgcgattaatcacgaagataaaaaaaattgaaagcaattcacaactttttcgatattcgtttataaatcttttaggttgcgattaatcacgaagataaaaaaaattgaaagcaattcacaactttgattttggaacacctttgtaagctagagttgcgattaatcacgaagataaaaaaaattgaaagcaattcacaacgccatacctccctcaatctggtcttgttgagttgcgattaatcacgaagataaaaaaaattgaaagcaattcacaacgcaccgttcttttcggctattgcttttcgtgttgcgattaatcacgaagataaaaaaaattgaaagcaattcacaactacttcaaaccctgataatgaagaagatgagttgcgattaatcacgaagataaaaaaaattgaaagcaattcacaacgttgcgcttcttcggcaatagctggatttagttgcgattaatcacgaagataaaaaaaattgaaagcaattcacaacagcgacattagcccgctgaaattaaaatatgttgcgattaatcacgaagataaaaaaaattgaaagcaattcacaactaaccaacaagacgggattatcgtaaaattgttgcgattaatcacgaagataaaaaaaattgaaagcaattcacaactaaattatagttcataaaaaacagttaaacgttgcgattaatcacgaagataaaaaaaattgaaagcaattcacaactaggctcgtctaagtaaactattgttgctagttgcgattaatcacgaagataaaaaaaattgaaagcaattcacaacgtttactacacagcttctattgtggaaactgttgcgattaatcacgaagataaaaaaaattgaaagcaattcacaacaagggttctgctggtatttggcggtcgtaagttgcgattaatcacgaagataaaaaaaattgaaagcaattcacaacttattcttgttcctgcaaaaaatacagacagttgcgattaatcacgaagataaaaaaaattgaaagcaattcacaacttacaacccaaacaatagcaatataataaggttgcgattaatcacgaagataaaaaaaattgaaagcaattcacaacttacttatcgcttttcttgcaatctcatctgttgcgattaatcacgaagataaaaaaaattgaaagcaattcacaaccgaaatggcaattgatttggctgtaagtgggttgcgattaatcacgaagataaaaaaaattgaaagcaattcacaacccgattatcaagagcctatttggaaatttagttgcgattaatcacgaagataaaaaaaattgaaagcaattcacaacaagtcagaaagtggagaattcggaaatatggttgcgattaatcacgaagataaaaaaaattgaaagcaattcacaacaggtctattactttcacgagttgttgtcaagttgcgattaatcacgaagataaaaaaaattgaaagcaattcacaactctaaactaaattgtttagattgtgcttcagttgcgattaatcacgaagataaaaaaaattgaaagcaattcacaactgaccacttccaatcctgtcgccacctaaagttgcgattaatcacgaagataaaaaaaattgaaagcaattcacaactctatttgtgccgtttgtaaagcaatattagttgcgattaatcacgaagataaaaaaaattgaaagcaattcacaactttgcctattccgggactacataatactttgttgcgattaatcacgaagataaaaaaaattgaaagcaattcacaacttgaaagttagaatcatatttaaaattttggttgcgattaatcacgaagataaaaaaaattgaaagcaattcacaaccattggattaactcgctcaaaatcgcttttgttgcgattaatcacgaagataaaaaaaattgaaagcaattcacaactaccttgtagttcgttcattttttcagaaagttgcgattaatcacgaagataaaaaaaattgaaagcaattcacaacttaacagatttagcaatgttagcaatcgttgttgcgattaatcacgaagataaaaaaaattgaaagcaattcacaacatatttatttccctcaatcactttaattgggttgcgattaatcacgaagataaaaaaaattgaaagcaattcacaacacaaaaaaccaagcaatagaaaaacttcgagttgcgattaatcacgaagataaaaaaaattgaaagcaattcacaacaggttgcggcttcttacggttgccgctaacgttgcgattaatcacgaagataaaaaaaattgaaagcaattcacaacaaaggcgctgcttacagtggagacgacaatgttgcgattaatcacgaagataaaaaaaattgaaaacccgatggcgcggactggaaaaacaacaacaacattgataacagtaggctctgttttaataaataagaaattgattaactagtttgaacttaacacacccctaacccctctcgagaggggaattttgcggaagtatttaccaaatgcaaaacattcaacgactccaaataaaaatattatcaggagttaatttttcttaaatttaccttttggagaaatcggagcatcgcggagattcaacgaacaccgctgaaaaattaatacgtgtgagctaaacgatggcggaacaacatagttttaccgaagactatgccaacccgtttaagtttaatggcaaggaactggatgaagaaacagggatgtactactacggtgctcgttattatgacccgaagattagtatatggatgagtgtggatccgttggcggagcagtttcctgagtggaatccttataattattgtatgcagaatcctgtgaaatatgtggatcctaatggcaaggctcccttggatataatttatgttaattctgttggaaatgtatataaagtagttaaagatggaagttcagccattacgataaatgatggtggaaaaattaaaagtatttctgattatcagatttccaaaaattccaattggtttgacaacaacaatagaaatagacaagttgttgctagtatagcatcttattatggaagtaagcgggggataaaaaatatcggagcaacttatgaaatgtctggattagcccattatgatcctaaaaacaagaatatttatatatcaccgtcggaatcaaacggtggttcatcaaaattttttaatgatttaaataatttgacaaacgtacttgttcacgaaaataagcacagaaaagatcatgctgacggaatagaaaccagttatataacgcacgcagaagtttatctttttcagatgtctgattctagttttcaaaatactactcctgattttgctgagagcacaatggaaagttttgtaaattatttaaagtcagcagattattataaagaggcaggatctaataatctcatagaaagttttaataaattaaatattaaagggggatatcgcatggaaaaaagctctggtagcattcacttatacgatcccaaagggaatgaagtttggattgaaatgacagaaattatgaaagacccacattaaatatgaaaaattttaagtttacaatttttatcataacattaatttttagtattagtagttgtgaaaacaaaacagaactagagagaagatttattacaggctgttgggtttatcagccgcatagagcttctggtccttatagatttctctcttacatgcagttttatgaaaattacacctatcgtaccttctattggggaagtaaaatggaaacagtaaaattcgaagggaaaaaggaaattaaggagtggtcttattctgaaaaagacagtttactagccttgtctacggtagaatttaaagttcttgaaataaaaaatgactccatttcgttactgaggctggatgatggtacgagaccgagcttatataaacatccgaactgtggattggcagattctcttagtttgaataaaaactaatttgcctgatgacaaagatttttatccatgccccttgctggcgcgagcgaaatgtcattaaattagtaattaaacaattgatgttttgctactccaatggccaaacttgataaatgcgtaatattctatgactcctgagggcgcggatttgtaatccgtgccaaataaaaaaataacacattgataacagtaggctctgttttaataaataggaaattgattaactagtttgaacttaacacacccctaacccctcttaagaagggaattttgcggaagcaattaccaaatgcaaaacattcagcgaacaccgctgaaaaattaatacgtgtgagctaaacgatggcggaacaacatagttttaccgaagactattctaacccatttaagtttaatggtaaggagctggatgaagaaacgggcatgtattattatggtgctcgttattatgacccaaagagtagtatatggatgagtgtggacccgttggcggagaaatatcctagttggaatccttataattattgtatgcagaatcctgtgaatttagtggatcctgatggaagagatgtggtgccatggcatataagcaaaagaaagcatgctactaaaggctatcatgcttacagttttctacaagctatgaaagaattcaccaaaacgtcctatggaggaggttttattaaggaattcttgaaaaaagatcaaagcatttatggtgttgaggcgcaaaaaaacggcaaattttcggacgcaattcttaatgtttacgacgtaaagattaaaaatcttcaggaacagactgtattcatgggaggtattggagcggaaggcataacccgtttttcaattaataatgaaggcaaactggtagtggatttgtttatagatagccatactagttactctgaacaagtggaaactattacgcatgaacttgcggttcatgcagaaaaagtggattatataacaaaagtaatagaacaatatggggtagaaaaagctaaagaatattttcgcttgggaaatattacggataaagatcatgaagctttgaataaaaatgatcagtcgcatgaaggcgtaaaacaatataataacgtaagacgagaattatcatcaaatcccgaaattaaaaaggcattcgatcgagccgctaaacatcg

SEQ ID NO: 2138 - DNA, 24281 bp, synthetic construct
  source 1..24281: mol_type = other DNA
  misc_feature 1..24281: note = Synthetic
  variation 16243..18308: note = n is a, c, g, or t
ggatgggagtataccgtttataataaggcggattatcccatttttacccaggattctatgcaaagggcccgggatgtatgggggtttatgaaatatgataccctgggccgtctgatcatgaccggggaaactgccagtacttcccaaagagctgttctggaagcattagccggcactcaaaacaagttgttcgaggttcgggataatgccaaatcctggggatacacgaataccgctatccccactgttgtaactgctttgtttgtggtgcatttttatgacgactacagttttttaaacagtacagtaaatacaaacccatacgcttctttgttcaatgttcctaccggaacaaacccggaggaagtaagcgctataaagggatttccaacgatcaccgttaccaatgtgttggatagcgcaacatatttatacgttgctacctattatgatgccaaagaaagggtaaccaggatcgtgaagcagcacttgcttaacggggcagatgtaaccagcaatacccgcaactttgcaggagaggtaaccagtactacccgtaaacattatgccaatggcaatacaactgccccggtagttacggttacaacaatcaatcagtatgatcatgcgggaagaatcctgaacaccatagaaaagataaacacccaggctccggatacgattgcctatgcctataacccactgggacagctggagcagaaaaaaattggcaaccaggcaattaatacagcctacaacgcccgtggctggatcagaaatcagtcctcctcattatttacactggaactgaagtatgacagtgctgcggctgccgttaataaacagtataatggcaatattggccagcagctttggaaaagcggccccggtccccaaacccagcgaacgtatacgtatgtttacgaccgtgccaaccgtattaccagcggtaccagcgacgaagggtataatgaacaggggatcacctatgataaaatgggcaatataacggcgctcacccggccccaaaatagcgctacctccattacctataattacggtgcccaaggtaaccagctgcagagtgtaagtggcggttataccaggggctatacttacaatggtaatggaagcgtggcatccgtgacggggacaaaccctttgacaattgtttataatgcattaaatttaccgggaacggttaccggggcagcgtctgttggctatgtgtatgatgccgcaggaaacaagctaaagaagataacggcgacagaaacaaggtggtatatggatggtattgaatatattgccaactctgccgcccccagcccggttatagatcttttacatacagcagaaggtgttgcccgaagaagcggcactacttacaattatgagtacttccttaaagatcatttgggtaacaccagggtggtatttaataaggggggaacggtgctgcaacagacggattattacccatttggattggacattagccgttctcaatcaacacccaataagtatctttacaacggaaaggaaaagcaggaagaattgtcacaatatgactatggggcaaggttttatgatccggtgatcggaaggtggcatgtggtagatcggttgtcggagaagatgcgccggcacagtgtttacaattatgcatttgataatccgatacggtttattgatccggatggaatggagagcaccgattgggtaaaaagagggaataactggacttatgataagaatataacaactcgtaggcaagcaatagaagctgggtgtgatgattttgcaagggacggtactactgttcttagaaatgtaaagattgcaggcagcgataaagtgggcaatgtatggttacaggaaggcggcaaggcgagctatgttgctgataacttttcggttgtatctgcggccgaaccatctgatataccagataattttgttacccgcggaataagttcactaaaggttggaatagctaccttaggctctgccgtcggtggctatagcaaaactgatgttactgatttatggggcaatccaacaacaactgatcaaagaatcggggatggattagcggcggtgggaacattacttccttctgcagggttattaggaacaagtactaatgggggatttaaaacgtttgcaggaacggaaaaagcttgggcttcaggagcaacacccaactcgatttatacatatttaagcggcgatggaaaatttgctgtttcaaattatatatataatgcagaaggaaaggtgatgttccaggtagactttggaagacataacaaaattttttcttcagggcatggtcacaatatgagcataccgggtaatttgggaagtgggcatatgagccatatgccgtgggaacaggttcctttgaattattttaaaattcctaaaggcgtacggtattcaactcctataggtcaataataatgcagatatgttagctgaaataataaacaagtacgaaaaattttctgatgccttaattataggaatcgaatatcatccgaatgatgctacaagaactttagaggttgtgatcagatgcatgaataacatgaatggtcatcaatttgaaacaattaaacttatttttacagatgtaaaattagttcagttttttgaagttgaaaatcaaagcagtactctaataaatgctgcacttatagctgataataatggtattattacctttgatttttttcctttaatatatgctggttcagagttatttgaaaatgaaaattctgatttcaaaatcaagtgtaaaaatgtgagctatacacaaatagagcagccaaaataatgacagattgaaaaatgttttattttgtgggtagaaagttctttgatttttgatctcctacctggcaggggcccttagcagtaacgggaaaccggataaaaaaatatgtagagtacgatcatttgaggaacaccagggtggtatttaataaagcgggaacggtgctgcaacagacggattattatccttttgggctggcaatccaacgctatttaggtgtacctaataagtacctgtataatggcaaagagctacaggacgagttggggttagggcagtttgattttgaggcaaggttctatgatccgcagatcggaagatggcatgtcttagatcccggcagtgaaaccatgcgtcggtggtctccttataattttgcgtttaataacccaattaagtttacagatccggatgggatggctcctgtgaatgagtatgacatcatctacgacaagtcaacaggaacgacgacgactgtacaaacagagacaaaaggggggaacgaaacagattatatcacctacaaggaaaaagataattcgattggatatgctcgtactgttgattacaatagaagttgatgttaaggcggtagtcggtacacctactgcggtttcaagtatcgaatgaagatggtttacagggaggggcggttgtgatgaaaaaggaaaacttcgttcaaggcatgtcgagagaagatgcggaacgaaatagtacatatagagatggggatgatccaaattatgggttttctagcaaggaggcagcactaaaatgcgggaacgattatgcgaacttgaagaataggccggattatgatgggtttgtgacaattaatgaaggtgttgcatgggctaaagcacatcctggagcggtaagcaaccctacagcagacaacacgttatatcttgatgcttctaaaatggattttggtaatttaaaacccagtgatatggttgaaggagttaagggtaatgttaatttgtttgacttcgtagattctattaccttttataaaaacatggatagtcttcaaataaaagtcaaattacagaatagataataataaagcccggtaatgaccgggctttattatttataggctgatcttgttttagcatgttgaattaacccgtcaatggaatacatgatacaggttttatcttcatcatggagtttttgaatagaaacgaccttatctaaaagggacttgtcgagttccacagttttccgggagcgggaaagccgcaaaaatgtttgggggcctgttcgcgcctgaataccgggatctttcgtatatttagatgaccaaacttaatgagcagaacgatgcaatccccaactgtacacagtccgccgctgtatcctggtgcctttttgctgcgttatctgcgggagccggagccgcatttttttataccaatcctataaagttaaaatatgaccagatattccattttcgccgtttttattgctgcaacagcgcttttattttcctgtaaacatgatgcgaaagaaaaacccgcgcccctgatcgacatgaagacctttttcaggaacggggagaaaagtactttccggatctcccccgatggccactatttcagttatcgcgcggattataaggggaagaccaatatttttgttcagaaagtgagcgacagcacagctatccgggttaccaatgacacgttgcggagcatcggtggttatttctggaaaggagaccggatcgtatatgcccaggatataggcggcgatgagaactttcagctcttttccgttaagacagatggtacagatctaaaagcgttaacgccctttcccggtgtaagaagcgatatcattgatgccttactcgacatcagcggaaaggaaaaggagctgatcgtacaaattaataaaagggtaaaggaatactttgatccctatcttttgaatattgaaacaggcgcccttaccctgctttacgacaataaagaaaactatgatagctgggttacggataacaacggggtgatccgcctggcctcaaaaacggacggcgtaaacattacctggaattaccgcaactcggataaggatccctttacaccgctgctgactacttcgtttaaagacctttttacaccggcttcttttgacagggataataagatcctttacgcgcttagcaatattggcagggataaggtggtactggttgagtacgatccggtaaccaaaaaggatataaaggaattgtatgcagacaataactatgatttaggttctatcaaatatgaccggaaaaaacaatcgctgacctccgtttactgggttgccgaaaaacagaagcaacatttctttgacgcggagtggggagccatccaaagcggcctggacaaaaaatttgaggggtatgaaacagaaatcgtaagttatgacgatgcccgttcaaaggccattgttgccatcagcaatgaccgggcacctgtgaaatattatatttatgattttggtaccagggccattaacgaagtggccaatccctatccctggatcgaggaaaaacaaatgagttttgtaaaacccattacctaccagtcccgggacgggctggtgatccatggctacctgacgcttccgctgggtctggatcccaaaggattacctgttgtgataaatccgcatggcggcccctgggcccgggatggctggtactacaaccctgaaacacaatttctggccaaccggggttatgccgttttacaaatgaattacaggggcagcaccggctacgggaaaaagttctgggaagccagttttaagcaatggggcaaacaaatgcaggatgatataactgatggcgtggaatggctgaaaaagcaaggcatcgccgatccaaaacggatcgctatttacgggggcagctacggcggctatgcaacccttgcggggatcacgtttacgcccgacctgtacgcggcggctgttgactacgttggcgtaagtaacctgttcacatttttgaataccataccgccctattggaaaccctacctggaccagtttcatgaaatggtgggcgaccccaaaaaagacagcgtgttgctggcatcggcatcgccggtcttacatgtggataagatccgggcacccctgttcattgcgcagggagcaaacgaccccagggttaacaaagcggagagcgaccagatggtggctgcattaaaaaagcggggaatagaagtggaatatatggtaaaagcagacgagggacatggttttcataaccaggacaatcaatatgatttttatggcgctatggaacaatttttaaataaacacttaaaaccgaaaaaatagcgcgggccaggggcggatcctgcaatagcaataagcgcggggtatggaaggggatggcagggaggttcccgttcagccggcatcatcatcatcccagcccgggatcgcatgccggatcagcccgatggcgtcttcggccgcttacctggtatcaaatataccgatggctacgtcaccggaatgggacctgtaaaggaactgttccaggcatcgcatatagtagtcttttaaaggctgggtaaatagccggttttccctgatattgcccaccagcatgtaccattcgcgggcaaccaccaacccttcgccaaagaactggtcttcctccgctttttttatagtattgcgggctgcttgctccgaggtataaccgccaagaaggatcgtgcaggtatcccgctcgttacggaaatgctccaggttgctggtaaaaaaatcctggaggtttagaacaaaaagttcccgggtatggatattcccggtcaaagcatagaaacgggacacatccagcagcccgccatgcgtttttagcgcattgttgatcaggtcgtctacagtcataaggaaagccggttttagcgtaaagatacggttattttcccgctattgggattggcatggtccggcagggcattcccgttctgccggaccatttggggggcagtaatacctgcttttcccactggcggtacctatcctaaccccggctatgacggtttttgcaacggatcctccgggaggaggacctgggcttttagaatgtattgcagaccgtaggcaacaacaagcccggcaggaatgctgatggataaccaggtagccatatccctggtaattccctgccagtgtttatagtaacgcaggtaggctcccagtcctgtaacaatacccgctgctgccgccattacatagaccagtatgcattgtactacccatttcctgggcgaccggaccagcggttttaattgcagggcgttgatgatgccgatagagaggaagaggaacaggatgtcgaagggcacatacagggtatagtaacccagccagaacacccaggggctaaagaacaggaacggccagatgccggccaggcgcctgcggttgtccgctacccggaagatactgttctgtacgtttacaagaacgagaacgaaggcaaacagggaaagggtatgcataatgaactgcggggggctaagccgctggtcgtgatcgccggtaagcccgtgcgcaataaggggatgtaaaaagcccagtgcgccgggataaatggtcatattgccccgtacccacttttttaaaaacatgtttttacctgatttcataaatttgtatttagtagggcaaagaaccaccattctggaggggaggaaagggatatttgccgcctgaaatgatatattttacgccatggctttacagggaacggttatccgcactattttccagacggctgcttcaatgggagctgcctttgatactgtttgccggatgtcgggcatcagcccccgggaaataagtgactcggaaaatatggtagagtgggagaaggcggcccttatctgggtgccgcttttaaagttgtccggcgatccggtcatcgggctgcatgtgggcatgagcgtaaacaagctgctccacgggatggtaggcttcctgatccagagcagcagggatcttgaccaggcgctgcagctgctgtgccggtatggtccgatgatatccccgatggtagaataccggtatacggtagcagatgtggccgttcttgaaatagcgcccaataagatgtggcttacaaagcacccggagcctgcgcggcatgccaacgattttctgatggcagccaccatcaatacaggcagcaccctgtccggcaggcgtattgttccgctgcgggtagagctggcttacgaaatgcgggagatctcggcataccgggatttttttggctgtgatgtgtttttcaataaagaagccaaccgcatcgtgctgagcagggaaaccatatcctccgcagtactcaccagcgatcagtccatgttccggctcttcagctctatcctcgcagacaagcaggcgctgctggctgccggcagtacggcagccaatttaaagcaggtattgtttatgcagttcaaaggacgcatccccgcaattgaagaagccgctgccgcattgaacatgaccgtccgcaacctgcagcgcaggctgctgcaggagcaaaccagcttccgtgccgttgccggtgacatccggaaggaaatggcttttcagctcctgcaaaaccccgccatcaagctctcggagatctccgatatcctgggttactcagatcttaccgcattcaggaaggcctttaaatcctggaccaacacaacaccgcgggcggtaaggaaggggcaggttgcatagtaccccggctcacgggtcgtacttcaggtactcttcaggcgcagaggggcggcggtttttggggtgatattggtaccagggtttaattatcttttcttattgatgcggatgcttttcgtgctacctgttcccgttgttttaccagggccaggcggtagcgcacaatttcctgtttttcagggcaacaatactccatcgattggaggagttcattttcccggattttcaggaagaggctccgtccctcatccgtgtaacgcttccccggtaaaaggataaaccggagtttggcctccagtacctggtaccgtttctgttgctgttccaacaaacggctcagccgggctacctcaaagctggcagccgatgcctcgttttccaggaaaacagcgacctgctgttttatcccacggcgggcagcagtaaccggaactgcctctttgcgattgcttttgcaaaatgccagccagtcgcttcttagctgcgcaaaccgtaaaaatgcatccgtaggcaaggagcgattccctttaagatgatgcccggttaaactatgtgaaaatcccaggatgactgccagttcgcggatcgtaaatccggctcctttcataaaatggtccatcatggtagttgctttatatttcgggtttgcgcaccgcgacaaaaaaccgccggcggttgtagacaatactattgtagattttttaaatgtctacaaatgcatgtctgcaacagatcttattatcggggcgcgcatatttggaaaggtcaaaaagtgttttcattccatatgctggtaaagaagcgttaatgattgctgttttaaaggcactaaaagaaggccggccgctgaaatttttttaggatagcagtaaagggtggctcctgttttttgcaggcttcttttaaatggtaacacaacaggatcctcagtcattggtttctgtcttaaagagtggtgttatgcctttttttcaaacagacctgggttcttagacacaaaaatgccccgcagataggcgaggcgctaaatgttttcacaacggaatcatccttattgtgaattgctttcagaagcaaatataaatgaatcttatttgactaaatacgggaatccgtaaatttagcaatagatatttattattttagaaaaccaaactaagtaaattcaaggggcagtgcttagagtatagaaggttagtaattgaaaatgtacttaatttttattcattaaaaaataggggttggcagttaagcaattcacaacatactactcacaaaatggctaatgaataatatgaaaccaacccctaaatacaaagatagtgaatttaaagattgagtagtatgggttcgttataaaaattattcatatatttgattgaaaaataattgtttatgccagcaaagaatattttaggattagatttaggcacaacttcaatcggctttgccaaagtagttgaagatgatcattatcagaactctgctgttgagttgattggtgttcgagtgaatcccctgaccacggatgaacaaaccaattttgaaaagggtaagcccgtttctgtaaatgctgacagaaccctcaaaagaggcatgcgccgtaacctggatcgttaccagcttcgacggaatcacttaatcaaggtgctgcaagagcatcatattattgcagcagatacaaaacttgctgaagacggcaaaaatacaacccatgctacttatgcatcaagagcattggctgcgacagcggaaatcccattggacatctttgcgcgagtgcttttgactattaataaaaagcggggttataaaagcagtagaaaagctaagaatgaagaggagggccagctgattgatgggatggctgtagcaagaaggctgtatgaagaatgcctgacacccggccagctttcttaccagttattaaaagaaggtaaaaaatacctgcccgatttttaccggtccgatttgaatgccgaactggataaagtgtggaactttcaaaggcaattttaccccgacatattaaccgaagagtttaaaaagcatttagaaggaaaagggcaaagagcaacatccgctgcattttggggacaatacggttttaacacggcagaaaataaaggcggcagggaggagaaaaaactgaaagcctatcaatggcgtagcgaagctgtgcaaaagcaattggtaaaagaggaagtggcatatatgattactgaaatcaacaatgatcttaacaaatccagtggttacctgggcgctatttctgacaggagcaaagagttgttttttaacaaacagacggtcggacagtatttatatgggcaactgaaagaaaaccctcatacacgtctgaagggccaggtgttttaccgccaggattacctggacgagtttgaaacaatttgggaaacgcaggcaaggtttcatccggaactgacacccgaattaaaagaaaaaattcgtgacgttattattttttatcaacgaaaattgaagtcacaaaaggggctcatcagcttttgtgaatttgagagtaaagaaacagaagttgaaaagaacgggcgaaagataaagcagcggataggcttgcgggttgcacctaaatcgtcgccattgttccaggagtttaaaatatggcaggtattaaataacctggagtttcgcaacaaaaataccaaagaagtgtttgtgccggatataactgctaaacagcagttatttgacgagcttaatatcaaggggaacctgttggcaagtgaagctataaaaatgctgggttataaaacgaaggattgggaagccaattatcatacactggaaggaaaccgtaccaataagtctttgtacgatgcttatctgaagattttagagctggaagggtatgacgaaaatttactgaagctgagtagtagtgatgatattgatgtttccaaaatagaaaagcctgcattagaaatcaaacaaatggtgcatgctgtttttgaggttttgggtattgatagcactgttctggattttgacgcagaagcagatgggaaagcatttgaacagcagcctgcataccaattatggcatttactgtattcagcagaggatgataataaaaaacatgtacaggaagatattttcacctatgggcgcgataatattggattaaagaaaaaactatgtgaaaagttgggttttaagccggaacacacaaagattttagtgaatgttgctttcagtgatgattatggcggcctgagcagcaaagcaatccggaggatttatccgtttattaaagagcttacttatgataaagcatgcgcagaagccgggtacaggcattcggcttctgcactcacaaaagaagaaatagctacccgccctttacaaaagcggttgaatttattgaagaagaatgaactccgcagcccggtggtagagaaaatcctcaatcaaatgattaacgtggtcaataccctgattgatgatgaaaatacgaagcgaaaagcccagggcgtatccgaagatttccattttgatgaaataagaattgagctggcccgtgaactgaaaaagaatgccagggagcgtgcagagatgaccactaatattaatgcggcaaagcaactgcatgaaaaaattattaagatactgcaaacgaaatttggagtacccaacccatcccgaaacgatattatccgctacaaactatacgaagaactaaagaataacgggtataaagatttatatactaacacatacatttcacccgacatcctgttcagtaaacagattgatgtggaccatattattccgcaaatgagtttgtttgatgatagcttttctaataagacagttgtgttcagaaaagataaccaggataagggaaacaaaacggcctatgactatctgcttggtaaatacggagaacgagcattggaagagtatatttcccggataagcagcttgtttgaattgggaaagaaaaataaagaagaaggtattagcaaggcaaagtttcagaaattgcaaaaacgtcttattgatattggagatggctttatcgaaagagaccttcgggagagccaatacattgctaagaaagcaaagcacatgctttacgcaatatgtcgtagcgtagtttctaccagcggcgaaattacagcaaggttgcgtgaggactgggatttggtaaacgtgatgcaggaaattaatttgtcaaaattcaggacattaggcttgacagaaatgatcgaaaaaaaggatggtggccaaaaggaacgcatcaccgactggactaagcgaaatgatcatcgacatcatgctatggatgctttaaccatcgcttttacacggcatagtcacattcaatatttaaatcacctgaatgcgcgtaaagatgaggtagataaatggcacccggttgttagtaagattgaggaaaaagaaacggatcttgtttatgatgatcttggaaaccggaaaagaaaatttaaggccccaatgctcaactttcgggaagtggtaaaggagcatttggaaaacgtgctgatttctcataaggccaagaataaagtgtttaccaaaaacaagaataaaataaagactgccaggggagaaaaaataaaaacagagcttactccacgagggcaattgcataaagagaccgtttatggccggtatcgttattatgaaagtaaagaagaaaaaatagggacaaagtttaatgaaggtataataagaatggttgtgaatccgcagtataggaaacttttgctggagcgacttgttgcaaatgaaaatgatcctcaaaaggctttcgggggtaaaaacgctttaagcaaaaatccgatttacattgatgaagttcaaggaggatttttacctgaaaaagtgttattgcagtggcaggaatatgattattccattcgcaaagatataacgcctgaaaatctgaaggatgtaaaagccatcgagaaggttttggatgagggagtaaaaaagatactattaaaacgccttgctgattttggtgatgatccaaagaaagctttttccgatttagataaaaaacctatctggcagaatgaggctaaaggaatcgctataagacgggtgactatcagcggtgttaaaaatgccgcaccattgcatcataaacaagatcatctcggtaaggatattttagacgaaaacggaaagcagataccaagctcttttgtaagtaccggtaataatcaccatgtagcgatttatcgggatgtggaggggaatttacaggaaagggttgtttcgttatttgacgccgtacaattagtaaatgccggtgaggcggtaattgataaggagtataacaaagggataggctggcagttcctgttcacaatgaagcaaaatgaaatgtttgtttttccggatgaaaagaccggtttcaatccgaaggaaattgacttgttggatttgaaaaaccgaaaacgaattagccccaacttgtttagagtgcagaagttggcaactaagaattatatgtttagacatcattttgaaacaacagttgaagaaaataaaaaactatttggatacacgtataaacattttcggagcactggttctctagaagatatagtcaaagttcgtatcaatcatataggagagattgtaagcgtaggagaatattaaaagaaaaaacgtgctccattttgaaacatattaccatatttataatcacgccaatggtgatgataacctgtttcgtgaggcggagaattacaatttctttttaaagaaataccaccagcatcttgatccggtcgttgaaacgattgcctggtgcctgatgccgaaccattttcatctgctggttaaaataaaaagcgaagaagcggtagcgtcaacttttctgaagttccaaactttagaaaagtttgagcagcgcagcgcttttttaagtaaacagttttctaatttcttcagcagctatacgcaatcgtttaataaagtttataagaggcgtggctctttatttataaagaattttaaaagaaaggaggtgacagatgaggcttacttgcgtagtttgattctgtatattcatctcaatcccgttaaacatgggttcgtaaaagaaatgaacagctggttctggacttccttgaaaacgttccccgatgcctatccggatttagcaaaacagctatttacgaatttcgaacaatacaatatttcgcatcaaaacaagcaaatctattttgaggaatatacgaaactggagaacgacttaatttaagcgatatgatcaaacgcactctgtacttcggtaaccctgcttaccttaaaaccaaaaacgggcagttgttggtagagctggccgataccggcgaaacgaaaaccgctgctatcgaagatataggggtgttgatcttagatcaccagcagatcaccatcacacacagcgttattgccaagctgctggccaacaatgtggcgctgatcacctgcgatgatatccacctgcctaccggccttatgctgaacctggacgggcataccctgcaaagccagcgttttcaattacaggtagatgcatccataccgttaaagaagcagttgtggcagcagactgtaaccgctaagatacaaaaccaggcgaacctgctggccatgtacaggatacccaataaaaccttactgaacctggctgcccgggtaaaaagcggcgatagtgataactgcgaagcgcaggctgctaattactactggaagaatgtgtttccgctgttcccggggtttaaacggttccgggagggggagcctcccaacaatttattaaattatggctatgcagtgctgcgtgccattgtggcaagaaatttagtgggcagcgggttattgcccaccctgggcatttttcaccgcaaccagtataatgcttattgcctggcggatgatatcatggagccctaccggccatatgtggacaaactggtgtatgatatagtaaggggcaatggaaagtttcttgagatgacaccgttcatgaagcagcaattgctgagtatcccggcaatggacgtgctcatcggcgatgaaaaaagccctttgatgaatgcggtacagcggacaactgccagtttggccaaatgttttgaaggcgccagccgtaagctgctgtatcctgtattgcctccttcatttgtttaaaaatgaattttgaacggttaaatgcttaccggattatgtgggtgattgtgatgttcgacatgcctacggaaacaaagatcgagcggaagcgctatgcgaaattccggaagcggatcctggacgatgggtttactatgttccagttcagcatgtatatccgtcattgcatgagccgggagaacgctgaggtgcatgtacaacgggtaaaaaagatcctgccggaaaaggggcatatcggcatcatctgtattactgacaagcagttcgggcaaatggagatctttaatggcagggaagcaacagaatcgccggtgccggctcagcaattggagctattctgaatacagaaaggagcatattgacaaaatagcaataaaaaaacggggaatttccccgtttttttatcctgttgacaacctgaaatcctttactgttgcgggnnnnnnnnnnnnnnnnnnnnnnnnnnnnnnnnnnnnnnnnnnnnnnnnnnnnnnnnnnnnnnnnnnnnnnnnnnnnnnnnnnnnnnnnnnnnnnnnnnnnnnnnnnnnnnnnnnnnnnnnnnnnnnnnnnnnnnnnnnnnnnnnnnnnnnnnnnnnnnnnnnnnnnnnnnnnnnnnnnnnnnnnnnnnnnnnnnnnnnnnnnnnnnnnnnnnnnnnnnnnnnnnnnnnnnnnnnnnnnnnnnnnnnnnnnnnnnnnnnnnnnnnnnnnnnnnnnnnnnnnnnnnnnnnnnnnnnnnnnnnnnnnnnnnnnnnnnnnnnnnnnnnnnnnnnnnnnnnnnnnnnnnnnnnnnnnnnnnnnnnnnnnnnnnnnnnnnnnnnnnnnnnnnnnnnnnnnnnnnnnnnnnnnnnnnnnnnnnnnnnnnnnnnnnnnnnnnnnnnnnnnnnnnnnnnnnnnnnnnnnnnnnnnnnnnnnnnnnnnnnnnnnnnnnnnnnnnnnnnnnnnnnnnnnnnnnnnnnnnnnnnnnnnnnnnnnnnnnnnnnnnnnnnnnnnnnnnnnnnnnnnnnnnnnnnnnnnnnnnnnnnnnnnnnnnnnnnnnnnnnnnnnnnnnnnnnnnnnnnnnnnnnnnnnnnnnnnnnnnnnnnnnnnnnnnnnnnnnnnnnnnnnnnnnnnnnnnnnnnnnnnnnnnnnnnnnnnnnnnnnnnnnnnnnnnnnnnnnnnnnnnnnnnnnnnnnnnnnnnnnnnnnnnnnnnnnnnnnnnnnnnnnnnnnnnnnnnnnnnnnnnnnnnnnnnnnnnnnnnnnnnnnnnnnnnnnnnnnnnnnnnnnnnnnnnnnnnnnnnnnnnnnnnnnnnnnnnnnnnnnnnnnnnnnnnnnnnnnnnnnnnnnnnnnnnnnnnnnnnnnnnnnnnnnnnnnnnnnnnnnnnnnnnnnnnnnnnnnnnnnnnnnnnnnnnnnnnnnnnnnnnnnnnnnnnnnnnnnnnnnnnnnnnnnnnnnnnnnnnnnnnnnnnnnnnnnnnnnnnnnnnnnnnnnnnnnnnnnnnnnnnnnnnnnnnnnnnnnnnnnnnnnnnnnnnnnnnnnnnnnnnnnnnnnnnnnnnnnnnnnnnnnnnnnnnnnnnnnnnnnnnnnnnnnnnnnnnnnnnnnnnnnnnnnnnnnnnnnnnnnnnnnnnnnnnnnnnnnnnnnnnnnnnnnnnnnnnnnnnnnnnnnnnnnnnnnnnnnnnnnnnnnnnnnnnnnnnnnnnnnnnnnnnnnnnnnnnnnnnnnnnnnnnnnnnnnnnnnnnnnnnnnnnnnnnnnnnnnnnnnnnnnnnnnnnnnnnnnnnnnnnnnnnnnnnnnnnnnnnnnnnnnnnnnnnnnnnnnnnnnnnnnnnnnnnnnnnnnnnnnnnnnnnnnnnnnnnnnnnnnnnnnnnnnnnnnnnnnnnnnnnnnnnnnnnnnnnnnnnnnnnnnnnnnnnnnnnnnnnnnnnnnnnnnnnnnnnnnnnnnnnnnnnnnnnnnnnnnnnnnnnnnnnnnnnnnnnnnnnnnnnnnnnnnnnnnnnnnnnnnnnnnnnnnnnnnnnnnnnnnnnnnnnnnnnnnnnnnnnnnnnnnnnnnnnnnnnnnnnnnnnnnnnnnnnnnnnnnnnnnnnnnnnnnnnnnnnnnnnnnnnnnnnnnnnnnnnnnnnnnnnnnnnnnnnnnnnnnnnnnnnnnnnnnnnnnnnnnnnnnnnnnnnnnnnnnnnnnnnnnnnnnnnnnnnnnnnnnnnnnnnnnnnnnnnnnnnnnnnnnnnnnnnnnnnnnnnnnnnnnnnnnnnnnnnnnnnnnnnnnnnnnnnnnnnnnnnnnnnnnnnnnnnnnnnnnnnnnnnnnnnnnnnnnnnnnnnnnnnnnnnnnnnnnnnnnnnnnnnnnnnnnnnnnnnnnnnnnnnnnnnnnnnnnnnnnnnnnnnnnnnnnnnnnnnnnnnnnnnnnnnnnnnnnnnnnnnnnnnnnnnnnnnnnnnnnnnnnnnnnnnnnnnnnnnnnnnnnnnnnnnnnnnnnnnnnnnnnnnnnnnnnnnnnnnnnnnnnnnnnnnnnnnnnnnnnnnnnnnnnnnnnnngttgtcaaagaccaaagttaatccgaaaattgaaagcaattcgaggctgtctcaaaagtccgagacagcctctttttattcggtaaggtgatggagcgtgaagtcaaatacgcgattctcagcgccttcaaaaaccttttgatacaccttcataccgggaaacagcggcgttttattggacgaaaggcgatctgcctgaatagctccgctgatgagccgcaatcttccatttcccgtttctatcctatctttggcggctatgttgaaactattaaagagcggcggctggctgctgggcggggtgttgctgatcgctgcttttgcggatttcagaaaacaaccggcgctgaaggcctttcacgtgaacgggtttgcacagggcactacctaccatattgcctactatgcgccggatagcagcctgacccggtttgaggccgatagtatctttcattccctggacagctcactctctgtttataaaccctattccctgatcacccgctttaaccgggaaaaacgggggctggtgcccgatggacacctgaaaaaagtggtgctcaaggctcaggaagtctcaaaggcctcggcggggatctttgatattacggtgatgcccctggtaaagctctggggctttggtcccgacgggcggtcgaagaccatgccgggcccgcagcaggtaaaagaagtattgcaatatgtaggctaccggaaattatatttcaggggagatagccttttgaagaaagatccccggctgaccattgatgttaacggcatcgcgcagggatataccgtggatgtgatcgctgatttcctggagcgcaggggcgtggagcattacctggtagaagtagggggcgagatccgcgtaaagggccggaaacagccctccggcgaagtgatgaaaatagggatcgagagccccccgggaaaagacgaagacccggaaaacccggtactgatcagaacggtttttgtaaaaggaggtgccgtaaccacttcgggcaaataccgcaatttttaccagaacggcaataaaaaggtatcgcatcttatggatccgcgtaccgggtatacgcttcataatgaaatgatcagcgttacggtatttgcagcagatgctatcacggccgatgcctatgacaatgtttttatgggcatgcacctgggtgaagcttttagcttcctgaaaaaacacccggagctgaagtgttattttatctatacaaaaaaggacggcacggttgccgatacggcttctgcgggttttgatgcgatgcgggtccggcaataggggcgcagactgctaatgttgtacgtgttttaaacagcaatacgcgctaagctattataaagaacgggtactgctttaatatgcgatcggtagcaattgccggcttttagcctgggtcagcgaaaaaggatctgtgtaaaccagcgggagcggccatgccctgcaattcagccattttctttcatgcaaaagcgcactcattgtcgaattcgcgttatattagcattttaagccaacatctttaatcagtgatcgatatgaataaacggatccttacggtttttgcccttgccttttcattgctgggttcagcacagcaaaagaatgctgtagtagcgttgattcctgaaccggtttcggttatcgaaaaaccgggcagctttgcattaccgcagaatgtaacgatcagtcttccggcgaaggccgacctggggcatacctatgcattgttaaaggaccggatctctaataccggtgcaacggtacaggaacaaaaggaaaataccagcgccaccattaacctggtgctgaataaacgggccgacagcaggctcggggatgagggttataccctttcggtaacaaccggcggtgtaacggtaaccgccaataagccggcggggctgttttatggcgcccaaacatttttgcaattgctgccgccgcagatcgaaagtgttgaacgggtagatggcttgcgcctgcaggctccggctgttgaaattgtggattacccgagagtaggatggaggggattgatgctcgatgtatcccgtcacttttttacggtagatgaagtaaagcaatacatcgataatatgtcgcggttcaagtataatatgtttcattttcacctgaccgatgacgaaggatggcggctgcagatcaaaagtttgcccaggctaacagaaataggggcatggcgggttaacaaagtgggattgttcaataccttttctgcgccactgccggacgagccaaaatcctatggagggtactatacacatgaagatatcaaggcactggtgcagtatgccagggaccggtttatcgacattgtccccgaaattgatgtacccgggcacagcctggcagcgatcgcctcttacccggaactgtcctgcaccgaaggggccgataaatatcaggtgcgggccggcgaacctattatggactggtcgcacggggcgcctcccattgccatggtggataatacgctttgccctgccaacgaaaaggtatatggctttatggacaaggtcattaccgaggtggcgcaactgttcccctttccgtatattcatgtaggcggtgatgaagcaccgcataatttctgggaaaagaacccgcaggtacaggctttgatgaaaagggagaagctgaagaccataccacaggtacaggcttattttgaaaagcgcctggaaaagatcgtaaactccaaaggcaaaaaaatgatgggctgggatgagatactggaaggcggcatctccccaacggcggcgctgatgagctggcgcggggagcaatatggcatcgaagcatccaaatcgaagcactacgtggtaatgagtcccacccaatttgcctatatcgactatatgcagggagatgtaagtacggaagtgcccatttatgcctcgctgcgtttatcacaggcatataaatttaatcccattcctgaaggggcaaatgcaaaatatatccttggggggcaggccaatctttggacggagaatgtttacaacgcccggcaggccgagtacatgacctggccacgggggctggccattgccgagtcggtttggtcgccgcaggagaagaaggactggaaaaaatttgctgtcaaaaccgagcagttctttgaccggttcaatgccgcggagatcaagtattctcccgcgatctatgatccgtccgtaaccgtttccaaaaaggaccaggcttattttgtgacccttacaccggagatcgacggcctggatatttataccagctttgataattcggcgccggatcgtttttatccgaaatataaagaaccgctggagatcccgaaagacgccgatgagctgcgcatcattacctacaagggtaaaaaagaagtgggacgccagatgacgatcaaggtagcggatcttaaaaaacgcgtaaaaaaataaccggcatattgttttgttgaagatgcgtaaattcctgctgacaggttgtgtgggcctggtgctgtggagcagctgcgccacaggcaggccggtgcggaccgactataaaaaagatgtattgctgcagacaaactatggagatctcctgctgcggctgagtgatcttaccccacagcaccgggataattttataaagctggtgaagagccggtattataacggggtgctttttcaccgggtgatccggagttttatgatccagtccggcgatcccggcagccggaaggccccgggcggtaaacccctgggggaaggtgggccgccctacaccgtgcccgcagaattcaatgccagcctgtttcaccgcaaaggagccctggccgctgcgcgggaaggggacgcggtaaacccgcagaaggccagcagcggaagccagttttacatcgttcagggaaaagtgtggagcagcggtgcccttgatacactggaaataaaaaggctcaacggaagaacgatccccgctgcccgcagggaggtatacacaaccgttggcggcacgccgcacctggatcagaactatacggtatttggccagctgataaagggatacgaagtgctggataaaatagccgccgtgcctacaagcaaggggccggaccgggaccgccccatatggaatgtgcggatcatccgggcaaaaatggtaaagcgcaggctttagggttggttccgggtgtcacgtttaaagttcgggcctggtcctttcttatactcttagtacccgaacctcctgtttgcattcagcatttgagatttaagccctgaaacttcgggggagagccgggagctatgaaaccggatctaacgcgaaacgttgaactgcagacctggaacaaaaaaagattagcccagctctgtatcaataatcgcctccagctggttcagcttttccatgatcgaatcagcatccatggaagaggtggcttctgctttaaattcggtggcaaaccagatcagtaccatggacacatagtcctgcatatcctttcccggaaaggttttcttaaattccatcaccttatcattaatgatccggatggagtggcgaacggtttcttcatcagcgggctccactttgatccggaaatgccggtcggcgatcattatattggcggggatcaggttttcttccattgacatcattcattcatttaggttaaacgcttagtaaggcaatacaccggtcgatctctttcagatagccattcacccttttttcaaaggctttccgctcatccgggctcatttgtgtgttcccgtaccgggcaatatcaagttgctgctgtatggcttccacattggaaaccgcggttgcagccgaagtctttgattcttccagcgccagtttcagggctgtgttttccttttcaataacagcgttcctgcgacagagctgcaccagtttttcctgtatttgctttattttatcttctattgcctgactcatcggtaaacaatttcagtttaaggcgccgcatcaaagatcgacatagcctcaggttaagatttatttccggatttctacctgcaaatctctctccaaactttgcatgatcttcttcatccagccatcaatctccccgtcggtcaatgttttttcttcatccaggaaggtaatattgatggccagcgattttttccccgctcccagcttatcacttacaaatatgtcgaaaagctgtacagcttgcagcttcttaagatttaatttccggatcgcggcttctacagactggtaaggcagttcttccgccacgatcatggcaatatcgcgctgcaccgcggggaaacgggagataggcgcaaactgggttttatactttaaggccgccttcaggatcgcggtccagttcaggtctgcataaaataccggctgctttatgtcgaaccgtgccaggagatccttatgaaccgctcccagcttaccaaggctggttgcacctgatttaagctccagtccgtactggaaattggtatcttttagctcatcaaactgcaatcctgttaacccgcacagctgcagccctttttcgacaaggccctttaatgcaaaaaaatcatatttgataccgggctgtttccagccggcggtttgctggttgcccgtcaggtacaggcaaagatgatccggctcctcaaattttccttttttgttgatgctgtaggttttgccaaattcaaataaccttaggttgtcattcttccggttaaggttccgcactacaatctcaaggcccgtttccagcatatcgggccgcatgatgttcagttcggcgctcaggctgttcttcatcttcacaacggtgctgagttcctcttccgtataataggctttgttggtgatcgaattagtcaggatctcatggtgccccgagccggtaaggaaggatacgatcttttcttttattaattcactttcaatattttcatcaatagaaggtgttattttta

SEQ ID NO: 2139 - DNA, 24281 bp, synthetic construct
  source 1..24281: mol_type = other DNA
  misc_feature 1..24281: note = Synthetic
cacggtgttgtctccacgcgatagtactgttcctgcctggaatacgctgtccgccggcgagcagcaggagatggcaatgcgtatggcaatctatgccgcccaggttgatattatggaccagggcatcggacgcattgtacaaacactaaaggctaataatgaactggacaatacgcttatcatgtttttaagcgataatggcgcctgcgcagaatttatcagcagcggtaaaagcaaagaagtaaacgggcaggaaaacacatttgaaagctaccggatcaactgggccaatgtgagcagcacccctttcagggaatacaaacattttacccatgaaggaggaattgctacaccgctgattgtgcattggccaaagggaatagcccctaaccttaacaatacttttataagagactatgggcatattaccgatattatggccacctgtactgatgttaccggggcaatataccccacaatatataagggccataaaatacacccgctggagggaaaaagcctggtgcctaatttcaaaggcaaacccaatcatcgtggccttgttttctgggagcacgaagccaatatagcagtgagggacggaaagtggaagctggtggcaaaaacggagcaggatcatatatttgatccggctgcgctggagttatataacctgcaggaagacccttcagaaatgtatgaccttagtaaaaaagaccccggccggcttcaaaagatgtatgccctctggaaagcctgggcgaacagggtaggtgtattcccctttgataccagggagtatggcgcccggatgcaggcctaccgcaaacaggttaacggcgagtttgaggataatctggggggatggaatgtaaaaataacagcgccggtaaccggttcgatcgatattgatacgacgggccggctgtcgggcaaaaaatcagcccgtatcgctgttgaaaaaccgggaagccgtcctgctgatatggcactcttctggccctttcgggccctccccggcgagcaatataaaattacagtgaccgccgcggcgaaccatcctgtttcgttttatgcaaggctggaaaacgtgaaggagccgggaaagaaattgatggacgaggtggtgcgggcaaataaagccaaacaaacaattgaatgggttgcgcaaccggtattgtccgaaggtacctacagggtagcattttattttggtacggtggcaccgggcaccaagctatggctggatggcattcggctgagccctgtagcccaggcacattaatcgcagcaggggcttcttatgaattcatgaacggcgtttagtgggaacacccggtttgggagggcttcctgatccttctgctgaaacgtaatgcatttagtaaatgtgaaaatgtgcaaatgtgataatgtgataatgttcgtccggctgaacgcccttcaggcgggtatggtaatttgaaaatttgagaatgtggaaaaaggaaattacacaatacccatttttacacaatgggcgatcagttgttcgttggtggaaaaattgagagcttcttttatgtagttaaggcgtttttcaatgctgcttaagccggctggctgaatattattttttcttaggtgatccgatatttcctgttgccgtttcccttcaatcattaaagacagaatcgttagatcaaattcagaaaactcatgggcatttttttgtttggtttgctgaacaaatgctctgggaaaataacgctgattgccgatgatataattaatagccgttttaagctcttttgcgtcaccccgggctttgcgtacatagccgtcaatatgtagcttatgaaacaagtcgtcaataatcgctggtttgctttcggcagaaaacacaagtatttttagttccggctgcacaacccgtgctgctgcaataagcgctttcccattaagaaggtgttgctcccggtgatctttttcaaaataaaggtcggtaataagcaggtcataagaagctgctgcctgtttggctttttgtatcttaagcagtgcgtcatcacaatagtatacataatcagggggcgcgattcggagctcttccaacgttttttgtacagaaatattggcactttcgtggtcttcggctatgagtactttgttgatcattttgatttaaacgattggaatatataattgaattttcaatccttctgtcgttgtcttgtcaaaaataatcctgcctttgatcactttcatacggttttccgtactgttgagaccatttccataatggaaatcaggaggaaggcctgcaccgtcatcggagtagttgatctttatcagattggttgaccgctcaaattttactactacattttcggcagcactatgtcttttcatattgatcattaattcctgaaaaatatgttctaattctgtttttgtttttggtggcaagccgttccatatttctttagcgttacctactatcaggacgcgggtggtttcactggcgaatgattccagcaattcggtaatggattgctgaaaatccgggtgaatgttttcagaaggctcataagatatattacgtgagcgctcatatacaacgtccagcttatcaagcaacggctctttttgtaaaaattcagtgtgctctatttccgacatgatccggtaaataccattagctacttcatcgtgcactttctgggatgtttttaattgttgattgcggatcatgcgttgtttccgtctcctgtaccaaaagaaaataagaatagtaaagacgatagtgcccgaaagcacccctctttgaaccaggatctggatctttttttcggtattgtctttttgcagggcaaggttatccgctttggttttagcagcttcataacgaataagcgcaaattgatttttggcattattccggctggtttgtaagctgtcgtttaaatgccaataacggataaagtatttttttatggcttctggaggacttaaggtaatcagtttttgcaacgcttccaattcgtcatccgggctgctacgctgttgggccagcgcatacatcttacctgcgtagatcagtgctgaatcactgtgggtgtgggtataataattggacaggtgtgcatagcttgcatttagaccccggccgtctttttcattttctcgaatctgcaaagccattaataactcggcagttgcattgtaattagtgtctttcagccatttagtattagcgatatttgataagattcgcgcatattcttttttatagtgtgtgcttttatcaatagcggaacgaaagatcattagtgcctgatcatattgtttttttttctggtaggccagtgctttattatttaagataactactttaaaactatcgtccctggcaaactttaaagccaggtcataataaccaattgcggcgctctggttattcagatcagcgctggtatatcctaattcattgtaattggatacaagaagtccttgatccctttctcttttttcattcaggagcttcaatgactgcaacaggctttcctggctgccaaaatgatctcctgcatccgattggataattgccatataagtataagcctttgctacctgcagactgtctctggatccggcaagaaccttgttaaaataataaaatgcagaatcgttattcacattaaataaagaaacgccttttatataatctggtgatgttacagccggagcaactttgcgcggctgtttacatccgaaaaagcatcctatactaaagagcagtaaaaaggagtagtgaaattgtgtcaaaacagttatttcacctaaaattaaaaaaaataaggcaagtagaatgcttgccttatctgttttgccaacatcagttatcagggcaggggtggtggaggaatatgtcctttttctccacccgtatcagttgtatcgctcaggacgccctgtgtgcttatatatataccactgtttgcagttgtccgtaccgggttcggttgatgcgataataatgacaacaggaatgctaatatgaactccgtcataattttaatttttaaaattttagaaatgctgcagccggttgaaaaccttccggcgcagggatttaagtgcggtaagaagcgcttcttacgcgtttgggaaagggttgggtattggttgtgaaagccggtaaacgtttcccaaaaccggttaacagtaaacactttcaataccccgagcaatcagttctgtacggtagggctcttagcaagggagcacttcaaccgattgcgaaaacgaaaatagctcatgataagccgctggttaacaatcgattccggtaattccggtctttcctttttaattccggtaatgcttacgggattccgtaaattccgtagctttattgcacaaactttgtaatatgtttgatgattatacaaagctggtactgcaagattatgagacaaaaaaggccgcgggtctgctgccattaaatcttagtaagcccactcctgcacggctaagggatgaatgtttaattgcatataaaggaagacctcaacgcaaagacgaaaatatgttgagagacttttttgggaaggcagacaatgatatcggttattggcgcattgtaaagaaatgtgctatcgaccgttttaggcccctgatcaattttctaaaaaagccaaccattagaactgatgaaaaaaatgtggagctcctggcctggttgatcgattttgagccaagaccttttcaactttcgagtagatatgatcttaatgatgaggagaaagacatgattgatgaaaaaaccgggcaaccggaaaacgaccggatagccgaagcgcaaaaaggagtgctatcacctgatgaaccgatagatgaaaaagatgaagaaggcgaaatgccggtatttttaaatccacagcccgttttaaatgaacataagtatccttttaaactttcaacggcattgataattattgtagtgctggccttgtccggactatttatttatcagaatatcaggaaaggagaactccttaatgcaatgggtaccactttaaataggagggatgcctgcatgtattggacgggtgaccattaccagcaaataccctgcggccaaaaagtatacggtactatggtgattgcgctggattcggaaaagctggtccattttaagaaaataactaaaccagataccctaagcgaagcggatattcgccgggtgttttatataaagtatggcgggaaaattgaattttacacaggagggggaccccatccggtttacacagaccgtagcctgaaaccccttacagcatatatttatgaaaaatatattcttcccttaaaacactaatacggttttccgtaaggtttcaattgcatgtgaaaatacattcgcggaaataataaaaaatgaagtggattcattcctttaaatattggagctgtgcctttttagtgctgacttcctgcagtgcggctcgtaacgagagcccgtattttttaaaagctgattacgcaaatgaaagggctacctgtacaggcagcaagtcttgtagcgcatgtaaaaactgcaagtactgcaagcactgcgcaaagaatggcggcacctgtggcgtatgcaaataaatatgaagaatgcccctgctaattaattatttattggtatttacccttcttactatcggccgttgcaaccctgtacctaatgaaattttccgaaatagcgttaaaccaatggccgtcagctataaggtaattggcattaaagatggagacacttttgtattgttgatgggtggtaaagaacaggtagtgcgactggcgcatatcgactgccccgaaaagaaacagccttttggcaataacgcaaagcaatttgcttctggcgtatgttttgggaaaaaagtgatgctcctgcatcataataaatatgaccgaaataaacggttgatagcggaagtgcttttggaagatggacaaaatatcaacaaggagctggtgcggaacggcctggcctggtattttaaaaagtattctgacagccgggaatatgcagcgctggaagcggaagcaaggctccggaaaaaaggcctttgggcagataaagcgccgatagcaccctggaactggcggcatcggaaaaaaaccggtataaaaaatgtataaccccgggcagccaaaatgtatataaaccattagccttttcgaaaaaacacttttttttaattcgcacaattttgttgttttacgggtttccgtattttattagcccggccgtctgttattttagcgatagaaataactgtagcaacatggagaatgacttaaaactaaagctggagcaactgcatcaaagagtagctgcgttgaaggaccagatccatacagaagaagccactaaaaatgcttttgtgatgccctttatccagatcctcgggtacgatatttttaatcctaccgaagtgatcccggaatatatttgcgatatcggaacgaaaaaaggggagaagatcgattacgtgattaaaaaggagggagagcccatcctgatcattgaatgtaaacactggaaggaaaatgcagatgcacataactcccaattgcaccggtattatcacgtttccaaatcccgttttggagtactgacaaatggcatggtgtacaatttttatgcagatctggagcgcccgaacatcatggatgataaacccttttttactttggagctttccaatctcaaagacgcaggtgttaagatcctcgaaaagtttacccggaatggctataatctcgaaggtatcctggattcggcggaggacttaaaatatataaaagccattcgcaacgagtttgaaaaagagctgaaagacccgtcagatgagctggtgaaacttttggtaaaccgttttttcgaaaaaccgttaacggcatcacggctcaccagttttaaggaatatgctagaagggctatctccaattctattaatgagtctatcaatttccggttaaagaatgcattaaacatcaatgaaaaaacaccttccaaacaggagcagcgggaagtagttccggttgatgaaaaccccgatggcaccagggtggttactacggaggaggaaatagaaggttcgcagatcatcaaggccattcttagagaagtcattccggcagcgcggatcgctttccgggacacgcaatcctatttcggcattttactggacgataataaccggaagccactggcaagactgcatttcaacttttcaaaaaaatacctggaattatttcataaggggaaagataatggcgagagaaagctgttagcgtcgctggatgatatttaccagtataagaaagagcttttgggtacggttgataattatctgggaaaaaatgatacagagggggcttcaaatgaaagataaagtgtattatggagaaaagctgtttgatccccgatggatagaaaagcgaaaacgaattttgcgccgagacaataataaatgcgccatttgtggtaaagcagaaggaaggctgcatgtccatcataaacaataccactttattaaacgcttacaaaagcatgttgacccctgggagtatcaggatagtttattaaccactttgtgtgaaagttgtcattgccgtgggcactatcgatatgaaataccgataaaatacatttaataatagtacacctaaactaatttaagaaatgggattttttgacttgtttaaaaagaaagaacccgctccggtcgaaatacctgtagaagttaagagtagttcacttcctgagatcagggaggaagacttcattgataatacaaatccaacagaagaaaatacgacaacctattctgtggaatttggttcaaaattgccaatagacattatttatagttttttaaaagaagactatgagcataaagcgtacaatgatgctttgacaaaccctgataagtcatataaagacgcaaatctggcgattattcacagtaatctggaaataaagtttaaacaggtttttttgaaatatgaagatatgttaagagagatccattttcatatacattcccgggggcaggctggcttaacggatattgttgaactgcttaaatcgaggcagagtacatatgaaaaacatttggaagagttaaaaaagatgaaagaagatcttgataaggaagagttgtatatggtgggaatcttcaagtcttatgaggtgggatttacgcgggggctggcatccctttctttacataacttaaaaatagacagtgtgctatgatgaaagattggtgggcgaaattcgggtgttttcttacaggctggaactaccagatattgggtggctgtaccgaagccagcaggaaacagttaaaaaaatattcttctgcaattttaatactggtcatactttggtcattcatagggtactcttttgctgaacggtacgtaggagcacccatctggggccgtatcctaaccgcctttatttttgtggtgatcattgttcagattgagcgccagatcattcttaccgtaggtcgtagtaaatggcttagctggtttcgtgtagccattgcttttattatggctattctcggatcctctattctggaccagattattttcaaagatgatattcaaaaaaagatgatccagatcgtagaccggcaggtaaatgaacaattgtctggccggttaacgattattgataaaaagcttggggaactgcaggttgaaatagattcactggataagaaaaatctgattttatacgaagaaatatcaaagcaaccaaccataaaaacggtttctcaaacaataaccaagatacaattcaggcaaggcgatggcagctttactactaggcctcagacaaccatatcaaccacgccgattcccaatcccaaagtgaaggaaaccgaaataaacgaacaaaacctggaggtattccggaagcaaaaagaagattacacgcaaaagaaaataaaagccgaagcatcattgaggcaggaattaaaatcaaaacaaggcttcctggaagaattaaatgcaattatcgaaatattaagagagcggtctgtggccttattcttttattcaattctttttttctttttaatgttccttgaattatttgttgtggccagcaaaactaaggacacaaaatctgattatgatcttgttgtggaacatcaattaagccagaaggtaaaaacattgaatcaattggtaaaatagctggtgcttatttctgatcaatattctgtcaattccaaacagtttaaaaatcggctactcagcgcgactgatgagcatgcgataatcaccgatcttttaattgagcaacagagggagtaaaaaaatgctacagtatattgagggtcttaaggcctccagggatatgatggaccgtttggcgcagaaatagtgtgaccttttatgttagaatgattcctggtgctatttcacaattgacgcttcatttccttggtgattcgctttttattgaggatgaaaataaccacttggaagcgctttctgttttgttcattttgttactaaaacaaaaatgccccgcagataggcgaggcgctaaatgttttcacaacggaataatccttattgtgaattgctttcagggcaaatatagcataattcgtatttgatcaaatacgggaaaccgtaaacattgaaatatataatatattattttagaaaatgaattaaagaaatttaggaaacgagttcagcaaattggaaagttataaacttgctgcaggggagttgtagtattttttaattttccaattcgctaaaaacggggttggtaatgaagcaattcacaacacaccactcacaaaatgacgaaggaatggtatctaccaaccccaaagcaaagataagttttttacaaagattgagtggtgtgagttcttataaataatttttcgtatatttatttgaaaaataacgaattatgccgcgaaaaaatatactaggcctagatcttggcaccacttccatcggctttgccaaaataattgaggatgatgattatcagtgctcttctgttgagttgatcggtgtacgtgtaaatcccttgaccacggatgaacaaactaattttgagaaagggaaaccggtatctgtaaatgctgatagaacactcaaaagaggaatgcgccgcaatctggaccgttaccagctgcggagggattatttaattgagatactgagaacgcaccatattattactgcggatacaaaacttgctgaggacggcaaaaataccacacatactacttatgctttaagagcattggctgctaccgcggaaattccattggaggcttttgtccgggtccttttggctattaataaaaaacgaggctacaaaagcagccggaaagctaagaatgaagatgagggtcaactgattgacgggatggcgatagccagaaggctgtatgaagaaagcctgactcctggacaattttcttatcagttattgaaagagggcaaaaaatacctgcccgatttttaccggtccgatttaaatacagaattgaataaggtatggaattttcaaaaacaattttacccggagatattgaccgatgaatttaaaaggcacctggagggaaaaggccagcgggctacagcagtggcattttgggggcaacatggatttagcatggcggaaaataaagggagcagggaggagaagaaactgcatgcctataaatggcgcagcgaagcggcacataaacaactaacaaaagaggaagtggcgtttgtgattactgagatcaataacgatcttaataaatccagcggctacttaggtgccatttctgacagaagcaaggaattgttttttaataagcaaacggttggccagtatttacaccaacagctgaaagaaaacccgcacacacgtttgaaaggacaggttttttaccgtcaggattacctggatgagtttgaaacaatttgggaaatgcaggcaaaattctattcggcgttaacccttgaactgaaagaagaagttcgagatgtcgttattttttatcagcgaaaactgaaatcacaaatgggattgatcagcctctgtgaatttgagagtaaggaaattgagattgaaaagaacggggaaaaggcaaagaagcggataggcttacgggttgctcctaaatcatcgccgttgttccaggagtttaaaatatggcaggtattgaataatctggagtttcgtaataaaaagaccaaagaagtgtttgttccggagatggccgctaaacagcaattgtttgatgagcttaatattaaagggaatctgttggcgagtgaagctataaaaattctgggttataaaacaaaggattgggaagctaattatcatacattggaagggaatcgaaccaataaatctttatatgatgcctggcttaaaattttagagttagagggttatgatgaaaatttgttgaagctaagcggtagcgatgatattgatgtctccaaaattgagaagcccgcgttggaaatcagacaaatggtgcttgctgtttttgaggttttgggtattagtggcgcaattttggattttgatgcagaagcagatggaaaagcatttgaacaacagcctgcatatcagttgtggcatttgctgtattctgcggaagatgatggtaaaaaatattcacaggaagatatatttacatatgggcacgacaatattggattaaagaagaagctgtgtgaaaaatttggtttcaggccggagcatacgaagattttagtgaatgttgttttcagcgatgattatggtaacctgagcagcaaagctatgcgaagaatttatccgtttatcaaagagcttacttatgacaaagcctgtgcagaagcagggtacaggcattcggcggcttcgctcacgaaagaagagatagcggcccggcctttacaaaatcggttggatttgttaaagaagaatgaattgcgcagccctgtggtagaaaaaatccttaaccaaatggttaatgttgtcaataccctggttgacgatgaaaaccaaaatcgaaaagcccggggattatctgaagattttcattttgatgaaataaggattgaactggctcgtgaattgaaaaaaaatgctaaggaacgtgcggagatgacaacaaatatcaacactgcaaaacaatcacatgaaaaaataatcagaatcctgcaaacggaatttggtgtgcccaatccttcccggaacgatattgtccgctacaaactatatgaagagctgaagaataacggctacaaagatttatataccaatacctatatttctcgtgacatcttgttcagcaagcagatagatgttgatcatattattccacaaatgagcttgtttgatgatagtttctctaataaaacggtggtgttcaggaaagataaccaggataagggaaataaaaccgcctatgattatattcttggtaaatatggagaacaagcattggaagaatatatttcccggataaccagcctttttgaattgggaaagaaaaataaggaagagggcattggtaaggcaaagttccaaaaattgcagaagcgccttgttgatattggtgacggctttatagaaagagatcttcgggagagccaatacatagcaaaaaaagcaaataatatgctttatgctatatgtcgcagtgtggtttccaccagcggcgaaattacggcaaggttgcgggaggactgggatttggtaaacgtaatgcaggaaattaacctgccaaaattcagggcattgggtctcacggaaatggttgagaaaaaagatggcgctcaaaaagagcgtatcactgactggaccaagcgtaatgatcatcgtcatcacgcgatggatgctttggccatagcgtttactcgccatagccacattcaatatctgaatcacctgaacgctcgtaaagatgaggcaaacaagtggcaccctgtcgttagcaagattgaggaaaaagaaacggttcttatttatgatgatctcggcaatcggaaaaggaaattcaaagctcctatgcccaactttcgcgaagtggtaaaagagcacctggaaaatgtgctgatttctcataaagccaagaataaggtcgttacaaagaataaaaataaaataaagacagtcagaggtgaaaaggtaaaaacagagcttacgccgcgcggacaactgcataaagaaacgatttatggtaggtatcgttattatgaaagcaaagaggaaaaaatagggccgaaatttgatgcggaaatgataggaatggttacgaatccccaatataaaaaacttctgttggagcgacttgcagcaaatggaaacgatcctaaaaaggctttctggggtaaaaatgcgttgaacaagaatcctctttacgttgatgaggccaggcaagagcttttgcctgaaaaaattttattgcgctggctaaacgatgattattccattcgcaaagacgtaacgcctgaaaatctgaaagatataaaaaccattgaaaaaattttagataagggagtaaagaaaatattgttgaagcgcctcgccgactttggcaatgaccccaagaaagctttttccgatttggataaaaatcctatctggcagaatgaggctaaacgaattgcaataaaacgggttactatcagtggtattaaaaatgcggcgccattacatcataagaaagatcatcttggtaatgatattttagacgaaaaaggaaagcagataccgagctcttttgtaagtaccggtaataatcatcatgtagctatttaccgtgatgcagaaggaaatctacaggaaagagtcgtttccttgtttgatgccgtgcaattagtaaatggtggtgaaccggtaattgataaggagtataacaaaggaataggttggcagtttctgttcacaatgaagcagaatgagatgttcgtttttcctgatgaaaaaacaggatttaatccccgggaggttgatttgttaagttctgggaatagaaagttgattagtcctaacttattcagagtacagaagttggctagtaaaaattatttttttcggcatcatttggaaactagtgttgaagaaaagaaagagctaaagaatatcgcatataaacctcaattggggcttaatgctctaagtaatattgttaaagttcgaattaatcatataggtgaaatagtaagcgtaggtgaatattaaaagcaaaaggtgctcaattttaaaacatattatcatatttataaccacgccaatggcgatgataacctgtttcgggagaaggagaattataatttctttttaaagaaatatcatcagcatatcgatcccatcgccgaaaccatcgcctggtgcctgctgccgaaccattttcatttgcttgtaaagataaaaagcgaggaagcgatagccgaaactcatccaaagtttcaaactttggatgagtttgaagcccggaccgcttttttaagtaaacaattcgctaatttcttcagtagctatacgcaggcgtttaataaagtttacaaacgacggggttctttatttataaagaattttaaaagaaaagaggtgttggatgacgattatttacgtaatctgatattatatatccatctcaatcctgctaagcatggatttaaaaaagagattgacgaatggccctggacatcctggaacatgtttccaaacgaatactctcaattggcaaaagagctgtttggtgacctggaacaatataaccgggcacataaaaataaacaaacagattttgaagaatatgtgaaattggagaatgatttaatacagagtacatgatcaaacgcactctatatttcggtaaccccgcctatcttaaaaccaaaaatgaacaattgctggtggagttggcggatactggcgaggtcaaaaccgccgctattgaagatataggcgtgctgatcctcgatcatcagcagatcaccataacgcattcggttattgccaaactgctggccaacaacgtggcgctgatcacctgcgatgatattcacctgcccaccggcctcatgctgaacctggacgggcatacgctacaaagtcagcgctttcagagccagttggatgcgtcgatccctttaaaaaagcagctctggcagcagacggtaattgccaagataactaaccaggctaatttgctgcagttgtaccgcatacccaataaactattgctcaacctggctactaaagtaaaaagcggggatagcgataactgcgaagcgcaggccgccagccattactggaaaaatatatttcctttgtttcctggttttaaaagattcagagaaggggagcctcccaataacctgcttaattacgggtacgctattctgcgggcgatcgtagcccgcaacctggtgggtagcgggttgttgcccacgttgggaatttttcaccgtaatcaatacaatgcttattgtttggcagacgatattatggagccctaccggccttatgtggatcggattgtgcatgaaattgtccgcatgaatgggaaattcctggatatgactccttccatgaagcaacaactgctcgggattccggcaatggacgtgattattgatgatgaaaagagtcctttgatgaacgcggtacagcgtactacggctagtttggccaaatgttttgaaggcgcgagtcgtaagctgctctatcctgttttgtcgccttcattctgaaacgatgaattttgaacggttaaatgcttaccggattatgtgggtgattgttatgttcgacatgcctacggaaaccagggttgaccggaagcgctatgcgaaattccggaagcagatcctggacgatgggtttaatatgttccagttcagcatgtacattcgtcattgcatgagccgggagaacgcggaggtgcatgtgcaacgggtaaaaaagatcctgccgcaaaaaggacatatcggcattatgtgcattacggacaaacaatttggccagatggagatatttaacgggaaggatgctgccgaatcgccggtgccagcgcagcaattagaattattttaaaatgaaaagatccgattttatcagaggagtggttggctttttaggcatttcagtattgccaccgggtgtagtaaaacaataccaccggatctatttactgcagacttttgtgcggggtttcaggttttataaaggggtggagttattggatcagatgaatgaaggggatctgttggagctggtaagagagccggataatcaacacgatgaacgggcgattgcattgcattttaacaagcataagatcggctatgttccgcgggaggataatgatatactcagtaaattgatggatgctgaaattataccgttacaggcggaggtgacacacctgaataaagaagccagggcctgggaaaatgtatatattgccgtatacgtgttaaaagaaacagagggaagtcttccgggatcagcaatgtatttaacgcaactggaaacgccgtattatcgtagtttgaaattgtcggcagataaagtggccaatgtttattttagagaagacgaggatgttatggatgccgatgcgttttatgatgctatggttactaattcgaaggacgatagtgtttatacaatccttcatgatgattttgagtccggacaaaacttgcaggagataatcagtcaggggcggattttggtaaatatcaacaggcttcctgaggatttgaagagggatgccgtaatccgggcattaaaagatggagtaatagccctggatgatgtttttgacgacggcggttatctggtggctaatattaaccgggtggcgggtctttccggccggatcgaaagggtagtaggcgcatttgataagtcgggaaggctgttttatgaggttctgtttgtgtaaaaatggaagaattaggataaaaaaacgggcaatatcgcccgtttttttatcctgttgacaacttgaaatcctttgctgttgtgggttttgacaaaacgtgttgtcaaagaccaaagttaattcgaaaattgaaagcaattcacaacatcaaatacctggtcaactacttttcttagttgtcaaagaccaaagttaattcgaaaattgaaagcaattcacaacaaagcctaaaggcataaaaatccagcggaagttgtcaaagaccaaagttaattcgaaaattgaaagcaattcacaacaataagacatagcggccaaaaagcgccatgagttgtcaaagaccaaagttaattcgaaaattgaaagcaattcacaacgcacctgttgcacccgatgcgttgtaccgcgttgtcaaagaccaaagttaattcgaaaattgaaagcaattcacaacggtaggattctctttgccccatgttcttagttgtcaaagaccaaagttaattcgaaaattgaaagcaattcacaactatttttgatgtaaatatttacagaaacaagttgtcaaagaccaaagttaattcgaaaattgaaagcaattcacaacttccaccatcgattaatcccacctgcctatgttgtcaaagaccaaagttaattcgaaaattgaaagcaattcacaacagccagtagtgttttgccactcggtatagtgttgtcaaagaccaaagttaattcgaaaattgaaagcaattcacaactcaggacccggcggtcagcccgcgatggcagttgtcaaagaccaaagttaattcgaaaattgaaagcaattcacaacgccccgaatgcgggtccattgaggaggctggttgtcaaagaccaaagttaattcgaaaattgaaagcaattcacaaccccaacagcatggaaccgatggattaaacgttgtcaaagaccaaagttaattcgaaaattgaaagcaattcacaacccggagaccgaaggtatggcctttccttggttgtcaaagaccaaagttaattcgaaaattgaaagcaattcacaaccggtggtgccggtcttattggtggtaccatgttgtcaaagaccaaagttaattcgaaaattgaaagcaattcacaacttctcagccttggcttcccggatttcctttgttgtcaaagaccaaagttaattcgaaaattgaaagcaattcacaacggttgacatggctaagtgtttgactcctttgttgtcaaagaccaaagttaattcgaaaattgaaagcaattcacaaccacagagtataaatctgttccttcgagtacgttgtcaaagaccaaagttaattcgaaaattgaaagcaattcacaactttattagttcgttatcgtcaattttgttgttgtcaaagaccaaagttaattcgaaaattgaaagcaattcacaactactgagtataagtctgttccttcaagtacgttgtcaaagaccaaagttaattcgaaaattgaaagcaattcacaacgtgctgcatagctggccgggttacccatcgttgtcaaagaccaaagttaattcgaaaattgaaagcaattcacaacgcagccttcggaatcatgaacgggttaacgttgtcaaagaccaaagttaattcgaaaattgaaagcaattcacaacgccgccgcccgccggaccacttcattcggtgttgtcaaagaccaaagttaattcgaaaattgaaagcaattcacaacagagtcaacgaaggtgccgtcatcgatgtagttgtcaaagaccaaagttaattcgaaaattgaaagcaattcacaacaagcggctttaaattttgcaagagatttttgttgtcaaagaccaaagttaattcgaaaattgaaagcaattcacaactgtctgtatgtaatgcaaccactttttctgttgtcaaagaccaaagttaattcgaaaattgaaagcaattcacaactgaaggctctttatgttcagcacggcagcggttgtcaaagaccaaagttaattcgaaaattgaaagcaattcacaacaaagttgatgcggctcctgtggctcactctgttgtcaaagaccaaagttaattcgaaaattgaaagcaattcacaacaggcagacaaaagggataatatacggcaacgttgtcaaagaccaaagttaattcgaaaattgaaagcaattcacaacagagaaggataaggttactcgtgccacggttgtcaaagaccaaagttaattcgaaaattgaaagcaattcacaaccgccccggccgatatggcatcaaaggttgtgttgtcaaagaccaaagttaattcgaaaattgaaagcaattcacaactcttatgttaacatctattctattcctccagttgtcaaagaccaaagttaattcgaaaattgaaagcaattcacaactgaaatgattcaatagcatccgcttcggctgttgtcaaagaccaaagttaattcgaaaattgaaagcaattcacaacggatacgagtaatatagttcctggtacgctgttgtcaaagaccaaagttaattcgaaaattgaaagcaattcacaactgaattgcaggagttgttggacaagcgtgcgttgtcaaagaccaaagttaattcgaaaattgaaagcaattcacaacataccgttttacttccttgttttcggtaaggttgtcaaagaccaaagttaattcgaaaattgaaagcaattcacaacctaaatgatccagacactacataagaactagttgtcaaagaccaaagttaattcgaaaattgaaagcaattcacaacctaaatgatccagacactacataagaactagttgtcaaagaccaaagttaattcgaaaattgaaagcaattcacaactagctgtcgtgagcatggtgttattatgggtgttgtcaaagaccaaagttaattcgaaaattgaaagcaattcagatgcccgattcgtatttctcagggaaagtaaaaaattcgatgttgtagtttttacggaacgtaacgcctattaccagaccgaacgttggtctatggaactaaacagacttctgtcgtagtggctgattttgaaaacgggattccatttggtacaatttccgacaccctcaatatgttttcgcgagtcgctgacttataccacataaatggtatccataaaaaaacgaaaacgtacggatagaatgctttagtctcttgtcgattcgttactacgatttcataaaataagggtgcagacccagccacaccctttaagcctttgggattggggaggcctaacctcgccgctcctgccgcaaagataatggattttaaaaagtgaaggcgcaaactatgttgcgccctctaaacatttgcgatcggggaggataattctcgcctgtcgtaacgcaaagctgcttttttttatttttagaaatatctattaaatgcatcggatgatcccggaggtagacatatcccatatttgccgcattgctgatgttttgattaggaaatcataaatctactataagtatcccggaaattgaaatttataattttgatccgttataccgcttttatcagcccgccgtctatcgccatattggttcccgtaatatacgatgccttatcagaagccaggaaggttatcaggtctgccatctcttttggccggcccaggcgtctcatagggatggtgtccagcgccagctttttatattcctcaaaagggatgttttttgcggcggcttcccgttcgtatagttcaaggatacggtcggtttcaaaattgccggtaaggatattgtttaccgtaatattattttttgctacctgcgtggctaatgttttaccccaggtcatcactgcggcacgaatggtattggatagggccaacgcctcaatgggctcttttaccgagcgggaagtgaggttgataatgcgaccggaattattggccaacataccgggaagcgctttttcagtggtgtattgcacggtacggaaaagaagattgaacgccgcaacataatcggcatctttcttatccagcgccgtgccgggggctggcccgcttgtattgtttaccagtatatcgaccgtatttgttaaaaaataagcgtcaatgtttttcttataagtatcgatgtctgaaaaatcagctaaaatatattgatgctgctgctgaccagccgccggcaattccgccagcacctgttttaacgctgcttcattgcgcgccagcaaggtaacgctggcgccgctggccgccaactgcagggctattgctttgcccagcccgttgctgctggcgcctactaatgctttttggttgtttaaagagatatgcattacaaagtttattgagtgattgcgcccggtttatttaaaagattaaagaaacggtccaggttggtgcccaagcttttttcaaaactggctttcatatcggccggttgcggatgtttgtttttccaggtggcaaaataatcctggaaggctttgtccacttttgcctggcctacctggcgttccagtaaatacatccatagcgccggttttatataggagctcagcgcatagtcttcagaagttttaaagtccgcggagggtgtttccattggggtgggcatgggtatctgggtcatggcgccgtaaatgcgttcctggaactgatccgcaggcaactttttaacggtctctggaatatcgcccagcatcgaattggagcggtatttttccgcttcgtaccggaactggaaataagagttcatcccttcatcctgccaggtatgcatacgctcattgctacccagcatgctcataaaccagttgtgccccacctcgtgcgtaataaccccgtccagcgtttctttttttgcatcggggctggtgataagcgtaatggttggatattccatgcctccgctggcattattttttggaccttcaaaggcctgcactaccgggtattcatattcgccaatccagttgctgtaatgatgcaccgcatcctttatataatcaatactgttgttccatagagtgcctttggtattatgataataggagaaagcatccactgtttttcctttcaattgaatggtgtcgtattcaatgatcaatcctttttctgcaaaccaggcaaagtccggaacatcttttgcaatatactggagtgtttttacgcctcctttgcccggttgatagatgacctgttgttgccggttagctgtgttttttttgccgattgatttatacaattccaattcctccttgttctgtaacacccccgtggcgcctacaacatattgtgccggcagggttagttttacattataatcggcatactcgctgtaaaattcccccatatccaaataaggaaattcatgccagccttttttatcataaaccgccggcttggggtaccactggcagatcataaattcgccgtctgcaaaaccggaacgggaaaaataggaaggcagctttactttaaaatcagttgcaacagtggcggtggcgccgggcttcaatggctcgggcaacaatacctttataatatctatgtatttggggtgtgcttcagttttggccgttttgccatctactttaaagtccagcccgtcaataaagccgtaggtgaccttgcctaatttttctttgcgcgaggcatcgctccttatttgtttaaaaagcgctgtagaatcatttttataaccattcggccatagatgaaaccatataaagttcaatgtttcgggcgaattatttttgtaagagatcgtttctttggccgtaacggtgttgtctttgtcgttaagcgttgcctccatattgtattgcagttgttgttgccagtaaccctcctgggcaaatcctgcaagggcagagaaaacgaaaagggtaagaaagaattttttcatgtattttttttatcgccgggggcggatttataatgcacccttcagggcaggtttttaaagatagggtaaaaaatgaaaccgggtagtatttccggcaaaccgcattggttgtaaaagggtgcttatttacgaatgtagcgactgatttttacggtgttgaagggaatggtcttacactgccggaacggtctttcttacaaaagatttaacaagaagcatacccgctacgaagccgccgatatgtgcggcataggccaccccggcttccgcctgcgcgtgcagggaattatactggcttaccacctgcatcaggatccagatgcccagggttattatggccggtacgcggaaggtgaaagcaataagcagtatccgtatcctgtttctggggaataaaataatgtagcccccgagcacgccggatatagcccccgatgcacccaggctgggaacatacaacccatcatttaataaagcagacataaacacatgactgagcgaagccagcatcccgcagatcaaatagaaggcaagatagcgggcgtgccccattacattctccaggttgtctccaaaaatggagaggtaaagcatattgccaaggatatgcgcaatgctgccatgcataaacatggagctgagtattgttgcataaaccggtatcggcgtaggggcaaggccatttcccgcaatatcatgcccgcttaaaatttccgccggaacggtggagaggctcgctatcatgtattggttggtgcccagggcctggtaataaacaaaaacgaaaatgtttagtgcaatgagcagataattgatatagggagtaagggtgcgtccggtattatcgtctccgatcgggaacatagttcaatagttttattacatggaataggcgattaccacacaaagtaggataattattaacaccatcaaaacgggttgaaagcgggcccacaaaatggccgcgcgcacttctttttctttttgttgaatcaatatttcagcctttgagccggcgtggatcttttttaattgtgccagcagcacctggcggtctgcataagtaataaggtgcatactatcgatgatccatcgcaccacctcataattaatatcttgctgatccgcatcgttaaggagcattattttttcatcatcgatcagcgcgcccagttcccggaacaatccttttttatcaacccggtaggcatctgctgcagccaatgcctggttggcttttaatacggcattgagcagttgtgcgggtgtgattttcgttgattccgccggggtgcccatggcttggtgcaaccatcgcttttgtaaatagg

SEQ ID NO: 2140 - DNA, 24278 bp, synthetic construct
  source 1..24278: mol_type = other DNA
  variation 19158..19314: note = n is a, c, g, or t
  misc_feature 1..24278: note = Synthetic
caagttcctgcctgtccgaaaacatatctattaaccatattatgctattccgctcctgatggcatttgtaaaaacgcagttatgaaaaaaactttatctaacctttccgtattattattcgccttcttaattagtttcaaagtacaagcacaggtttgtccttcgtttcaaacaggtacagttaatattagcggtaccatcaactcttattttcaaccttctgcggcaacattggcagcaggggctacttcgttcactttattatcggccggtactacatatggtgcagatggtgcaatagccattggcgatttattgcttgttatacaaatgcaggatggcacaggtactaactttaccaatacagcagcgtacggcactattaccagcaccctggccgggcagtacgagtttgtaatagccagcagcgccggtacacaggcaggagggagcattattagttttgttcgggccgatggtacaaccggcggcttgtataatcaatatgtgcaaaatccaactaacgcagcaggacgccaaatctatcaaattgtaaaagtacctaactatgaaaatgtattgctaacaggtaaccttactgcattaaactggaacggtttaaggggaggtatagtagcattaagagttttacgtaataccgattttaataccaattttggaattaatgtagcggggcgtggttttaggggtgccggtgccacagccgtttccggtataagcgccggtgacatttatagatcaactactactacacatggtgcagctaaaggtgagggtattgccggtacgcccaatgtagttaatacatttggtggcagtactcgtgttactacgggtacaacatatcctaatggctcgtttatgacaggtagtccggccaatgctggtggtggcggtaaagatacgggccctcaggcggcatcttgcgattatacatttaatagcagcgattttaacagtggcggcggtggtggtggaaatgttggtgccggtggtcgcggtggcaactcctggtgtaccggtgctacacaatttggcataggcggtaaatctttatcaacttatacacaacgaatgttttttggtggtggtggcggtgccggcgaatcgcaggatgcaacacaaggctttggcgggtttgggggcggaatagtttttttctttacaaatacagtaagcaataccggtgttaatacaaccattaatgccgatggagaagctattaaccgacttgccgattcgggcatcagttatcaatctgaaagtgaagccggcggcggtggtggtggcggtggtagcatactggcttattctgccaatggcttagcaagtttggccataactgcacgtggttcagctggtggaaatactgttttgtttgacaatactacattcacacccactcaatcacccaatggcgagcatggtcctggtggtggcggtggtggcggaaaaataatacatagtaccactaccggaaccgtaaacgtatcaggtggtgcggccggtcgtttttacgccatgtttttagccgcagcatcaagagatcgtggtgtgtttggtgcagtagccggttcgataggtgccatacaaacaacagccacggccccattcccattaccctgttcaaatatattacctgttaacctgttaagttttacggtaacatccgcaagcggtgaagcaaggttgcaatgggtaaccgctaccgaaaccaataataaaggctttgaagtacaacgcagcaccgatgcggttaattggtcgtcgctaaactttgtaacaacgctatcacccaatcaattacagcaaaccacttacaactataccgatgcggctccctataatggcattagttattacagacttaagcaggttgatactgacgacgcctttacttattcgggtattgcccggtttacaaaaggcaactatgaagccattacggtatatcctaatcctgtaaacgataaattattcattagcggcctttcggggcaaaacactattgtaataactgcggttagcggccaaactattaccagtttacaaaccaacggacttaccacccaaaacattaatgtaagtaaactggctagtggcacctattttattgccattactaaccaacaaggtattacgcaaacctttaagataaataaaaactaagggatatgtttaggtagttaactagtgtacattgtgttacaacaatatcaacggcctgtaagttgcgttaaagcttacaggccgttaatgtttttatgttatttatggcgttgccctgcttccgtgtaacgtaaactacggctcgtacttcgccttgtttactaacacgaaattacgggcccgctgtccgctgtatcttttgccccacgctaccagctgacgcttcgcaaaaggatgccgcttccatccctaacgcagtgtgattgctaagtaatattatactgtatgcctttttaacccgagcgccgtttataaaatggtttaacaacataaaaggatataagccttataatggttctttttgtacaataaatggcttgatgttaatattattggcttatgttctgatgcttatttatagggccgtttgaaaactagtaagaaaaattaatgttgccagcacctgcttccttcggcaactttacgtttacaagtccctcccttttttgtaatagccccgcaggttgatgaacggataggtttactataccctttagtattgtaattatcgttgctgattttttcggcggtatgtatgctatcaacttttcgtgaatcaatagctatggcattagtagatatagtttggctattggtatactcccaggtctggttgtcgtaaataataattgttctgccgttggatagtgtaacggtatcaattttcttttgcgtacaggcgaaaaaagaacacagcaacagcgtgaaagcagcaatattttttttcatttaaaagcagttaagaggaaaacattagccaaaaatatatattgcgttttcgttttgcaacacatcttggaacaatttcttctacataatttaccttagctgtcatgatttgtttattatggtgggcaaaaactatagccaacgtattacgcaactaaaatttattttttctttctccataaccacggttcaaccgggtttgcttctgcccataggcctatctgtttttctcttgcagttatttcaagtacagcatagtcattatcattcgaatactgtttaaaatgccaggccagtccaattttaaccagctccttatttacatatcttccatcttctagtattatctctgcaattaatcttttgtttctatcgtatttatcttcatggcttattgttacatattttccaaaacagagatcggatgcaaactgtttggctttagtgccaaacggttgtttcttttctgggcaatctatatgagccaatcttactacaagctcttttccttcaaccagtaaaacaaaagtgtcgccatctttaattttaactactttgtaaagggaatacagagatggcgtgctggtaagttggtctaaactcttttgaaaagtttcttgtgcgttgccttgctgatttatgcaggcaggtagagacagaagaaggataatgattcgtaatagtagcatatactggtttttcttatgcacaaagtataacgacaaatagcataaaatttatggaaaaccgtaagaaaggattagttggttttagaaagaatatacttatcaataatataaccggtcaccggctttaatcttttcttcatatctacaggatgtgctccctcgcttgtataaaactcaatgtttccttcgtttttaatataccatacgcgtccaatatcttggtgggtaatagtatccggcgtagttatctttttaaagtgaaccagtttaaagctatccaacgctattactaaagcatcttttattgtctttttacacgatacttgttcgtagtggtcgcctgtccagtacatgcacccttcagtatgggtaaacgtattgcccataacagctggcttatggttggtgttgttataatagatatacattcccgctgctccaagaagagcaatgccaatataaatacctatctttttaaaacttccattaggcttattgctgcttatcaatttgcctgtatgtgtatcactcccattgccgaatggtggaggaaaaggaagtatatgcccgttatccggttgttcacctccatctttattttcttcaagtgtaatagtttctcctaaactttctgcatcctctacaatatatttttttccaagttcaaatggtctgtcattaaaatcaatcaaccaggctaatagctcaatgtttttctcgtcggtattattagtctccttttttaaatagttgattagcggcttaaacttagacggttcacatttttttattgctttagccatggataatttatcgtcatactggccaaaaaattcatttaatgcaatctggtcttttttagggtcatattttttttcataatgagcaatacataggtctcgcagagccgctggttttaagtgaaccaaagcatgagaaatcgtattgttttctatcttcttctgataatcttctagtaccaattttatataatctccaaacattttatatcagtattttaaatacaagtatcggaattttcggaatcctctcagcataatcaaaacttcaatagaattagcagaattaccggaattatcttataatcaacgcattgtccacctatatcttcgttttgcaaatcggttaaaactcctttgctaagagtttattgtacaaaatcggttttgcaaacggtattgaaagcggtcgcagataataggatgggaagcctctttgaaagcttccgtaatcaataccatccacttcccccaacgggtaagaagcgctgcttacccacccaaccctgcgccggaaatcttacaccggccgcagtattattcaacttttaaaacttaaaaaatgatatcgtggatattcgcattttggttgtcccttatttcaggacaatataatacaattaacaataatgatgataccatcatcacgatcatgagcgatggtgataccggaggggaaacaacccatattccgcctacacctcctattaaacctacaaaaccttaattacaatttaagaggttacataataaggcaagcacaatgcttgccttattttttgtacacagtttggtaaatgtcttatttttaagacaaataattttagtgagatatttaccacccctcttggttatattcttagtttgttgctttattcttgcctgtggtaagatgcaaaaggcagacccgattatcatagccgatgattataaaaaaggcgaaaccctttttaatcttaaaaacgattcggctttttattacttcaaccgctccgctagttcatcaaaggatagtttacaaatagccatggcaaatgtttatatggctataattcagtcttatgccggcgataacttaggtagccaggaaaatttgttacaggcacttaagcttatgaacgaaaataatgaacaggatcatcatgttcttttgtcctgttataatcagttggccaatgccaacctgaatatgaaaaattataaaacagcacttacttattatgataaggcattaaacctaattaatgataaagcgttccgatggataatactgaacggtaaagcagtagcttatcaaaagttaaaagaatatgatgaggcacttactatttataacaccatacttaaagacagcataaccagtccgaaagaatatgccagaataataaccaataaagcctatacaagctggttgcaggataataaatacccggcagataaggaaatgttggatgcgcttgatattcgacaaagtgaaaacgatctgtggggcttaaatacaagttatgcccgcttgtcagattattatactgttacacagcccgatgctgctttgctctatgcccataaaatgttagctactgcacaagcattaaaaagccccgatgatgaaatggaggcgctgcaaaaactcatccctttaagtggggtaaaagaagctaaaatatattttgatcgttacatattgcttaatgatagtttacaaacaagccgcagcaatgcaaaaaatcaatttgcgttaatccgttacgaaaccgaaaaacataaaaccgaaaacttagagctacaaaaagaaaatgccgaaaaaaaacttagccttattattcaacgagtagggtttgttagtgtgctgattatagttgttattatattttggtggtaccgcaaacgaaaacagcaggcaattagccagcagcagtttaaaacgtcacaaaaagtgcatgatgtagtagcaaatggcttatacggtatcataacaaaggttgaacataatgctcatatagagaaagatcagttactcgatgatttagaaacgctctatgaacggtcacgagatatatcatatgaacctatcttggcagaaccaaatgattatcatgataaaattgctcatttgttgatgtcttttggcactaacgaaacagccgtctctatctccggtaatacgcctgagttatggaacgcaataccggtaaaatataaggagcagttgaaacaggtattacaggagttaatggtgaatatgaaaaaacatagtgcggcacaaaacgtagccattatattcgctcaacaaccacaaacaatagaaatacgttacacagatgatggcgtaggcctaccagaaaatgttaaatatggcaatggattggccagtacggaaaaccgtattaaaagtatgggtgggcaaattatttttgacccgttagccaacaccggattatccattaaattgaacatcccaactaaatgattgaaaaagtattaatagccgaggatcacgaaagtgcaaatatatctgtacaaaaaacactaggcgagttagggataaccaatcccgactatgtgtactattgcgatgatgctataatgaaaattaaaaaggccgttgctgccggtaattcgtatgatttacttatcaccgaccttcattttgaaaaagatcatcgggagcaactacttaacagcggcgaagaacttattgaagcagtcagaaaagtacagccgggcattaaaatattagtattctctgccgaaaccaaacccgtacttataaacaacttatttcagttgcaccatattgatgcctatgtacgtaaagcccggggcgatgcacacgagctaatgaaagctataaatagcattaaaattaaccagccctacaaacccgcttttttgctagagcaggtcaggctaaaaaaagcacacgattttacacagtacgatatcaccattttatccctgatggttgccggcaaaaaacaacaagaagtgtctgctcacctcaaacaaaacaatataaatccttccgggctaagtagtatagaaaaacgattaaagtatataaaagaagcactgcgttttaccaccaatgaacaactaattgcacactgcgtaaaaatgggcattttgtaattaaaatatgttttccggttttccgtaaaaaactatcaaccccttattatatttttaatatcaaatattgttaaagcatatatatagttattgctaaccgaaaagcatcattcaactgataaactctttgaagaaaaatttgaatgaagctactgataatattatttctcgcttgcataggctttgcctgtaataccacatcaacaatggtttacttgtgcgaaagtagtggggcaaaacgataccattaccggcaagattgtaagggattaaaaaactgtagtcaccaaattaaagaaacaacaataacaattgccaaacaaaaaggtagaacgctttgtggctgggaaaaataatagggcgaagtttttatgtaacaagcagcagtaatactaatcaccgtcccttgcgatccgataggatcgggatttaatttatttccagtggaaatgaattaaatactaacccttgtactgaattaatgctattggccaaaatgtttctaaccccgagcttagcaagctgcgtttgattcggggccgtactacgtatttaatcggagtattgctccctctcctttggagaggcttggggtgaggccctaatcaccatttagcattgcctaaaattattatacattaaccattatactttttcaattactatggagtccgatttaaaactaaaactcgagcaactgcaccaacgggtcgattcgttaaaaaaccagataaacaccgaagaagctaccaagaatgcatttgtaatgccctttatacaaatattgggttacgacatttttaatccaaccgaggtggtgcccgagttcatttgcgatattggcaccaaaaagggagagaaaatagactatgtaattaaaaaaggcgacgagcccgttttaattatcgagtgtaaacactggaaagaaaatgtggatgcacacaactcacaactacatcgttactatcatgtatcaaaatccaggtttggtgtattaaccaatggccatgtatataatttttatgccgatttggaacgacccaacatcatggatgaaaaacctttttttactttagatctttccaacctaaaagatgcaggtttaaaaattctcgaaaactttacccgcaaaggatataacctagaaaatatactcgattctgccgaagcattaaaatacatcaaagccattcgcagcgaatttgaaaaagaattgcaagagccaaccgacgattttgtgcgtttactggtaaaccgttttttcgataaaacacttaccgcctcaaggttaacaacctttaaagaatatacccgcaaagcattatctaattccataaacgaatccattaatttccgtctaaaaaatgccctaagcattaacgatgcaataccctccaaagacgagccacagattactgccatagatgaaaatgcagacagcgtaaaagttatcacttctcatgaagaaatagaaggctcgcaaattgtaaaagctattcttcgggaactattgcccgctacccgaattgcttttcgcgacacgcaatcatactttggcattttgctggacgacaataaccgtaaacccttatgtcgtttacactttaattcatccaacaaatatgttgagttatttcacaacggtaaagacaatggcgaaaaaaagttgttagattctttagatgatatttacaaatacaagacggagctattagcaacagtaaaaaattatgaataacaattttattatggcgttgcctgcggcccgggctgtccgctatatcttttgccccacgctacatggccgatgctgcgcaaaaggatgccgcttccatccctaacgcaaatacaaaatcacatttcgttctttgatgtaaaacggttttctagtgcaggtattcataacgctattaagttaaggagtacgtcatgccgaccttaggaggcatccttttctagcgcaggtctccagacctgtgttttattgttacttgtctaactttaaaatgattttaactttacttattttcaaattaagtaacgtatggtcactggcgaagtattgcgccaggtgcttgtttgtttaaatttaggaagacggagagttgcacaagatgagcaacgtagaaaacttccacaaaaattttatttattaatagatagttatagacaaggcataaaaaaaccccgcagataggcgaggtgctaaatgttttcacaacggaataatccttattgtgaattgctttcaagagtaaatgtaaaaattaaaattgaattgaaaaattttttaataaaaaaatatagaatcgccttataacaatcagctagatattttatttcaataaatactttttgtatgttagcaatccaagcttattaaccatcaaaaaaaatgcaatgccacaaaaacacatccttggtcttgatctcggaactacatctatagggttcgctcacataatagaaggcgatacgcctgaaaaatcagaaattattcaaattggtgttcgggtaaatcctttaacaacagatgaacaaaccaattttgaaaaaggcaaacccgtttctgtaaatgccgacagaaccttaaaacgtggagcccgacgaacgcttgatcgttaccagttacggagagaaaatttaattgatactttattaaaagcgaatataatttctaaagattcgattcttgcagaagatggtaaacaaacaacttttgaaacctggcaattaagggcaaaatctgttactgagaaaattgaaaaggaggaattggcgagagtatttctggcaataaataaaaaacgcggttataaaagtagtcgcaaagccaaaaatgaagatgaagggcaagccgttgatggaatggttgttgcaaaaaggctgtacgatgaaaacctgacaccaggccaattagcatatcaattattaaaagaagggaaaaaaactgttccggatttctatcgttccgatttgcaggcggaatttgataaagtatggagcatgcaaaaacaatattatccggaaatatttactaacgaattttataaagaactacaaggtaaaggacaaaaagctacatctgcctctttttggggtaagtataaatttaatactgctgaaaataaggccaagacaagagaagaaaaaaagctacaagcctacaagtggcgcagtgaagctattgtgaaacaattaaataaagaagaggttgcttacgtattaacagaaataaataataacctgaaaaactcaagcggttatctcggggagatatcggatagaagcaaagagttgtattttaacaaagcaactgtcggtcaatatctgtacaaacaattgcaacacaatccacatactcgtttaaaaaatcaagttttttatcgtcaggattatttagatgaatttgaaacaatatggaatgagcaaaaaaaacatcattcagaactgactgatgaactaaaaacagaaatcagagacattactattttttaccaacgaaaattaaagtcgcaaaagggcttggtgagtttttgtgagtttgaaaacaaagaagccattattaatgggcataaaaaaacaataggattaaaagttgcaccaaagtcctcacctctttttcaagagtttaaaatttggcaagtacttaataatgtattggtaagaaaaaaaggaagcagaaagcgtgtggcaaaaaacataaattcaataaccgtgttagatgaaggaaaggaaatctttgcttttgatttagatgccaaaaatttattatttaatgaattgaatctgaaaggcaatttgaaatccgataaagtaattcaactattgggttatcctgcttctgattgggaattgaattatacagaattagagggtaaccgaaccaatagagaactgtataatgcgtacttaaaaattttagatatagagggctatgatgtaaaagatttactgaaagtgaaatcgaataaagatgatgttgaattagacgatttggaagtacctgcttcagaaattaaaaaaatggtgcagcaaatttttaatgccttaggcatcaatactcaggttttggagtttaatgcagagctcgatgggaaagcattcgaaacacaattgtcttaccagttatggcatttgttgtactcttatgaaggagacgactctccaagcggaaatgagaaactatatgatttactggaaaaaaagtttgggtttaagaaagaacatgcacaggttttggctaatatcagcttttcggacgattatggaaatttgagcagcaaagctattcgtaaagtgtttccttatattaaggaaaatgtttacagtactgcttgtgaactcggaggctatagacattcagcatcttcattaacaaaagaagaaattgccagccgcccattgaaaaatcaattagatctgcttaagaaaaacagtctacgtaatccggtggtagaaaaaatattgaaccaaatggttaatgttattaatgcactgattgcaaagaacagaaacataaatcctgactttagatttgaagaaatacgtattgagttgtcgagagaattgaaaaagaatgcaaaagaaagggcggaaatgactactaacattaacgcttctaaaattatacacgacaaaatcttcaaattattacaaacagaatttggtgtaaaaaatccaactagaaatgatattattcgatataaactttacgaagagttaaagaataatggttacaaagatttgtacaccaatacttatatcccaagagacatcttgtttagtaaacagatagatattgatcatatcattcctcaggcaaaactatttgacgatagtttttccaataaaacagtagtttttagaaaagataatttggataaggggaacaaaaccgccttcgattatatcgacagtaaatatggtgcggagaaggtggaagaatttaaaaacagaattgaattattgtataagtcaggacaaaaaaataaggaagacggtatttctaaggctaagtacctaaaactcttgaaacaagaaaatgaaattggcgacggatttattgagagagatttgagggatagtcaatatatagctaagaaggcaaaaaatatgctatacgatattacccgttctgtggtttcaacgtcaggtagtattacagatagactgcgtgaagattggggattggtaaacattatgcaagaattgaatttcgagaagttcaaatcattaggaatgactgaaatggtggaaaaaaaggacggcagttttaaagaaagaattgtggattggagcaaacgaaacgaccatcgccatcatgcaatggatgcattaaccgtggcctttacaaaacatagtcatattcagtatctaaatttcttaaacgcaagaaaaaatgaaacccataaactccatggtaatattactggcattgaaactaaagaaacagaactaaaaattgatgatgatggaaataagaaaagagtatttaaattacccatctcaaacttccgacaagtagcaaaagaacatttggaaaacgtcttggtttcacacaaagcaaaaaacaaggtggttactaagaacaagaataaaacaaaatcgaaaagtggagaaaaaactaatactgaacttactccaagaggacaattacataaagaaactgtttacggaaagtatcaatattatgtaaataaagaagaaaaagttagcggcaaatttgataccgataccatagccaaagtgagtaacccattgtttaaaacccttttatttcaacgcttacaggaaaatggaaatgagcctaaaaaagcatttactggaaaaaatgctttgtcaaaaaatcctatttatttaaatgaaacaaagacagaagttttgcctgaattggtaaaacttacctggttggaagaagattattctgtccgaaaagatgtaacacctgaaaattttaaagacgaaaaggcaattgaaaagatactggacaaaaaagtcaaagaaattttactggcaagattgaaacaatacggcgaccctaaaaaggcattttctgatttagataaaaatcctatttggctaaatgaagcaaaaggaattgctgtcaaacgtgttacaattagtggggtaaaaaatgcagagtccttacattataaaaaggatcatattgggaattttatattagacaaaagggggaaacagattcctgtggattttgtaagcacaggcaataatcatcacgtagcaatatacagagatgcgcaaggtaatttgcaggaaagagtggtttctctttttgatgcagtacagctggtgaatgttggagaacctgtaatagataaagcatttaatcaggggttaggatggcaatttttatttactatgaaacagaatgaatattttattttcccaaatgaaaaatctggttttaatcctaatgaaatagacttattcgacccaagaaataaaaaaatagttagccctaacttatttagggtccagaaaattgcatcaaaaaactattttttcagacatcatctagaaacgacagttgaagaaaaaaaagaactaaatggaatagcatttagaccccaattaggcttgaatgcaattgcaaatattgttaaagttagaataaaccatttgggtgatatcgtttggcggggtgaatattaatgcattacttaaaatctaaggttatagtattttgaaatattaagtgagagttattaaaacgagtgagggatggcagcggcactccataaaatgtttatgtttcctctgagccatctgctattgtaagtataaataatacctactatatttatataaccattattccaaaccatgataaaacgaacgctttattttgggtcgcctgcgtatttaaaaacccgaaacgagcaactaattgttgaagtacccgatacgggagaggttaaaacagccgttattgaagatattggtctgttgattttagataaccaacaaattactattacacatgctgtattgagtaaattattggagcataatgtggctgtagttacctgtaacgatattcatcaccctaccggtttattattaaatttagatgggcataccttacaaagccagcggtttaaaacacaaattgcagcatcggtacccttgcaaaaacaactgtggcaacaaacagtaatagctaaaattactaatcaggctaatttgtttactttaaaaagattgaatgaaaaacctttacacgctttaatagcacgagtaaaaagtggcgatactgataattgtgaggcgcaagcggcagcatattactggaaaaatattttccccgattttttagcatttaaacggcaccgtgagggtgatccgccaaataatttattaaactatggctatgctattttacgggccgtagtggccagaagtttagtaggatcgggcttattacccaccttgggtatttttcaccgtaaccaatataatgcttattgcctggccgatgatataatggaaccataccggccttatgttgataaggtagtgacagatattgtgcgtaacaacggccaatatttagaaatgacgcctaatatgaaacaacaattattggccataccggcaatggacgtgttgttgaataatgaaaaaagtccgcttatgaatgcggtacaaagaacaacggccagtttggccaaatgttttgaaggaacaggtaaaaaattaatgtatccggtattagccacccaatacacctgatatgaattttgaacgtttaaatgcctatagaattatgtgggtattagttatgtttgacctgccaaccgaaaccaagaaggatagaaagctgtatgcaaaatttagaaaaaatattttagcagacgggttttctatgtttcagtttagtatgtatatacgtcattgtagcagtaaagaaaatgcggatgtacatgttaagcgggtaaaaaagatattgcctccgcaagggcatgtgggtattttaaatattacggataaacaatttggattaatggaaatttttaggggtaaggaaatggtggaagcccccgcagccgtgcaacaactagaattgttttaaaggataaagtatcagacgttcagtatttttaagaagtataacgggttttttaggtttggcggtattgccgccactaacagtaataaaacagtatcagcgctattatttattacaaagttttatacgtggctttaggttttacaatgcccccaaactcttagagacaatgaaggaaggggacatgttagagctgcgaagagaatctttaaaaccaacatgacaactgtgccatagcattgtattataacgaaataaaagtgggttatttgccaagggaagacaatgagatgctgagtaagttaatggatgcggaggtcgtaatgttacaagccgaaattacacatttaaaaagggatgctaaagcatgggaaaatgtacatgtggcggtttttgttttaaaacagatggagggggatatatcggaaacagctacctatttaacaatactggaaacgccacactaccgaaccgtaaaaacgggaaataatacggtggctaatgtatattataaccatgaagcagatgaggaggattttgtaatgagtgctgatgagttttatgatgaaatggtagccaactcgaaaaacgatggtatttatgatattttacatagtgattttggttcaccggaaataatagaatcggcaattgaagaagggcggataatagtaaacaggcgtaaattacccaaggatttgcggagtgacaatttggctaaagcgattgataacgaagttattatgctggataaaagttttgatagaaatggttatgtggtagcaaacgtaaaccgtgtggcaaatttatcgggcagaatagagtcggtaattggtgtaatggataaactgggcagaaagtattttgaggtaaattttttataaaccgaaaataataagggtacaataaaaaaacgggcattaatgcccgtttttttattgtactgacaactttaaatagttggaagtgagttttttgtataaatcctgttgtcaaagaccaaggtaatacaaaagttgaaagcaattcacaacatgtctcagtttggtatcacagatgaggaggttgtcaaagaccaaggtaatacaaaagttgaaagcaattcacaactagctatcaagggttcaactattagacagggttgtcaaagaccaaggtaatacaaaagttgaaagcaattcacaacacctgatagagaggatatggtagtagaaatgttgtcaaagaccaaggtaatacaaaagttgaaagcaattcacaacgcaaagggaaacatctttgtacttaaaatagttgtcaaagaccaaggtaatacaaaagttgaaagcaattcacaaccgcctagcgttacttggtatccactcatgtgttgtcaaagaccaaggtaatacaaaagttgaaagcaattcacaactattaagtacatgacagtacaatgattgagttgtcaaagaccaaggtaatacaaaagttgaaagcaattcacaacacaattaatacaagggttaacaatacaattgttgtcaaagaccaaggtaatacaaaagttgaaagcaattcacaacaacaacatatttgcaatcacagacataaaagttgtcaaagaccaaggtaatacaaaagttgaaagcaattcacaacgaagaagatgcagtaccatggatagaagcagttgtcaaagaccaaggtaatacaaaagttgaaagcaattcacaaccagtaaatatggtggctcacaaattcaacagttgtcaaagaccaaggtaatacaaaagttgaaagcaattcacaaccatcggctcggtttaaatccttaccaaatagttgtcaaagaccaaggtaatacaaaagttgaaagcaattcacaacagtaaggttattagtcaatacgtttcggcgttgtcaaagaccaaggtaatacaaaagttgaaagcaattcacaacattctgatttccggaaatacttttaaaaagttgtcaaagaccaaggtaatacaaaagttgaaagcaattcacaaccgttccgttgcattttcaaaccacggtttgagttgtcaaagaccaaggtaatacaaaagttgaaagcaattcacaactatcttttttaccggcaccgtaatgtagcggttgtcaaagaccaaggtaatacaaaagttgaaagcaattcacaaccttgaaacacggcactaatgttccactactgttgtcaaagaccaaggtaatacaaaagttgaaagcaattcacaaccgtcttttctttcagtatatattataggagttgtcaaagaccaaggtaatacaaaagttgaaagcaattcacaacagctgcaacactcggaggagcttaagcgaagttgtcaaagaccaaggtaatacaaaagttgaaagcaattcacaacagttattacaagttattacatctaaaacgcgttgtcaaagaccaaggtaatacaaaagttgaaagcaattcacaactaccgtcatcgcctacgcctaataagccgagttgtcaaagaccaaggtaatacaaaagttgaaagcaattcacaacgggtcgtaacggtccattgttacatcttcagttgtcaaagaccaaggtaatacaaaagttgaaagcaattcacaacattaaccccggaagaaatagaacaaagaaggttgtcaaagaccaaggtaatacaaaagttgaaagcaattcacaacacaaacggttttttatttcggcatctacgtgttgtcaaagaccaaggtaatacaaaagttgaaagcaattcacaacacctgcaaaaacgtaatgccaaaatcaaacgttgtcaaagaccaaggtaatacaaaagttgaaagcaattcacaaccttttgctctctcttagcttttttctctaagttgtcaaagaccaaggtaatacaaaagttgaaagcaattcacaaccacttgtaccgatatttacatcagttgcgcgttgtcaaagaccaaggtaatacaaaagttgaaagcaattcacaacaaaaacttttaatttaaaaattaaaatcatgttgtcaaagaccaaggtaatacaaaagttgaaagcaattcacaacctgttgataggtgtatgaacattacaccccgttgtcaaagaccaaggtaatacaaaagttgaaagcaattcacaaccggccggccagaactcattcgcctatgcatgttgtcaaagaccaaggtaatacaaaagttgaaagcaattcacaacatttttccttaataaatgtttttctattggttgtcaaagaccaaggtaatacaaaagttgaaagcaattcacaacgctcatattggagaacaagaggttctcaatgttgtcaaagaccaaggtaatacaaaagttgaaagcaattcacaacctgcataatctttttatagcatcattcggagttgtcaaagaccaaggtaatacaaaagttgaaagcaattcacaacnnnnnnnnnnnnnnnnnnnnnnnnnnnnnnnnnnnnnnnnnnnnnnnnnnnnnnnnnnnnnnnnnnnnnnnnnnnnnnnnnnnnnnnnnnnnnnnnnnnnnnnnnnnnnnnnnnnnnnnnnnnnnnnnnnnnnnnnnnnnnnnnnnnnnnnnnnnnncaaggtaatacaaaagttgaaagcaattcacaacctattctaagtttttgtttaaccaccggtggttgtcaaagaccaaggtaatacaaaagttgaaagcaattcacaactgtaaacattaagtaagatgcgccttgattgttgtcaaagaccaaggtaatacaaaagttgaaagcaattcacaacttcgttgtcaaaagtagaataagaattatagttgtcaaagaccaaggtaatacaaaagttgaaagcaattcacaaccaataaaatgaaattactaatagcattattgttgtcaaagaccaaggtaatacaaaagttgaaagcaattcacaacggcttcaaatgatttgttaccaaataatctgttgtcaaagaccaaggtaatacaaaagttgaaagcaattcacaactgctttaaggaatgaattaaagcactcaacgttgtcaaagaccaaggtaatacaaaagttgaaagcaattcacaacaggcgcaatcgctgaactttcaagtagctgttgtcaaagaccaaggtaatacaaaagttgaaagcaattcacaaccaattaaatctcttgttgaagttgatttgagttgtcaaagaccaaggtaatacaaaagttgaaagcaattcacaacagctgatggtattaaacctcttactatcagttgtcaaagaccaaggtaatacaaaagttgaaagcaattcacaacggcaaggggtgcgcaaataacaagagtcctgttgtcaaagaccaaggtaatacaaaagttgaaagcaattcacaaccgctaacaatgtgttcgtaaagattgaaatgttgtcaaagaccaaggtaatacaaaagttgaaagcaattcacaacatctttccttctattaaccggtgctttaaagttgtcaaagaccaaggtaatacaaaagttgaaagcaattcacaacccttcattacttcgttttctatactggtaagttgtcaaagaccaaggtaatacaaaagttgaaagcaattcacaacgcttgcccttcttttaaaataaatttttctgttgtcaaagaccaaggtaatacaaaagttgaaagcaattcacaacactggtgatataagtgtacagccgggtaacgttgtcaaagaccaaggtaatacaaaagttgaaagcaattcacaactttgtatttgttcggtaaattcatgggaaagttgtcaaagaccaaggtaatacaaaagttgaaagcaattcacaacggaatagagttataatgaaaattaccatcggttgtcaaagaccaaggtaatacaaaagttgaaagcaattcacaacaattagaaaaatggttcttactctttcgcagttgtcaaagaccaaggtaatacaaaagttgaaagcaattcacaacaagcaaaacaaaacatctttaaaagaactggttgtcaaagaccaaggtaatacaaaagttgaaagcaattcacaactgtttgattcaataaaaaaataaagaacaattaactattaaacaccgagttgccggaagggtttttgtggagttgcgtagagagaatacgccgagtcctatgcgagaaactcggctgagaagaaaaaaaatacagcccaaattattctctcgtcattaatatataaataaacacccctgccaatacaatagcaatagtgcagcaaactacaaaaagggtaagtccaattttaaaatatcgcctattacttttgacacacaatagagctactaacaatgtgcttataattagaaggatgatacttgctacgtttattttatcatatgaataaggatacgaaaaaagtattctaaaaaaagcaaaaaatgaaaaactagatagaaaaccgaaatataatgtattcaatatccaacccactctttttcccaaactaaataagattgttccaatagcgggtattataacaatggctacaaaaactgaccaattaagtcctacaacataggggtttctagcgtctaaccaaaactgaattgctacaaaaattataaataaacatactgtaattattatagaaccaaaccaacggcttttatgtggcttagcttttattaaatcatccaggatggaaacttctttgtgcatgttggaatgtatgatgttttaaatggcggttacttctttaacatccccatcaacgaatcttcttctgcagcttttaaactaataacactatccaatactgtatttggtacagtggtggataaaacatattgctgcactttccattggttattttgttttactactacgccggagccgcggcatattttcatttgagtttgtaacagctcctcaaaccaggcaatatctgcgtgtggaccaaaataaatattacgtttcagagttttaaaattccaggtttgttttttgtcaaagtaaggttgggcccaggtttgaaaagcagctttatcccagttttcggtagcatcggtaccattgaatgtagcatcgttggtaaagaaattaaagtaagtgtcaaacgatgcatttgccgcagctacattaaacgaatccaacatggctgcaatttgttttttactttcagtttgtgcttcggctacaggtacttgttgcggttgctggttacaggcgaataaaaataaaaccacagcgataagtaataatggtttgaaaagcttttgcatatactaggttaatttattgtaagataatatagaaaaaagacaatagtaagtaagctaaaaattataggataaaagctttatacaattgtatatacttacccgtttttaatgacggtattttctggtaagtagcgttatttgtaatttaagcttgtcgtaaatcattccaacaattaaagttgccgaaccaaataacaaaatgtgtaagcctatttttgaataaaaaatccctcctattactcctccgataaaaaagaaactaattataattaagcgtagttttattgatgctaaaagttttgttcttaattctttctggcgatagaaaaataattgtgaaagttctatccctaaatcggtgaaaagtccggttaaatgcgttgtcctcacaacagcgtttgaaattcttgtaaccagagagttttgcaatcccatggcaaaaagtaaagtacaggcaattaagtcaggattttctgccattaaagtttgcccaaacaccgcaactaaaaacaaaataatacattctataaaaatgggaataatataaacatatttaccgtttttccgtgaaattatttcaacaaggaggcttgaaaagaaagagccaatgaaaaagaagaatatatataaaaagtaaacaactccctgccacacttcaagtttaaaaatttcatctacaaaaaaagcaaaatgccctgttacgtttgtcgtaagttttgcaacagcaagaaaccctgcaacatttacaatacctgcaacgaatgataatagggaagcgatttgtaaattatgttttgaagttctttttttaccatgatgtacaaacatgattgttgtatttttttgcgtagacttaatatacacaattttgttaataaggaacaatgcttatgttggcaatagcaggtaatatataaactatccgtagcgttttaaaccaaacgaacaatattacttaagcaatgtagcggccctttgttgataagcaatacacagaccaagggctgcaccgcttagacgaaaatactaccggccttaaagccggtagattgtagccgggcggtggactgctgttgatgagtattactgctgctgacagcccctgataaaaacctgcgttaatgctttacaatttcttttacaataccaccttgcggttcacgtacggtttgggtaaatataaatgctttggggtctatgctgtgtacaatgttgcgcagctttcttacttctaaacgggtaacaatggtaaaaataatatcaaccttggcgctttgctcaaaggtttctttcataaagcctctttcgcctttgtacacggtaatgccacggtttagggttagtaccagtgcacgttttatttcttcgctattgccggatacaatggttacaccggtataggcttctataccttcaattacataacgggtaatttgactggctaccaggtaagttagtatggcgtataatgcggtttctatttgcatgaaagccgcggctatggcaaacagcacaatgttcatacccaatataatttcggtaatgctgaagctgctttttttaaaggtcattaaagccagtacttccataccatcgaaagtgccgccaccacgcatacttaaacctatgcctatgcccataaaaaagccaccaaacatggccactaataatttatcgtgtgtaagctcgggaaaaggtacaaagtgcatggtaaatgcaataagtataatggttacactactgcgtatggcaaagtgtttactaaccttaaaataggccagtattaaaaaaggaatgtttagtaataataaaacccaacccaggttccagccttttatttcgtataacaacaatgatataccggttacgccaccatctaaaaagtgattgggtaccagaaaactttttaaggcaaaactggcacttaatacacccatgatgagaaacaggatatcggacaagcgaaaaagtgaggtattatgtttcgtgtgcgacataactggtttgttgcttttgttaagtgtagattgaatggcagccaggtttaactgcttttgctgttgtcgtttgttaatggccgtttgggtaaaatattggtggttttgtaaaaaaccttcctgcatggtattccactcctgctcagtttgtatgcgaccttgcaggcgcatttcttcaaacagcttggcggcaatggtaaaaaagtcttcccggccaagatagtccagatcagcatcggctacaatttgctccagatgtgtttgtggcgattgcggtatatgc

SEQ ID NO: 2141 - DNA, 24278 bp, synthetic construct
  misc_feature 1..24278: note = Synthetic
  source 1..24278: mol_type = other DNA
gaataaaaaacttaccacaaaaaaattcagggaactgctgctgaagatacaacaccttggcatgggcgaacaggaaaattatctcaatgactttattgaggaatggaaagccggcaccgagcaggtagatgatattttagtaattggagcaagggtgtgaccaggaatattaaaaacaaaaaagccggaacaaatgttccggctatctatttagctgctgtagccaaagcgtttcagctgctggtcgttatcacgccagtccttgtttactttcacaaataattcgaggaatacttgttttccaaaaaaggcttcaatgtcttttcgcgcatccgttcccacttttttcaatgcttttccctggtggccgataatgatccctttttgtgaatcacgcactaccaatatttccgcgcggatcttgatgatcttctcttcatctttaaaagattcgatcaccacttccaccgaatacggaatttcttttttataattcagcaaaatcttttcacggatgatctccgacacaaagaatttttcaggtttgtccgttaattggtctttgtcgtaataaccagggccttccggcaacagggcaataatccggtcgaaaatataattgacattgaatttttccaacgccgaaaccgggatcacttctgcattgggcacttctgttttccagtactgcacttttgcttccagctgatcctgttcttttgccagatcgattttgttcactaacagcaatactttggcatgcgtgtgcttgatcttgtgcaggatcttttcttctattttaatgtcttcgtaaatatccgttacaaacaggatcacatccgcatcggtaatggcagtatttacaaaatccatcatggattcctgcaatttgtaattgggttttaacacaccgggggtatcggaataaacgatctgaaaatcttcaccgttcacaattcccatgatccggtgcctggtcgtttgagcttttgaggtgataatggagaggcgttcgcctaccaaaacgttcataagcgtggacttccctacattcggactacctataatattcacaaaaccagccttgtgcgtcattttttttaaaattgttaataatatatttaaatacaaagaaacaaaatattatctttgcaccgcatttaaaaagccggataacgcttttcgttctttaagacatcacattaacaagatatattgcggggtggagcagttggtagctcgttgggctcataacccaaaggtcgtccgttcgagtcgggcccccgctacttttaagcgatacagaaatgtatcgctttttttttgctcctgccgcggctaaataaattgtttgccatttcaccgaatgcatactcttaaaacagaataggcatgaacaatttaaaactatacatgctgctactcggttgtaaaccggctgacaggtacacggaacaacacgatgttttttttgcgatcggtacatccttaaaggagctggtgccgcagatcaatattgcatggcccgaagcaaaaggaaatatccacatagatgcttggcgcgaaataacttccgtggacggatatgatgtgagcgtttctgaaaaaactccgcgcataagcacaccgggtgctcccgctttatttttccttaacctcggcggctacaaaccaggagagtttgaagaatttcattataaaatgattgtggctgcagccaacgaaagcgaagccatacagttggcaaaacaaaccgctttttataaacacaccggttttaaaggcgccgcttcccacatcgatgataaatattcggtggatgtggacgatgtatatgcacttgcttccattttaccacccgcctgtaaaggcaaatacaccataatgcttaccaggcagaaaaccatggcaaccgaagatgaatttcacctcggttatttgcagctctggaaaataaaggacggcgattaaaaccgggaaacattaaaaattaatagccggatactgtttttcagcacacaaacatgccgtttcagtcgtttacacttgcgattgaagctggttttaattatcttcgcgtttataaaaataaaccaaaacaaacattgatgaaacatacctttacacttctattgggctgtttgctggcaacagcaatttttgcccagacaacacaaacggttaatgcaacaaaaatgcaggacgaacactacacaggcccacacctgagagttttgtcagcacctgtacttaccaatgctttatatactaacagtgccggaacagtaaatgtattatcaacctttccaaacggcggctggtccacacaaacgcctttgcctgccggaagatgggcaacaggggctacatttgcaaaaccctgcgtatccggtacggatacaggatttgtatacatgatctccggaggtgatccttcttttgctaattcagcattaacatctgcttacaatattacaacgggaacatgggccaataaagcctccatccctgcttcacgcacacaggttaccccattacaggtacgcaataaaatttatgtgatcggtggatacggcggcagctttatcccggttaccaataccgatatttatgatgttaccaccaatacctggtcgggcggcgctccaattccacaggctaccggcgattatgcagcggcagtttacaacgattcgctgatctacatcattggtggctacagcggtagcgccgatttaaatacagtgcagatctacaatgtgactaccaattcatggaccaccggtactgcaaaaattggtacagccgtggcaggtttgcgcatgggcattacaggaaacaatattgtactggcaggcgggtactctcaaacaatggcagctgagcttgccagcgcttatctgggcgctattaacccggcagatcctacaattattacatgggcaacacttgcaaattaccctggaggaacagccggaagattgggtgcagggacaaccgtacaacccgacggaagagtttatttcggaggtggcgatcctaacggtgcagggactgctgtaatgaatacggtatttgcatttaatacactttccaatcaatgggaaacagggcctgccatgacaggcgtgagcaatatcaacagcctaagcggtgtaatcaaaaacgacacattgtatatggtggtagttggtggttatgatggcgcttctgtaataacaacaaaccagtggttaaaaatagggcctgcaactgtagctacagtgagcagcaatgcaaccatttgtgcaggcggatcaacaatgcttactgcagcaaacggaacagcatacagctggtcaccggctacaacgctcgacaatgctaacatttcagcaccaactgctactcctgctgcaactaccacttacacagttaacgtaagtgaaaaatacgggtgccctgttccaaaaacagtaacagtaacggtaaacgatttaccaacggtgctagtgagcggtgcggcaacagtatgtaatggcagcagcactgcatttactgcttcgggtgcatctacttattcctggacacctgctgcagggctcgacaacagcaatgttgcatcaccggttgctacaccctctgcaactactacttatactataaatgcaacggatgtaaacggatgctcgaatacaaatacggtaattgttacggttaatccattgccaactgctgatgcaggaagcgatgcagccgtttgtaatggcgaaagcattctattaaatggtaatggcggttctacatatgactgggcaccggctgcaaacctcgatgacaatacacttgcaagcccgaatgcaacaccggcaagcactaccacttatacattaacagtaacggacggcaacggctgtataaatacagctacaactactattactgtaaacgatcttccggttggactgttcgcaagctctaacatcagctgtaacggccttacggatggatctgccagcattggcattaccggtacaagtacctacagttatttatggtcgaatggcggtactactgcaactattagcggattgattgcaggcgcatatacagtaacagtaaccgacgatgtaaccggttgcacaaacaccgcgggaactacaattgttgaacctactgctttggtattaacaactaccaatgacactaccaatatttgcgatggaacggtatcagtaacgccaacaggcggaacattcggatacaattattcctgggcaccgggtggcgaaattattgatacgcctaccagcttatgtccgggtacctacacagtacaagtaacggacgcaaacggatgtacggcaactgctactgcaattgttcaatcatcggtttcagtgaatgagatgagcagcgcatcattcagcacatatccgaatcctgcaagcgaaagccttgtggtaaaaggggaattcaataatgtgaccatcacattgacggatgtattaggacaacagatcatgatcgttgcagaaaatgtaaatggcagtatttcaaaaactattaatatttcagcacttcctgcgggagtgtattatctgcaattaaaaaacaacagcggaatcacaacgaagaaatttatcaaacagtaattgcgatttaataaataaatcaaaaaaccggggcagcaatgttccggttttttgtttttatataaacagtgtttgtatataattatgcaaaatgttgtatctctccaattgatgtttccacgcttgaaaaaggtgtatattttttaacgcttcgtgacaagcagaaaaacacatttcaaagtaaatttgtaaaacaataagcagcgtaaatttgtccaataaaaacgccgcctttctcaatttagaaaggcggcgtttgttttatagatgaagtaataatattattttttccgttttggccttcttaagctttccagtttttcttccatgagcttgtttactttttccgacagctcgtattttttctccaaatcagaaatctggcgtttacaagctttcagctcattggccaggtaatccatcatgtcttcgcgttttacatacggctcctgttcttcctgcaccatttgcggcaagtctttgctatagtaattaaaaaaatcgtggttgagcaccctgctgatcttttgcaaaagcccggtatccatattttcttttgcaaaaattttgtaggcaacatccctgctcctgttgatcttttttgcaaactctgtcaccgaatagctggatttattcactacgtcttttatctttttgccaatgtgtacctgcgccatacacaaaagtcaatttttagagggtacaaaatttaaaagattgtattcgattagtatacatactgtattattttttaatacatttgaaaaacattaaatactaatttttttgcgaagatatgccagcactgcattggataggaaaggaaaagatcatcaaccatcatctggaagtgccttaccgtgtattaaatcatcactacaattttaccggaaagaatacaactgcagaaaaagccaatactggcaatatgatcattcacggtgataacctggaagcattaaaaagcctgctgccaaaatatgaaggaaaaataaactgcatttatattgatccgccttataatacgggaaatgaaggatggacctataatgacaatgtaaaccatcccaaaataaaaaaatggctggagaaaacattaagtacgcaaacatccggaaaagatggaggaataggcttggatgatcttacgcgacatgataaatggctgtgcatgatctatccgcgattgatgctgcttcataaattactggcgcctgacggcgttatttttatttccattgatgataatgaaatggcgcatttaaaattggtgatggatgaaatttttggctccaaaaacaacatcgccagcctcgtttgggatttaggcacgggcacacaggcagggcattttgtgagagcgcatgaatatgttttagcatactttaaaaaaaaggacctggtccctaactttaagggcggcgaaggaattattgagcactcggctttaaaaaaaatctctgtaaaaaatcccgcttctgaatttttgtttcctgccggaacgcgctgggatggtgaagatgatgctgaattaagcggaacctggggaggatcagaaaaaactacgcttttgagtggacaaatgatctgccacaaagggcaattaaaggaagatgttgttttgagtgcaggctgggcgcaaaaaaatcaaatgctatcatggtttgccggtaaaaaaaccatagacagtaaaggacaaactgtatcctctttttactttaataaaaatggtgtgctccggtatgaaaaggaaagaagcattattaatccgcctaccgttataaaaggaattgcaagtacaaaaaccggcagcaacacattactgggaatttttggcgaaaagccatttgattttcctaaaccggtagagctgatccagcacctgatcgatttaaatacagatgaaaattccatcatcctcgattccttcgcgggaagcggcaccaccggcgaagcggtactaaacctgaataagctggacaatggaaaccgcaaatttattttaattgaaatggaagagtatgcagaaagcattaccgcagagcgtgtaaaacgcacaattaacggctattccggcaaggaaggtaccggcggcagttttgatttttattcgctgggcgcgccgctttttgatgaggaaaataatttgaatgaagaggtagaagcagaaaaaatccgcgagtacatctggttcaacgaaacccggaagccgtataaaaataataaaggtgcctgccttggcacttataacaataccggctattattttttgtacgacaaggaagaagctaccgcgcttgattatgccgcacttgccaggcatataaaaacaaaggcagaatactacattgtatatgcggataaatgcttgctgcctgaaagtttcatgaataccaacaatattgaatttaaaaagatcccacgcgatataacacgtttttaaatggaattaaaatcatatcagaaacaggtgatcagggaccttgctgcatattttgagtactataaaaagtatgaggatgcagacacggcttttaataattactggacggaaaaagtgggattttataatcctgtttcgggagaaggaatgcggccgtaccaggacaatgtgccggatgcggtgcatttgtgtataaaggtaccgacagcaggcggtaaaacatttattgcctgcaatgctgttaaaaccatttttgatgcattgccgcctaccaagacaaaagcggtggtatggctggtgccctggggaaatttactgaaccaaacggtgaataatctttcggacccggagcatccgtattgccagaaattaaatgcgctgttcaataacagggtgagcgtatatcagaaaaaagaattgctgcagggcgccggttttaacccgtccattgtgcaggaacagttgagcattatggtgatgaactactcttccatccgttccaaaagcaaagatgaccgcaaaatttatgagcagaatggcgcgcttgctacttttgtaaatggcggcgatgatgatgcgcatgtactggaaggttcggatgagacagcgctgatcaacattatccggaagctaaacccggtgctgatcgtggatgaaagccacaatgcagaaaccaggctgagcgtggaaatgctgcgcgatctcaatcccagctttattcttgatcttaccgctacgccaaaagacaattcaaacattatcagcatggtgcctgccattgagctgaaaaaggagcacatggtaaaactgccggtgatcgtgtataaccagcaggacaaggaaagtgtgatcgaaagcgcgctgcaccttcaacaacgcctggaagaaattgccattgaacaggaaaaaaacgggggacggtatatccggccaatggtattgttccaggcacaatcaaaaggaaaagaagaaaacacaacgtttgataaattaaaagagcagctgataaaagtcgggataaaggaagagcagatcaaaataaaaacagccaataaagatgagctgaaagggattgacctgatggacaggaattgcccggtaaggtttgtgatcacgatcaatgcgctgaaagaaggctgggattgcccgtttgcttacattcttgcatcgctcgccgacagatcctcagtggtggatgtaacgcagatcctgggccgtgtattgcgccagccgtatgcgatgaaacatacagacccgctgctgaatttatcgtatgtgatcacgtcatccgctaaattcaacgaaacgctgcaaaacattattatggggttaaaggaatcgggctttagcgaaaaggattatcgtgaaaaagatgtgatgccggaaacggaaaaatcgattgtacttcctgccgaacaggaaatgctgtttgataccgctcgtatttcgtatggaagcagcaaacagggcaaaacaagcaacatgatcagggaaattgaaacaattgcggatgcagaaacaacagaaatggaaaagcagatcgccgaatatgaaaacaatccatcaatggaacggttccccgaaataaaagcaaaacaatatcctatgcgacaggatgtggcagcgcttgccaaatccatgctgttgccacaatttgtgtcgcgcacagaaaacctgcatttttttattgcagaaaccgacggccttgaattccttgaacgcaggccattactggaagggtttaagctgtatgaaaaagcgatcgatataaaatttgaaggcacgccatcgttgctttacaaagctgatattgaagaaacacgtaatgacgattcgcgggcgacttattcgaaaatggaaaattcgcctatccagaaaaaactgctcgaatccatcctggcaaaaccgaaagaaggccaggtgaaagatctgctccaccaggcgatgcaatacattggaaatattttatcggttcccgacaaggatataagaaaatacgtccgacggattttagaaaatatggaaacggaacagctcaaagattttgcagttaataaccggctgtattccgaccagatcaaacaaaggatcattgaactttcggatgatcatgccgaaaaacaatttatagaatacaaggaggtgggcgtgatccggacaaaaccattctggaaatttccacccgcactgatcctgaaaaaactgggcccggacatcggcaactctctgtacacgcatgaaagcgagatgaatagtttggaagaacaatttatcatgcaggtggcaggcgcttccaacattatgttctggcatcgcaatcttgtaaaaaatggcggatttgcattgaatggatacaaggccaatcattacccggattttattatcgtgacaaaaaaaggaacggtgatactggctgaaacaaaaggaggcgacagggataaccgtgacagtgtcgagaaattgcaactgggaaaaatctggtcggagctctcgggatcacatacgtataagtacttaatgatctttgaaaaaaatgccccggaaggcgcttataatttggataaagctatagagctgatccttaaaatgtaattgataacgttatgaaattattattacaactggcggaagcagccaaaacgaatgaaagcgcaatgctaagtgtattaaaattgttgccttacggatgttgatgtgttcctttgggatgcttgtttttgttgatggtttagaacaagtaatgttttttttatttcccgtatttgtaaatataaaattttgaaagctggagaattgggttatatttggtaggaggtaaaaagaaagcgagagattgctctcccgctttaaatgttttcacaacggaataatccttattgtgatttgcttcaaaatgtaatgcaaatgtaaactaaataatgatatggcaagaaaaattttaggattggatttaggaactgcatctattggatgggcacttgtcaatgaagcggaaaatgaaaatgaaagatcgtccatcataaaaattggttcaaggattattcattatggagacaatttggtaaaagttgacaaaacaggaaaaatttctgcttctttgactcctgaagaagatttttttagcggaaaaggattatccccaaatgcaggaagaacaaagcaaagaagcgctcgaagaaatttacaacgttataaattacgaagagaaaatttaattgaaattcttaaagaacactctattattcctaatgattttattttctccgaagaaggcaacggcaccacttttaagacatataagaacagagcacttgccgcggtagaagcaatccctcttgaggagtttgttcgggtacttttaatgatcaataaaaaacggggatataaaagcagcagaaaagcaaaaggtgaagaagacggacaattaattgacggaatgactgtcgccaaactattgtatgataacaaacaaacaccaggacaatttgtgtttgatttattaaataatggaaagaaatatattcccgacttttaccgctcggatttgcaagctgaatttgataatgtatggaattatcaaaagaattttcatccagtattaacagatttcgcatatgagaaattaagagggcaaaagaaaaatgcaaccaaagattattttgcaaaaatacttaaaattgaaacgcctgaattaaaaggaaaatggaatgaaaaacgtctgcaacgttatgaattcagaagtaaggctattaaccagcaaatttctattggagaaatagctgaagctttgattgaaattaatggtgatctaaataattctagtggctacctgggagcaataagcgacagaagtaaggagcttttttttgaaaaaataactgttggccaatatctttatagacaattagaaaaaaatcctcatacaagtttaaaaaagcaaatcttttatcggttagattatatcgatgaatttaactgcttatgggacacacaggcaaaatttcacaaacagcttacatcggaacttaaatctgagatacgtgatgtaattattttttatcaacgacggttaaaatctcaaaaaggattgattagtttttgtgagtttgaaagtcaacaaattgaaataattgaagacggtaaaaagaaaataaaaaccagaggttccagagttattcctaaatcttcaccactatttcaagagtttaaaatatggcaaattttaaacaatatagaagtaacaaatactataacaaaagaagtaagagaactatttccggaagaaaaagaaatactgtctgttgaattagaaataaaaacgaaaatttctaaaggagatgcaataaaattattatttggaaaagaaaaaaatgttgatctaaattataaagacattgaaggtaacaggacgaatgcagcaatgtatgatgcgtatcaaagaataattgaactaacgggaaatggggaacatgatttcactaaaatgaaatcaagcgatacaagagcgttcgtaaaagaaattttcggtaatctcggatacaatattaatattctggattttgatgctgcgattgaaggaaatgcaattgaaaaacaagcacattttcaattatggcatttattatattcgtttgaaggtgatgacactaaaaccgggaatgaaaaattaattgaagcaattaagattaaatttggatttgaaaaagaatatgcacagatcattgcgaatgtttcttttgcagatgattacggtagtttgagcgcaaaagctattcgcaaaatattaccccacttaaaagatgggttttcttatggtggacgaagcagcaagcctactgagccaagcgcatgtgaatatgcaggatataaaaagcattctaaatcatcacttactataaaagaaaaagagacaaagggttataaagacaaattagatattttaccaaaaaacagtttgcgcaatcctattgtagaaaagattttaaatcaaatggttaacgttgttaatgcagctattgatgaatatggaaaaccggatgaaataagaatagaacttgcccgcgagttaaaaaaaggtgcagaagaacgaaaagaaatgagcgaaaacatttcgaagacaactgcagatcatgaaaagtatcgtagaattttacaaaccgaatttggcttaaagcacgtaagcaggaatgatttaattcgttacaaactgtatttggaattaaagcggacaggatataaaacgctttattcaaatacttatgtagcgccgaatgaattattcactaagaaatttgacatagagcacattttacctaaagccaaattatatgatgattccttttcaaataaagtattggaattaagatcaatcaatattgaaaaagcagaccgaactgcttatgattttataggtgataaatatggtcctgacgaacttgttaattatgaacaacgagtgcaggatttatatttttcaaaaaaagcaacagaaactgctatacaagaaaacaatcaaacggaaagtaaaaacaatgacccgagaataagcaaaacaaaacgtgataaattactaattacagaaagtaaaatcccaaatggatttattgatagggatttacggaacacacaatacattgctaaaaaagcaaaagcaatgattgaggaagtttgtaaagacgttaccacaactacaggaagtgtaaccgatcgactaagagaagattggcaattggttgatataatgcaagaattgaattggaacaagtacaatgcacttggcttaaccgaagaattcactaacagagacggcaatataattaaaagaataaaagattggaccaagcgcaacgatcatcgtcatcatgcaatggacgcgctgactgttgcatttacaaaatacagccatgttaattatcttaataatttaaatgcgcggagtgataaaaatggaaacatatacgctattgaacaaaaagagttgtaccgcgataaaaacaacaaacttcggtttaaacctcctattccaattgacgattttagagctgaagcaaaaaaacaattagaaaacacattgatttcttttaaagcaagtaataaagttgtcaccaaaaataaaaacaagtttaaaataaaaggtggcgaaaaaacgaagattgaattaactcctcgcgggcaactacatatggaaactgtttatggcagtattaaacaatacagaacagaagaagtaaagataaacggatcattggatattgaaacaattaataaggttgccagaaagaatgttagagaagcattattaaagcgtttatccgaatttgataatgatcctaaaaaggcatttacaggaaaaaacgcaattgaaaagaatccgatttttattgatcatcagcaatctcataaaatagctgataaggtaaagattgtctggcaggaaactgtttacacaattcgtaaagatattggtcctgatttaaaaatagacaaagtaattgatcctaaaattaaaatcattttacaaaatcgtttaaaagaatacaattccgatccaaaacttgcattttcaaatcttgcagaaaatccaatatggattaataaggagcaagaatttgctattaagcgagttacaattaccggtattagcaacgcgatttcactaagagataagaaagatcacaatggaaatttaattctaaacgtagaagggagttcaatctcatcggattatgttaacacaggaaataatcatcatatagcaatatataaagatgcactagaaaacttacatgaaaacgttattactttttatgaagctgtagaaagggttaatcaggggttacctataattaacaaagtttttaaccaagaaattggttggcaatttttattttcaatgaaacgaaatgaatgttttgtatttgcaaacaacaagacggggtttaatccagaggaaataaatttattagattcaaaagaatatcatttaattaatccaaatttatttcgagtgcaaagtatctcatcaaaatactatattttcaatcaccacacagaaacaaaagctgcaaatggcgatacattcaagaataaaaaaagcctttctgaaataacgtatagatttatacaaaacactcaatctctaaaaagtttaataaaagtccgaattaatcatttaggtaaaattataaaaatcggcgaatgatcaaacgcaccctctatttcggcaacccttcctatttgagtcttaccaatgctcaactaactttgcgtttgcccgaagtagagaaaaacgacaccttgcccgatcattataaaaaagaagtgtctgccagcatcccggtggaagatatcgggattgtggtgttagatcacaaacaaattaccatcacacaggcattgatggaagccttattggaaaacaataccgctttaatcacctgtgatgctacccaccatcctaccggcttaatgcttcctttgtgcgggaacacgatccaaaacgaacgcttccgttcacagttagatgcgaccgaacccctgaaaaaacaattgtgggcacaaacagtttcgcaaaaaataaagaaccaggcggccatgttcgatcataaacaaattgacgatagttacttagtgccgctataccgcaatgtaaaaagcggcgatcctgacaattgtgaagccactgcagctgcacattactgggggaatttattcaaacaattaccagctgtaaatgagttcaagcgtttccgcgaaggtttaccgcccaataattacctgaattacggttacgccttattacgagctaccatggcacgtagcattgtaggagcaggattgttacctacgcttgggatctttcaccacaaccgctataacgcctattgcctggcggatgatctaatggaaccttaccggccctatgtcgataaagtggtgtatgagctcatcgaggagaaaggtattactgaagacttacctaaagagataaaagcattattattgaaaatcccggcaatggatgtattgatcgacggtgaaaaaagtccgctgatgaatgccacacaacgcacggccgtgagtttggtgaaatgttttaatggcgaacagcgcagattgctgtatcccgagtttatataaaatcagggatgcttatgtttttcagaagtcattaagcttttaagcttttccaaagtttaaaactttggaaaagctggcactagcaattgaaataaaatattcatctaattttaaaccatttggaaaacaaaaccgaaatattatcacctgatacattctatcacatctacaaccgtgcaaacggcaatgaaaacatcttcactgagctggaaaactaccgtttttttcttaataagtacaaacaatacatttctcctgtttgcaatacttactgctattgcttaatgccgaatcactttcattttctgatcgaaataaaaaataaagatgaactcattcattttttcttacaacaaaatcctgatctaaaacttgcatccttctttacgtttgaaaggttggggaaactcatgagcaagcaattttctaatttcttcagtagttatactcaagcctataacaagcaacaaaaaaggcagggaagtctttttatgaaaaacttcaaacgaaaaaaggttatagataaaaattacgtatataaactcattcattatatacattacaatccggttgaagccggtttatgcaaaaaagtagatgaatggagcttttcctcttttaacagcatcctttcaaaaaatccaacattgcttaaacgtgatgaagtaattaattggtttgaagacaatgataattttattttcattcatcaacaattgccaaaagagttaacgattatgttcgattaaatcaatgtttaaaacgtgacaaattaaactttcaaaggattgcaactttgagaaacagaaaccaaagtaaatagcaatgagtataactactgaccgtttaaatgcatatcgcatcatgtggacactcgtaatgtatgacctcccgaccgaaacgaaaaaagaacgcaaaacggccgctaaattccggaaggagcttttaaatgacggattcagcatgttccagttcagcatgtatgtgcggcacagctccagctccgaaaatgcggaagtacattgcaaacgtgtaaagaaaaatttaccggaacatggaaaaatcgggatcctgcaaattacggataaacaattcggtcaaatagagattttttttggaaggaaacctgttgaactgcccaatgttccgcaacagctggaattattctgagccccaagctagcaatcaaacgattttatcaggtcagaattcatcaggtatttattaaaatcatctacttttttctgactccccaacacatccagcgaaaaccggatatcatcctcatgttttgtttcgctgcgctctataaatttaagctcaagcgcagttaattgttttttaatttcctctatgttgatccggtctttttgaaaagaaattttataggtgcgtcgttgatgcatacgatcgatgatcagctggatatactcaaacaaaaacaaaatgatgatcgttagtacggtcccttctccggcaagcacataatcacccgacccgattgccattccaagtgcagcggtcacccaaatggatgccgcagtggtaaggccggtcacactaaaaccatctttaaaaaccacgcctgcaccaataaaaccgatcccggtaataatattagctgcaatgcggtcttcattggccggtgcgcctaatttccttgaaacgattgtaaataaggttgatccgatactgatcagtatcatcgtccggaaccccgcggctttgctactgtattccctttcaattccaattattcctcctataagcaatgacagtaataattgaattgtttcctggtatgaaaattccatgtggcttggttatttacgtttttgctaaggtaataagagtttttcgacttaaaattgtcaaaaacagataaattagaaacaaaaaatccgggtcttgcccggatttttgtatgagatcacctcatttttttaattgataaactaccacaagactattgattttgttggaatttttgacctatctgatgtttatcaataagtcaaagatacattttgaaagcaaatcacaacctgccttattaaaatatggcgacctatcagatgtttatcaataagtcaaagatacattttgaaagcaaatcacaaccttgtgcgtctgttgttgatattgaaggcagatgtttatcaataagtcaaagatacattttgaaagcaaatcacaactatgaccaacatagtacggatgggagccaggatgtttatcaataagtcaaagatacattttgaaagcaaatcacaacccacagcctttggctccttcactatattaagatgtttatcaataagtcaaagatacattttgaaagcaaatcacaacgcgctttcattgatgatatcacgctatatagatgtttatcaataagtcaaagatacattttgaaagcaaatcacaacgtaacatacaaaatttctccgatctcttttgatgtttatcaataagtcaaagatacattttgaaagcaaatcacaactccgtgatcggttgttatctcacccgcacggatgtttatcaataagtcaaagatacattttgaaagcaaatcacaacattgatcattggtgccgtcaagataaacaggatgtttatcaataagtcaaagatacattttgaaagcaaatcacaaccaacaacaaaagctttaaccgtcaattgcagatgtttatcaataagtcaaagatacattttgaaagcaaatcacaaccctaattacaggtttgatgatatacctgatgatgtttatcaataagtcaaagatacattttgaaagcaaatcacaacagcaacgatgtagcgcccgatactatcggtgatgtttatcaataagtcaaagatacattttgaaagcaaatcacaaccaatgatgggcaatttgaccaatcacgaatgatgtttatcaataagtcaaagatacattttgaaagcaaatcacaacagcctccggaagtggctttcctagccgtctgatgtttatcaataagtcaaagatacattttgaaagcaaatcacaacaactcgggcttgtccataaacattgcggttgatgtttatcaataagtcaaagatacattttgaaagcaaatcacaacaaatggaaaacaccacacaagggcggaagcgatgtttatcaataagtcaaagatacattttgaaagcaaatcacaacacgccagatgaagtaaaaaaaagagaagcggatgtttatcaataagtcaaagatacattttgaaagcaaatcacaacaggaaagaatacgattcgtatgcattgaatgatgtttatcaataagtcaaagatacattttgaaagcaaatcacaacaaggtttattcacttattatcctaactccgcagacgtactatcctaactccgcagacatagtaagcctcaataaaaccaagcctttcctcggagttactgacaataaacacctcggaggtttaaattaacaaaaagctcttcagattatgttctgaggagctttttatttttatttttgacatttatatttatttttttgcttctttgtttttattaatttcttgcgctattttctgtaattccgcaggtcttgtattatacagtttatccaaactttgttgcaaaatttcatatgcaattaaaacatcttctcttgttaattcctcaagctcatgacttccgtcatttccgatccactttattgcaagtaggagctccgcaacttcaggatttgttttttcgaatgccttaattttagcatgtaaaggataataaactgcttcacctttcttatttgtaagatttttggggatcccacgttcatccattatcgcttcaactgtaattcttattttgtttgcgcatgaggaggaatctgcccaaaatgatgtaaaagactttcttaaacacaaaatgatcttttcgtcctttaagtaatcaggaatagctattatttctaaaggtgggttaaaatattttattgcaatgtgctcacgaggtaccatttcatgttcaccagggtaccctgggacactttcaggtacaggttcaacaaacatatctcctgaaatcactgctgtgcaattgcactttttgttactacacaccaaagtcccagtaaaacagcctctaatccattcaggttcaccttcttcaaaatataatttttttgaagaggggtattcaaatgtcttaattccatcttcaggcggatgaaggtttcctgctttacattcagggcaaatccaactagggagataccctatctcaaatccaactaggtataattttctatctattttcataatttcagcccgttaagcgattctaattcttattgacctaaaaatagaataataatctatatactcaaacttttcttaccttatttgtctaaataaaaaagccctgctcgatgatcgagcagggcttttttattaatatttcgctttaatcttctccgcctcccaatataagagctaaaaggccaacaactgccactgttcctagagtgttagcaacagcatgagaacctgttcttccttctctggaaagttttgtcgcatcctggcaattataagtaactagggcataatttttattagtttctaattgcttgaaacttcttaataaaacaacatctctgctatcagattttctctttgtgtaataaaacgggttgccattttcgaattccgataaggttacaactgagggaccattagtatccttatggttatggaaaaccatggtctcgtgagagtatctattacgacctaatattataccattatgagtgaagagggcatctttttttctagcgatttcagcgcctgaatcttgagtcaattcgatgtggaaataatttaaataattgtaaagttctatcatattgagtagtttttgttatacaaagattacaaaaaaaaatatcaaaattccaaaaaataatatgtctcaagctccatcaatttatttttttgatttattgatctcaatttgtgtcaaaagcaattcttcagctttttcgattcgaatgaacctaaaatcagttttgggatagaattggtaaaatacgtctattaaattttgagtcctctcacggtcaatgttttcaagaagattatacatttccattagatcgtaaaatttagacccatattttccaatcccgttataaaataacagagaaagctcatctgctgacatttgggcttgaatgaaatttatatatttcttttttacctcaatggaaagatcattcgtatcattaactaagctaacaatgttatatatgaatctaaaataatgggctagttcagacacatgatcgtcaaaaaaatcattgtacgcttggaaagaatattttctataaatatttaaacgttctttttccgaagcatttctacctagctcgccagacagttgagcctctgccaaagccttccatattcttctttgtaaagctaaatttgctttcgtataatattctaaccctttataaggtccgtcccttttagtcccagaggtataagtattataatcagattctagtttagtgaatttacatacttcaccttgagtattatttaccagttcacgaattgaagctaaaaggttaaaaaatgtgctttcaaattgttgttgcttgcttatcttagcttgataaaacactgtatacaatgaaattgcaacagcaacgatggaaatgataataggaagaatgtccatgaaagtatattgtatttagtatgatttatatttaaactaccgtttactgaacccatctgaaatttaaaaaatttcaagttcttttacaagtatatttctttctattattaaggcctcaagctctgccaaagaatgtagatgtttttttctaagttgtgatgataagatagacttcatccgtttgacaaaattagtaatagtcccaaaggtcataaatgcaagaaatgagtatgctgttaagatggaagcgtttaagttcaatagttttccgatatcattttcaaaatcaaatggatatattttgtaatacttataggcaaaattaatcaataccagcagagctccaataccaattctaatacctataattattcgcttttctcttatttttaatttttcttttattgcttgtaattgctgaatcttcttttcgacttcagctaatcgttttattttcttttccctttcttcttgtttttttctttcttcctcctgttttctttcttcttcctttcgtttctcttgcatataaaaccatccgaaagtcaacacaatggctatcatgatgaccacaatcactatgatttgccagattctacggtacctagctgcttcctcttcaggagtttcatcattattatatgggattatatcactcattaaattctcattaatagtttagcagcaatggtaactgcattgttttcgtaacctttatcagcaagcttttttattttttccttaatcgtagtcggtccccaaaatagccatccctttgcatctaagaatattgacaaatcctcctctctattcctatgtattttcccagctattagtccaaacgaaacttgagtatttgaattaatatgacctgattggagccaatcttctctcaatctcgcaataataacatttctataattttctgacgttaacaatttataacggccttcttgctgttcttgctctaatgccacagcatcataataaactccagtgctatctaagaatgattttacttctaacaacagaactttattttccttaacgtccaaagctacaatatcgatttctggtcgtggagttgagggccttcctataagcttcttttcagctggagtcagattgattttaacagagtactgaacccagtatttatcttctgtaagaagttgtccaataatttgttcaaatgcgtccatatttctacaatgaaagtatcataattattaaaaatagaaaatttcatcctatttataataaaataattataaatcttccctgcaaaaaaacttgcggggcaaagcagtatgataaggagacctaacttttggagacatctgaagaacttctttattaaaagaagaataaaaaaatatttgttttgctacctaaatgcagatcagcaaaaggttttattgcaatattttgcaatgaacactcactgggataataaggtaaaatacaaaattatgccacagataatattgcatgagggcttaatttcggacaactattgtgtttattccaattcttcatccatgacatggagaaatgctgagaaaccagcaacgtcagcttctattattacatagtccattccttcggaggggaacactggtgttgcactattaactaaaaatggagtatcttttgtcgcaacgactctgtaattaagttgagttgcaaataataccacaatatcacctactttatatctcatatttaaaattatttataaaacaataaacgcttgctataaatagtaagaaaaaattatctgcattattttttcttccttttgggtggtttcggaacatcaataccttgaaaaaactcttccaaagtcacaccaagctctttgcataccttgattaaagttttaatactgaaattttccccagattccaaccgccaatacgcagaacggctcattccaagctcaaaggcaatgtgctcgtaatttttatagcctttttcctttctaatctccttaagtctagcggccacctttgccaattcaggaattttctctgttttttccataaaacaaagctggtgaaaatgataattttatggtactcctatatattgtgtactatatattagaattattttataatttagcattacaaaaacttaaacccatggaaaataaaaacacaacagaaaaattaacccaggaaaaacaaaacaggaaaataggcctgatagcagtggcaattattattatttgcgctgctttttttggtaagagcggctccagttccagcagttcgtcatctaattcatcaagccatacctgcctaaattgcggcaagagctactcaggatttggatattcaacaattgatggcgaagaatatgagctcaccaaagatcaaggagatcaatactgctcaagatcatgtgccaaagcatccaggccagcccgttggagataatttttaacaattaaaataaaaaaacatgaaaaaaataattctattatcaactgtaatattcagtgttgcatgtaatgcaccaaataaaaagcctgctgatgttattaatcaaccagccccacaagaggtcacaaataattatgcgtttaatgtcgataatgaaagcgactgccttaattttcttaagggcaaaacattctatggaaacgccattcgaatagaagtaaacaacgaaggcaaagtttccgtgtataaaaaaacggataacaatcttttatttgaaagtgatttcggaaaacagccagagatcggaattcgatacggggctggtggaagaagaataaaaataagcggtacaacttcctatagaatgggcgaagctgttgaagtacaaaaagacagtgtggttgaattgattgctataaataatggcactttaacaagcaaatcaggagaagaaagatttacactggaagacaaaaaataattttattaaaatgaattctgctaaaaataaagttcagctcacgggaagcttgggcgtggacccagagataagaacgctggaaaacggaaagaggcttgcaaaggcagctattgtaacaagtgaaacatttaaaaatcccaaaggtgaatctattacagaaaatcaatggcataaccttgtggcatgggataaggtggctgacattatgcagaagtcttgtaaaagaggctgtgagcttgccatagaaggcaagcttatcaaccgccactatattgataaagaaggaataaagcgatatgtcaccgaaattgaagtaagtgaattgttgttattagaatagaaaataacaataggttactcaatatttaccaggtcactgatcttaa

SEQ ID NO: 2142 - DNA, 24278 bp, synthetic construct
  misc_feature 1..24278: note = Synthetic
  source 1..24278: mol_type = other DNA
atgaagtgcccgaaaagcaaaaacgtttatcaaaagcggaatttgattacatacacagtgataaggacggggacgatgcggtggaagcacaacctaaaatttcctggggaaggttattggctttcaggcaaacctgggcttttatcgcaggcaagtttttaaccgacggcatctggtggtttttattattctggctgcctgcatttttagatgcccaatatcatctcaccggcatgcaggtaagtttgcccattgcatttgtttacacattagcgggcgttgcaagtgttatcggcgggtggctgcccatgtatcttgttaagaaagggttcacggttgtaaaggcccgcaaaacgtccatgctcatttacgccttttgccctctgctgataatagcagcgcagtatgcaggcggttatcacatgtggtatgccattattattattggcattgctgcatctgcccaccaggcatggagcgccaacctgtttacaaccgttagcgatatgtttcccaaaaactccgtggcttccgtagtgggcatcggaggcatggcgggtggcataggcggtatgctggtatcaaaatttgcaggcctgttattcgatcattacaaaaatctcgggcatattgaaaccggttattttattatgttcctgttttgcggttttggttatttaattgcttggctcatcatgttccttggcctggtgcctaaaatggagaaggtgaagattgtgtaatgcgtggcctgggatgagaagtatttatagctggatttaggcaattatagatgactgggtaaagcactttaaatgtcatttcgacgacaggagaaatctcccaaaatacaatcctcaaagattccataaagttcctgctatgggcaagctgaaggaagaaattgagtgattcgcagcctcattaacgaagtaaagaaaccggccattttaccgtcatgcatgcaccagctccctgtcccggttctttcaggagattgggcatctcatcattagccatttacttttgattgttatgcaaccgaatgttttcccaaaatcaggttgattaacgttaatattccacaataaaaaatcccgctttgtgcgggatttttttattcatttaccaggataaacttattgagatttctttgcgtcttccaaaaatttagccaggccaatatcggtaagcggatgctttaataaaccgagaatggaatcaagcggggaagtaattacatgtgcgcctaattctgccgcctgtataatatgattggggctacggatagatgccgccagcacctgtgtttcataaccctgtatatcgtaaatctggacaatctgggcaatcagttgcatgccatcccagccactgtcgtcaatacggccgatgaaaggagaaatatacctggcccctgctttagctgcaagaatagcctggccggcagaaaaacataaagtacaattggtggcaatgccgttatcggtaaaccatttaatagctttcacgccatcctttatcatcggcacctttaccacaatatttttgtggatagccgccagctttttaccctcttcaataatatcttcgaatttggtggaaataacttcagcgcttatatcgccatcaaccatttcacatatagttttataatggttcataaccgcttcattacctttaataccctcttttgccatcagggaaggattggtggttacaccatctaaaatgccgagatcgtgagcttctttaatttgtgcgagattagctgtatcaataaaaaatttcatagcgcaatgccgttttccggtagtatttaatttgaagaaaaatcctgattatttatatccccccttcagggggttagggggcaaaataaaaaggcaggcttattacatcgcaccgctacaaccgcctactcttgctgcattcctgccctgggagggttcagcaggagctggtcgtgtaagacctgccggccgcaaatgtaaatgataatcgtcaaaaaaatatttattgttgcgttaagttacggctgtccactgtaacggcgctcaccaactggtcggcacggtcgctgagagaccggtaatacacaagaatagtgtacgtattttccgtttcggaaaaatcaccttccgtatctgctgtttccgtggcattatttttactgccgggtgcttttgttacataggtataataataataaccattcttcagcaacagtgttttttcaaatacacctttatctgcattaaaatccagctcgcagatattatcatcgcaaacaccggtggccagttcccctgtcatatacactttcctcccggccaatgcattaatattttttggcacaaaagtgaaatgcacattcgcatagtcgccctgcgtccagggattatttacgtcggtagtgcttacttcaaaaaaaccattcctgtcaacataacttacataccttataccggtgcgctgcatatcaggcctcagccaaacattaaaaggcacgatgttttgatcaacactgtcaacccgttcgctctggaaacgaaagctcctcaaatcaacccagcgatatggcctgccgccggggaaaaccagtgaggtttcgttattgtactcataggcattaccgcgcataaaggtgggctgaatgttcattaccgcattatcccacctgaaattttgcagcaccaccactttcaactgctgctgcggattgttgatattcagcttggttttatcaactgtaaactgcagcttctggtgggtgcggaacagttgtgtattgaaaggctgcgtgatcttcactcctactgcaaccatatcattcagcaccaaaacgcgtcttgtaaatgcaagtttggaagtatcgccattcaggtaaactttcagcaaataattaccgcttaatttgggcaaacaatttttttcaggcaataaagcctggtaatgcacatattttgttttggcaacagatgaattgcggtattgcatgagcttgccctgtgtaaaaccctgcaggtaatcaaacgggctgaggttggcaggctgccagttggcatcgcataaaacataggtataattatagcttttaataccgccgcccaggtcatcaaaatgcagttcgaggctgctgactgcattgagtttgataacaggatatgcatcctggttgcccgtaagaaagagttttacgccgtgtatattcggcatataaattttatctggctgctgtgcgtgcaggttaaaagtaaaaagcaggatagcgataaatgcaaaagcggttttcttcatgtatttactactgagagttcaaatgtagggcacttcctccgtatctccttgtactctcctccatacttcctccatagttggtgcatgaaagtgcgtagattagtgaatctcttttaaacatttacaaggtatatagcaggtgactcatcccaacccttcttcaaagaagaagggcaagaaatagcgtgattttctaatgcaaaagagcaggctggtacagcgcaaaagggtttaaggctccggttaggtgtaaggcacctaaattaataccggtttccagccgtcggaagggtttaactgtaatgttatctgcacaggttgctgcgttgcagccgtttgtttcgccggttcccgttttataacaggttgccattttacatcgaggtaattattcatgcccggatcgctgttgtaaaaagcttctgcctgcgggcggtattctccgcccactggtggcggcaacagttgcaaagtattattgcggtcaaacaatagcataccgtttttatgcacccagttaaaaaacaggttgccttcattcatgtgtttcaatacaaagtatagcgggtgcaccaccatattcacggttccaaaatgtgctaccatttcctgtatttcggccagcttttcttcgccggcctgtatatgatcaggtgttattaccagcaggtcgcaggtaaaatgccggtcttccttcaactgtctttttataaaagctgtacgtgtgataacactactggttctgcacccaaaacagtagatcataagggcattgagctgggccgccaccagctttttaatgcaatggatggcgttgctttccatgccattgagttgggaaatgtaatttttcatgtgtatgtattttgatgttaaaaattatatgggaaacagtagggttgctgatttatgtgcacctttatttttccatcttactaagatttctttctgtacctttttcatttgaataacaatcagcttattgttactttcttttcttgaaaaaagaaagtaaccaaagaaattcaagcacagatgatctttcaacacatccgcgcacatgccttgatttggcttttgtgctgctgattcttcggctgtcatgccttgatattcgatgccggcttcctgactattagttattttttaaaatgcagggagaccactattgcatacaatgtaaaacaggcacaaccacttgccgtcattcccggctgcattgtaaaccctcgggtttacatccggactacggcaatacctgaaaaaatttttattctgcctgtgatcatgtctaagcatattgcaaatttcattatggcatgtgccgtatcccacagtaaagccatgtttaatacttcaaccagtttgtattttacttagttttacaaggcaatgattgtttggggataaccgttaaatttgtttatgacaactactgcaaaaaaggtacacgaaggccgtaacgtaaaacgttttcgcgaaatgctgggcataaaacaggatgcgctggcggctgagctgggcgatgactggaaccagcaaaaaatatcgttactggaacagaaagaaacccttgacccggttatattaaaagatgtggccgctgctttaaaaatacccgccgaagcgatacagaattttgatgaggaacaggcggtgaatgtgattgcaaatacttttaatgaaaggtcttttgagaatgcctttgctaacaattgtactttcaatttcaatcccatagataaaatgattgagctgtatgaacggatgctgcaacagcaaagggagatgattgagaagctggaaaagttgattgaaaaaaagtaagttgttttagcatcattataatagaaaccaaacctaacacctgaaaaatggataattcattttttgtcttctcagatgttgttacgaataatccggtagtgattgaacgttcacatatatgtttatgggaatttaagaacaacagtgctttagttgaatttggcttcgaagtttctaaaaactctcttcctcaaaaccagctcaatattaacgtatttatcccttggctttctaaatcggcaggagaaaaagatttatatgagaaacttagcaattctgaaaatagcagatttattttcaacgactccataaagcagactcaatcgttggacgatggcagaaataaacttggtgtcattcatgagtttgccaatagggattatctatgcattttacctatttcaattataaggaaagggaataatatacttgaagtaaaaattgatcttcaacattacagagcagctcaagcagatgcgaatatttatttcagatttgctataaccccgcaaatgcctgctatatctatgcataaaaaaggtattagcaaatcaactatcgtttacgatataaaagtgaatgaaagaagaaatatcccagatcaaatgcttaccttcttttcgcaaagaaatttttgtgccatcaaagcctgtttctgcttctttattattcccaacgattacgatattgtattctttgaaaatgattcgctcaaaagcgtacgaactcttgagtatgacgcttttactaaatatcttggcgataaaagagtaaagcaggatgaattgatagttgtattcaacaagaaaaaaaattctgaatcattctctttcttttcaatatttacaaaagaacgaatcggcccggaacaatatatcttagctattttaataaatatggtttccggcatcctactgtttttaccgggtttcagaaccggcattaataaggaaacatcagtttggaaacaactacctgttgaatttattatagcgatattaatcactgtagtaacgtttttatatttcctttggccaaaatttaaagcatcaaaaaaggagctaactctcaaaacctaaagtaaaagaatgcaaaaaatatgaaagcattattagataccaatattataatacatagagaagctgggcgtgttgtggaacaggatattggtattctctttcgatggttagacagagctcagtacaccaaatgtatacaccctataaccatccaagaaattcatagaaatccaaataaagaaacagtacaagcgttcatgactaaacttgacagttatgagcaaatcaagtttccaacgccgttacagcaagatgtaaaagccgtatctgataagtatgacataaaccaaaatgatattaatgattcactgctactaaatgaagtttttgcagatcgtgttgatatcctaatttcagaagacaaaaagattcatttaaaagcgaaagaacttaatatatcagatcgagtatttaaaattgactcctttcttgagaaaatattttcagaacaccctgaacttattaattataaggttttaaatgtacgtaaagaatattttggacaaatcaatcttaatgatcatttctttgatagtttaaaagaagactaccctggttttgaacactggtttataaaaaaatctgacgaaatagcttatgtgacaataaatagggataataacctgatgttgtcttttctttatttaaaaattgaaactgaaggtgaaaactattctgatatcatgcccgtatttgtgcctaaaaaaagattaaaggttggtacgttcaaggttatcaataatggttttcgtttgggtgagcgctttatgaagataatttttgacaatgccttagctaatggagtacaggaaatttatgtaacaatatttgatcatagagaggaacaaagacggttaatagaattgatggaacaatgggggttttcctattggggattgaaaagaggggaacgtgtatatgtaagagattttaccccgacattcgacatcagttatttaaaggaaaactatccttacatttccagaaatagaaacatctatatcgttcctatttacgagcagtaccacacagaattgcttccagattccattcttaatacagaatcacctttagagtttattgaagattttccgcatcgtaacggcattagtaaagcatatatttcaagggcaatgctaccacatccatcaaccggtgatttactggttttctatagaactggaggctattacaaaagtgtagtttctaccataggtctggtacaggaagtaatttataatattgaaacagaaagtgattttattaaacaatgcagaaaaggcagcgtgtttccagaaacagaattaaaagcaatgtggaattataacaaaaattcaaggccctttgtcattaggtttttatatgtttactcattcccacatcgtatcaatatgcagcgattaattgaattaggagtattgcaaggcattaatgatgcaccgagaggatttaagcctattacaaagaatcaatttgaattaatattaaaagatacaaggagtaatgaaagttttattgtcgattaagcctgagtttgctgataagatatttgcaggaactaaactttttgaattcaggcgaaccatttttaaaaacaaagacgttaaaaaagttgtggtttatgcttcgtcccccattcaaaaagttattggcgaatttgaaatcgactttattattaaaaatagtttaaatgaactttggcatcaaacacaagaattttcgggtataacacaagagtacttttttcaatatttttccaacaaggaagaaggatttgcaattaaaataaaaaatcaaaagaagtataagcaacccaaatcattaaaagaagattacaacctgttaccaccccagtcttttatatacctatagctattaactattttctgtaatcttcctataaaacacttctccaacctcgtaatttacctgccctacatgtaggatacatactacatcttttattggtttgctataaaaacaattatggcaaacaaaacttctccaattcttttcagcaggctaatgtttttactaaagagcgtgggcttgggataaggaagggtttaaatttctcaagttgacctcgcctaaactttacagatttcgggaccttcttgcccttctcctttggagaagggttgggatgaggtcaacctgttattattatcatccctttatatcacccaatttttgtttatgcaaaagaaaccctacactacattgttttttgagagcatacttcaaaaagaacaatatcatgctctgctgtcatggcagcaaaaaacaaaaggctgcctgctgctggcaaagcttaccgcacctgctgatgcagtgccctattgtatttttaaatacagtgcttccggcaacttttccatactggccaacagccttgcagtgcacacttcgtacaaccattgctttatataccgccgcaatatggcctggttgagttaccggaaaactgaaaacaaattgtattataaaggcaatgccgaagcccgcagcaacatgctccggtttttaacagcaggaaagctcagagcaaaactggggcttgattttcttaccgaaacagatgtatcgtttgccgggcaaagcactgctttgctgcataaactttttgctaaagaaataacggcgcaaagcactgcctggaaattctacctgcagcactgctatcatgttgaaggtaatattgactacaaatcggcgtaccggctgtatggcattgtaatgaaattaacaagccagcaggagcgaagaaattacaccgaactattctttaaaatactctgtacttccaataacctgcagcgggacataaggcatttttgcagcgataaaaaactgcgccgcacattagtacagatggaggagtttatcaacaatagttttttgatgcatcgaaaagtaaactataccctttcccaaagccgcctggaagaaacctatgccctgcaaatgcaagacctgctgcatataaaaataaagaacgggctggaacaaccgggaccgcttattccatttttaccggccactatggaattcacttttggcggcctggctttttacctgctgaatgatgctgcagtctttcatgaagaaggcctggctatgcggaattgcatttttgaatgttccgctttcaggaagaatacaatgaaaggggaagcactgtacttttccgtgcgcagcacgcagcacacgcatttaagaggaacgctggaaatatacatcaatgaacatgcaccactgctgcaccagtttaaatcaaggctgaatgaatatgattttcttcatcccggtaaaaagagtttaccgtttggtgaagccttcctgcacaccacccgcagctttattgaaagcagcgaaatgcgcagcttcttttacagcatatacaaacattttaaaagtgaggaagagcagctttgaaatgagggcttttaataacggcataatttaagttgataaacatcctatttacggtttcccgtattttttgcaggctggatggaaataacttaacacggtttataactgcattgctacagccagtttaagcattggtttgtactggtaaaataaataactttggttatctaacgaagcttaatgtaaacccggactttagattgaataactgctgagcttgaaatagtccaatgtaaattacaaagcgtagaaataaaaaagccccgtattgtaagacgaggcgcttaatgttttcacaacggaataatccattattgtgaattgctttcgacaacaaacgtaaaccattatattaaatgaacaaaaaaattttaggccttgatttaggcacgacctccataggtttcgccaaagttattgaagatgaaaaccaccaaaactcttctgttgaactgattggcgccagggttaacccgcttaccacagatgaacaaaataattttgaaaaaggcaaacctgtttctgtcaatgcagataggaccttaaaacgtggcatgcgacgcagccttgacaggtaccagcttcgacgcaataatttgattgaggtattaaaagttaataaaatcatcaatgatgatacaaaacttgcggaggatggcaaaggcacaacgcattctacgtatgccctgcgttctttggcagcaacagatcagataggattagaagcgtttgcaagggtattgctggccattaataaaaaacgtggctataaaagcagccgcaaggcgaaaaatgatgatgaaggccaggttgtagacagcatgggtgcggcgaaaagattatatgaagacaatcttacacctggtcaactggcctttcaattactaaaagatggaaagaaatacctgccggatttttatcgttctgaccttactgcagaattggataaggtctggaattttcagcaacaattctatcctgaaattcttacagaagaatttaaaaaacatttagaaggtaaaggccagcgcgcaacatcggctgcgttttgggggcaatacaagtttaatacagccgaaataaaaggaacacgcgaagaaaagaagctaaaggtttatgaatggcggagcaaagcgccgaacatgcaacttgccaaagaagaagttgcctacgtaattactgaaatcaataacgatcttaataaatccagtggctatctcggggctattagtgaccggagcaaggaattatttttcaataaacaaaccgttggacaatacttgtttgaacaactgcaacaaaaccggcatacacgtacaaaaggacaggttttttatcgacaggattacttagatgaatttgagcagatatgggaaacacaggcaaaattttatcctcagctcaccgctgccctaaaggaagaaatccgcgatattataattttttaccaacgaaagcttaaatcacaaaaaggtttaatcagcttttgtgaatttgaaagcaaagagattgaaacagaaaataacgggcagaaaataaagaaacgtattggcttgcgtgtagcgccgaaatcttcaccactattccaggagtttaaaatatggcaggttttgaacaatcttcaattccgcaataaagaaaccaaagaattattcttcccggacttagatgccaaacaacaattattcaatgaactaaatattaggggaaatatttccgtttcagatgcaataaaaatattagggtataaatcaaaggattgggaagccaattacaacatacttgaaggcaatcgcaccaacaaatttttatacgatgcttattttaaaatagtagagcaggaaggttatgatgaagacttgctcaagcttacaggaagcgatgaaatagatgtttccaaaatagacaaacctgcagccgagattcaaaaaatggttaaggatatttttgaattgttagggattgatacgaatatcctggactttgatgcagagttagatggaaaagaatttgagaaacaagcttcttaccagctatggcatttattatattcagcagaagatgataacaagaaatatagcagcgaagatatttttacttatggcaatgataatattagtttaaagaaaaagctttgtagcaaatttggctttaaaccggagcatgccaaaatattagtgaatataacatttagtgatgattacggaaacctaagcagtaaagccatgcgcaaagtgtatccgttcatgaaagaattaacttatgataaggcatgttttgaagccggctacaggcattcggcatcatccttaacaaaagaagaaattgcaagccgacctttaaaaccacgattagatttattgaagaaaaatgtactgcgcagtcccgtggtagaaaaaatcctcaatcaaatgataaacgtagtaaatgcattgattgatgaagaaaacaaaaaaagaaaagcaaatggtttactggaagatttccattttgatgaaatacgcatagaacttgcccgcgagctgaaaaagaatgcaaaggagcgtgcagaaatgacgagcaatataaatgcagccaaactgcttcatgaaaaaatcattaaaatattacaagctgagtttggcgttcctaatccaacaagaaacgatatcattcggtataaattatacgaagaattaaaaaacaatggctacaaagacttatataccaatacttatataccgagggaaattcttttttccaaacaaatagatgtagaccatattattccgcaaatgactttgtttgatgacagcttttcaaacaaaaccgtgatattcagaaaagacaaccaggataagggtaataaaacagcttacgactatattcttgaaaaatacggcgataaggctgttgaggattatgtaaaccgccttacgagtttatttgaattaggtaagaaaaataaggaagaaggaattagtaaggctaaatttcaaaaacttcaaaagaggcaaactgaaatcggagatggttttattgaaagagacttgagagaaagccagtacatagcaaaaaaagcgaaaaatatgcttttggaaatttgtcgcagcgtagtttctacaaccggtgaaatcactgcaaggctgcgtgaagactggggcttggttaatgtgatgcaggaaatcaatatgcccaaatttcgtgctttgggtttaaccgaaatgattgacaaaaaagatggcggccagaaagaacgcattacagactggagcaaacgcaatgaccatcgtcatcatgctatggatgcgctaaccattgctttcactaaacataatcatatacaatatcttaaccatcttaatgcaagaaaagatgaaataagcaagtggcaccctgtcgtcaacagaatagaagaaaaagaaaccgaattggtgtatgacgatttaggtaaccgaaaaagaaagtttaaagcgccaatgcccaactttcgtgaagtggtaaaggaacatttggaaaatgtgcttatatcacataaagccaaaaataaagttgttactaaaaacaagaataaaacaaaatcaaaaaccggcgaaaaagtaaaaacagaacttacaccaagaggccagttacacaaagaaaccgtgtatggaaaatatcattattatgaaagtaaagaagtaaaaataggaactggttttgatcaggcaacaacagcaatggttgccaatcctatttacaaaaaacttttacttaaacggctttccgaaaataataatgaccctaaaaaagcatttggcggcaaaaacgccttaaacaaaaacccgatttatttggatgaggctaaaaaagaagtattgcccgaaaaggtaaaactggtatggcttgaaagcgattattccattcgtaaagatgtaacgccggaaaactttaaggatgcaaaaacaatcgaaaaaatattagatgcaggaataaaacgcataatgctgaagaggctggaagattatggcaatgaccctaaaaaagcattcagcgatttagaaaaaattcctatatggttgaacgaagctaaaggcatagcaataaaaagagtaacgataagtggcgtaaagaatgcagagccgttgcattataaaaaagatcatttgggtaattttattttggatgaacaaggtaagcaaatgcctgtagattttgtaagcactggaaacaatcatcatgttgctatttatcacgatgctgaagggaatttgcaggaaagggttgtatccttattcgacgcaataaggctggtaaatgccggtgaaccagttatagataaaacctataatgagggaatcggctggcaattcttatttaccatgaaacaaaatgaaatgtttgtctttccaaatgagaaaacaggttttaatccaaaagagattaatttgttagatccaaagaatagaaaggcaataagcccgaatttgtttagggtgcaaaaattagcaactaaaaattatatgtttcgtcatcatttagaaacaaatgttgatgaaaaaaaagagcttgtaaattcagcttatatcaatattagaagcacttctcctttgaatagaattataaaagttcgaattaatcacattgggcaaataatttcaataggagagtattaagctaatttaaagataagccgaaacaaaccccgagggttttaaaaaccctcggggtttacaacaccaaataaaacgtttatgattaaacgcaccatctgcatagaaaacccttgccatcttaaatgccgcaatatgcagatggtggtgaattatgaacatataaaaggttatgaaaacctttccgaaaaaacagtgccgattgaagacatcggcatactggtgctggagcatcagcaaattaccatcagccattatttactggataaactggtagctaacaatgccgccgttattacctgcaacgaaacgcatcatcccagcggcatgatgctgccgctggaaagcaacagcattcaaagcgaaaggttcagggcacagatagaagccaccgggccgctgaaaaaacaactctggcagcaaaccataaaagccaagctcagcaaccaggccgctgttttaaaaaaatggggcatccggcataattatctcaccaaactggcgcaggatgtaaaaagcggcgatgccggcaacaacgaagccaaaggtgctgcgtattactggagtcatttattcccggatgcctggcagtttttccgcaaacgcgaaggcccgccgcctaataatttattaaactatggttatgctattttaagggctacaatggcaagggcgataacaggtgccggcttgttaccggcgctgggcatatttcaccgcaaccgttataacgcctactgcctggcagatgatatgatggaaccttaccgcccttttgtggatgtgattgtaagaagcattatagataaaacatcgtcggtggaaaacttaacacaggagctgaaagtgcagttgctgaaacttccaaccatagatgtattattaggcgatgaaaccagcccgctgatgattgccacgcaaagaacagcagcatcgctggcaaggtgttatacaggtgaacaacggaaactgttgtatcctgaaatggttgataatgggtaatggataattgagaattgacaaaccctttttatgaaagagaatatagttaaacagaaaagctatgcttttgccatcaacattgtccttttgtgtaaagatttacaacaaacccaaaaagaattcattctcagcaaacagttgctgcgttcaggaacagcagtaggtgcgttgatacgggaagcagtgctggcagaaagcaaggcaggtttcatacataaattatctattgtattaaaagaaggaaatgaaacgggatattggttatacctgtttaaaagatacgggatacattatcccggcaggcttcaatttaataataacgggtataaaggaattgttccagttattgacaagcataattaaaaccgcaaaactcagttccaaataattgccaattatccattgtcaattataaattgtcaattgtcaattaaagtgaaatccaatcgcctaaatgcatatcgtattatgtgggtattagttttttttgacctgcctacagaaaccaaaaaagagcggaagatatacgccgatttccgcaaaaagatcctgcaggacgggtttgccatgttccagttcagcatttacctgcggcattgcagcagcatgcaaaatgcagaagtgcatataaaacgggtaaagaaaattttacctgaaaagggccatataggcattatgaccattaccgataagcagtttgggatgatggaagttttttatgggaagaaactggctgaacctcaaaatagcccccaacaattagaactattttaacgtgagttcgggataagaaatatttaaacctgaattaccaaattaaagatgactgcaaatataaaacgcttcgaacgtcatttcgacgataggagaaatctcctgagatttagagggtttgaataatatcttaaaatttttcaatttctacatattcacccaaatttagatttattgaattgatcaatttttctttctttaacctgtccacttttttatttgttttctttcaggattgcttcttctattgaaaaagtttttataatacacacaatattcaaggtcgtattcaatgctccttcgaaatgacggtcactgactaatcttatcccgagctcacgctatttttaagtaaattattgcaaggcacggagtaaccgggatgcttaggaaagtaaaaaccctgtgaactcaaactgcccacagggttttaaactcattttttcattcctgtttttctttgaaaccctttatgggtaaggctttcggcttaaactgttgtattcaaagatcacaagaataaagtttgaaagcaaatcacaacaggggcttgtgccggtgtgcttatatacatgttgtattcaaagatcacaagaataaagtttgaaagcaaatcacaactttcgcctaacgtctcaaccagcttctgcagttgtattcaaagatcacaagaataaagtttgaaagcaaatcacaacatgacaaatatgtggacgttccttcgattagttgtattcaaagatcacaagaataaagtttgaaagcaaatcacaacataaaacgggcgctaaaacttcttttaacgttgtattcaaagatcacaagaataaagtttgaaagcaaatcacaacccttgcttcggcctgctttcctctaaatcgttgtattcaaagatcacaagaataaagtttgaaagcaaatcacaactggttgctctggctgggaaatattacctggttgtattcaaagatcacaagaataaagtttgaaagcaaatcacaacgccggtgttttcgtctatatcctggaagatgttgtattcaaagatcacaagaataaagtttgaaagcaaatcacaacggctttctatttcgttggcagcttctttggttgtattcaaagatcacaagaataaagtttgaaagcaaatcacaactggaaaaaccaatgggccaaacgtgatgaagttgtattcaaagatcacaagaataaagtttgaaagcaaatcacaacgcaattgctgatttggttgaaagcggcatagttgtattcaaagatcacaagaataaagtttgaaagcaaatcacaacggtgagtatgcttactgtcttttctgttggttgtattcaaagatcacaagaataaagtttgaaagcaaatcacaacatctttattgcaaatgttttttctgtgtatgttgtattcaaagatcacaagaataaagtttgaaagcaaatcacaacatcgtatgtcgggttaaacgcaaagcatttgttgtattcaaagatcacaagaataaagtttgaaagcaaatcacaactccatcctacaggctccttttcttccggttaggaaaacatcctccggcgaaaaattatcaggccccgatacaggcaggaattcatttatccgcaacacagccaaaaattgaacgctgaaaatgacagccttataaaataaataagcgccgtttgcatactgcttcagtaccaccataatatctcccggcatttccttcaataaaataatctgccgattaaatgaaagccatatttttgatgcctttgtatgatagcatttgtaaaaggaaattttgtaaccaaactgccctcgcaggtaattgttgatgtaaacggcgttggctacgatttgcagataagcctgaacacctattcggctattgcaaataaagaaagcgggaaattgtttacttacctgcacattactgaaaatgcgcacacattatatggctttaatgatgtggaagaaaaagagctttttttacagctcataagcgtttccggcgtgggcgcttccacggcaagaatgatgctgagcgggctgaaaccggaggagatcatcaggtcgatagcaaatgctaatactaaacaattggaaagcattaaaggcattggcaaaaaaacagccgaacgcattgtattggaactgaaagataaattaaaccgcctgcaaaccaatttaccacaatctgcgtattcacttaatacagttgagtctgatgccctgaatgcacttgtagctttggggattcaaaaaaatattgctgaaacagccataaaaaaggtactttcatccgccaataacctttcagtggaaaacattattaaacttgcactcaaaaacttatagcttatagagcaattttacctaaccaggctacatagaaattgacaaaacttcgcattgctgataaactcttactgataatactgctggtattttgcttttgcaacatggctgctgcacaggttaaagataccacaggttattcgctgcacgacagcctgcattatcctttgcaggacaggcgcggcgacaggttttcgtgggactatgcgaacccttttgatataagagatacttctttcattaaacaaaatattgaatatgaccccattaccaatcaatattatctaacggaaaagattggtgatattatttaccgcaaacccacttacctcacttttgatgaaatgtaccgcctgcaaagccaaaagcaggagaatgattattttaaccggcgcggccaggcattgctcgatcttaaccgtaaaatttcacgcccggcgccccgtgtttacgacaaacttttcgacaggatgtttggccttggccccaacggtctcagggttgatataaaaccgcagggcaccgttgacctcaccatgggttaccagggccaggtaattaaaaatccaaccttgccggaaaatgcccgcaggaatggcggtttggattttgacatgaataccaacctgaacattaatgccagcatcggcgacaaacttaaactgcccatcagctataacacacttgccaattttgattatgaaaaccagttaaagctcgattataagggtatggatgatgaaatattaaaatcggtggaggccggcaatatttcattccaaaccaaaagcactttaatgacgagcccgcaaagcctgtttggcataaaaacgcagcttcagtttgggaaattatttattaccgccgcgctggccagccagaaatcgcagcagcaatccgtggccttgtcagggggcggtttaagccagaccatcaagaaaaagctggatgattatgatgaaaaccggcattttttgctggcgcaatatttcaggaaaaattataataatgccatgagcaacctgccggtggtaaacagccaggtgcaggttatgcgcatggaagtttgggttaccaaccgcaccggcgccaccactaatacaagaagcattgttggcttcgccgatttaggcgaaagcgaacctgccaacagtaatattcataccataaccaatgatgttttgccgcaaaacaataccaacgacttgtacacaacgctgctggaaaatgccaatttcagggatccttcgctggtaaacagtttattgattgcaaggggcctggcgccggtgaatgattttgaaaaaacatttgcccgcaagctcgactctacggaatattactacaatccgcaggtcggcttcctttcgctgaacgtgcagttgcagcccgatgaagtgctgggcgtagcttatcaatatacttacaacggcaaagtttaccaggtgggggaattttcacaggatgttacagttgattcaacacagggtgtacaaaaagtgctttttctgaaactgttaaaagccacatcgcagcgcgtgaacctgcctatctggcaattaatgatgaaaaacgtttactctattgatgtaatgggcatgcagcagggcgattgcaaactcaacgttttataccaggaacccagcggcggtttaaaaagatacctgccggtaagtgatcctgcagtagcaggccagccgcttatccagatactccgtgcagaccggttaaataaccgcaacgacccccagccggatggtttgtatgattttgtggatggctttaccgttatttcacaacagggtaaaattatctttcccgttttggaacctttcgggcaagacctggctgatctcgctttccagggcgttgaccaggatactgttaagaaatacgtttacttccagttatacgattccataaaagcaatagcgcaaacctatgccaatcttaaccggtacgaattgcagggaacggtcaaaggcagttctaataccgatatctatctcggcgcatttaatattccgagaggctcggtaaccgtaacggccggggggcaggtattaacagaaaacacggattatattatcgactataacctcggcacattaaaagtcattaaccaggcgatcattaattccggggtacctgtaaatgttcagtttgaaaacaatgccacttttggtacgcagcaacgcagcttcatgggattgcggcttgactacgtggctaataaacatctttctattggcggcactttggagcggctggcagaaaggccttatttcaccaaggttaattatggcgaagacccgatacgcaacagcatgtacggtgttgatttcagttatcagaatgaattgccgggattaacaagactgatcaataaactgcctttctataattcagatgccacaagctcaatcactgcttatggtgaagccgccgtattaaaacccggccatccttcgcaaattggcaaaggcagcagcgggcttgtttatattgatgattttgaaggcgctaccagcagcgttgaccttcgttatccttttatttcgtggacacttgcttccacgccaagctcattcccggaaagccagttgatcaataacctggattatggtaagaaccgcgccaagcttgcctggtataatattgaacctatccttcaggataaatcgagccccaataatcctttgcgcggtaatttgaaggaattaagcgatccgcgtgtaaggcaggtttataccaatgaattatttcccaaccgcacaaccaatattactgatgtaattgcttcaacattcgatcttgcttattatccaaccgatcgtggcccttacaattttgctgatgataaagccaatgttgatgccaatggcaagctgcttaacccgcgccagcgctggggtggtattatgcgcagcctcgaccagaccgattttgaaaccggcaatattgaatacattgagttctgggtacaagaccctttcattaaagaccctgccagcaccggtggtaaactgtacatcaatctcggtaatataagcgaggatattttgaaagacgggcggcggttttatgaaaatggtttgccaacaccatcaatccctgctattacagattattcaacatgggccaggacgccggtgaatcccattcagcttacgcaggctttcagcaatgaccccgacgacaggaaataccaggatgtgggctttgacggcgaagcaaatgattctgaaagagtgcagcgcagcacatatcttgctaatatcgccagcaattttggcgcaggttcccgtatttaccaggaagccgatgccgatcctgccaacgacgattacaaatggtaccgcgatgccggctatgatgcagccggaacaggcattttgggcaggtataaaaattataataatccacagggcaactctcctatctataccggcacatcacagttttccccggcagccactttatacccggataatgaagacctgaacagggataatacgctgaatgaaacggaagaatattatgaatacgaagttgacctgaaaccaggcatggcagtaggcagcactaaatatgttaccgataaaaaaacggtaaacccacgtttagccgatgggtcttcagcgccggaagactggtatttattccgtgtgccggtaaaagattttacgaataaagtaggccagataccggattttaaatctatccgctttatgcgcatgtacctttccggttttgaagattccgttgtactgcgctttgccacgcttgatatggtgcgtaatcaatggcgttcatttacatacaacgtagatacaacaggcagctacacgcaaattccttccaactctcccactgttatgaatctattggccgtgaacgtggaagaaaacagcaaccgccagcccataccgtatgttataccgcccggcattgaacgggtacaggaattaagcaataacggcgtaaaccttttgcagaatgaacaagccatgagcttaaagatcaataacctgcaaaagaatgattcaagggctgtattcaaaacgcttaacctcgacctgcggcaatacggccaggtggatatgttcattcatgctgaatcgggcttaacgcagcagcccgcattggcgaacgggcaaattgcggcagttatacgcattggccaggatttcctggacaactattatgaagtaaaaattcctttgcaaatcacatcatttggcagcacaaccgcccagcaaatatggcccgattccaataaccttaaactcattttaaatgatttggttcagcttaaaataagaaggaatgcagcatccaataatataacccaatattattctgaacaggtgggttcaagaagatatggcattaaaggcaatcctaaccttggcgaagtggaaggcattttaatcgctattgaaaatgaaactgctaatactatcagcacggaagtttgggtgaatgaattaaggctttcaaagattgatgaaaaaggtggttatgctgcattaggcagggttgatatgcaactggccgacctgggtacactgtcgctttcggccaatacttattcttatggttttggaagcattgaccagcaggtaaaccagcgggcccgtgataatatgttccagtatgatgcggctttaaatattgatgcaggcaagctattaccgcaatccgtgggtttatccatccccgtttatgcaagcatcaataaaactattttaacgccagaatacgacccctacgatcttgatattctttataaagataagctgaaaatggcaggcaacaggagggattcaataagaaaagctgctgctgatattaccactattaaaaccatcaactttaccaatgtgcggtttgcacagcgcggaacaacaacaaaactctggagcccaagcaattttgatttcagttattcttataccgaatatgatcagaccaatccaactatatcgcttaacaatataaaaacttaccgcgcaggtattggttatacatttagcaatgcatcgaaattcaaagagccttttaaaaatctcattaaaaataaaagtgcatggctggcgccagtaaaagatttcaattttaattatataccatctttattaagtgttcgctacgatattaaccggcagtttggcatgtacgtgccgcgcattgtgaacacttacgattccaaagtagaaaaggtggataccacgtatgataagtatttcactttcgacaggtattataacctgcgctgggattttacgcggagcctcaacctggatttttctgccatagcttatgcaagggtggatgaaccgtttggcaggcttaatacaaaagccaagaaagatacggtgcggcaaaacttttttcatgcaggcagaaatactttataccagcagcgggccacgttaagttataatattccttttgcaaagcttccgcttacggactggatcaatggacgctacagctatgccactacatataactggataggcgccagcttactggccaccagtcttggcaacaccattgaaaactcgcagcaaaacagccttacagcagagtttgatttaacaagattatattccaaatcaaaatttcttactgccgtaagccaggtggatgataatacagatacggaagcaaatcccaatgacagcattcagcctccaaaaccaagggcggaagtaataacagattcttccggcaataaattaagaggcattgaaaaaaggcatgccttgcaaaaatggcgtcagcaaaagagggattaccgtaaacaacagcggaagaacaggcaaactacaggaccagccggtgctgt

SEQ ID NO: 2143 - DNA, 24278 bp, synthetic construct
  misc_feature 1..24278: note = Synthetic
  source 1..24278: mol_type = other DNA
tgcgtaataagataagcagcaaagttgcgctggccgggcggtgcggctgtttgaaaaacggattgataccccccgggcttttttacctgaagccggctgcctcctgtataaatggcataggccgcatcaataacggagctaatggccataaaggcctggcaaatggtgtaaggcggtattttgccggcgggctttggctggtcaataaaaagcggcaggtacagcaatagtttgcgcagctggtcaatactgccggcatgttcaaaacaaagcgcaaacacccggtaggggtcggtagtacattgctggcaccagctttctgtatgaaagggatccattgtttttatgatgttcataagtttttattttggagtaaaacaacaggagttttttttaatcaatgctaagaggagtaccgcctcttgtttactccctgttaagccctttaatggcgccatctacatgcatggtttcccttacatcaattaaatgcgcggcttctatgagttttgccaggtaacaatacagcgccagcacatccggtgcccggcgcaggggctttgcagcaagggccgcctttactatcctgtgccagcttctcagccattgttttaaggactggtatttaaaaaaagcagcaaaggcccggtaggggttgcggtattcttttttggaaagaaaccgcggaagatctgtccatacactggcgctcttatagccgctgcaatagaattttttgttcagcaggttgccttcttccgctgttatggggttgcgttttacggcggatagcgcataagcggcaataagggtggagcggatcatgcgcgcatacagccatacatcctcccgtggttttcctttatagggttttgcagcgccggcatgttgcagcagcttttttataaaatggcggtagctgcacagccctgcaaataggaacagttctgcaaatacctgccgcgggtctgtaacagcctcgccctgccagcgggtggttttaaacgggtccttaagggttttgtttttcatatgttttttattttataatgcatcatttttacgtcatgccgagcggagtgtaacgtagccgaggcatctcttttttcctgtccaaatgcttggcactcataggtgccttaagaaaaagataaaaggttcaatcacagggtttataattatcattttccacgttttttgcttgcccaaaaaagtggagcaaccgaccgaagggagctcatgagcacctgaaagcaataaaaaaataagcgaataaaaaagggcaccgacaatcggttgcgggggcgattgtcgggggaatatctattgagcggtgtgcttggcaaatgagctttgaacagttgcttacgcattatcttttaatcgtcatgttgagcggatcccgcggtagcgggagcagtcgaaacatctcttacaaatcaggggagacccccgtccgaacggtgttcagtcgggcgggcttcggctccttccgcggaatgcgtggcaagacctatgaggtctgtttcatgccgggtaaagacctcatagatcttacggcggcatggcgccggggaaggcggtgatgatttcaccgctggtgctggctataaccgtaatgacggttacggtattccctgccgggtcataccccacagccatacccgcatcccatacccgttgcaggtggcggctgcggggcaccccagcccctttgggttcgggcaggggcatggcctgttgcgcccctgcttcttttatacaagctacaatttgcggtatagctatagtaaacttggccgtgtacggatggccgggtattttataataatgccgctctaaaatatgcgccagcgccttggcactcaggtaccagctttggcgcagcagctttttacggtgctttaccggcagctgccagataagcgcctcctgcaattgctgcagccagctttgtgcctctgccagcaggaacagggcctgcagccattgggcctcattaaaatgggggttggtgttttgcactggtgtagtaacggcgttattcataacaaaaaagttttaggccgggcacccgcacaaaaaggcgtggtgctcaacttaccgacttgaggtactggtacacccacacacggataagagagcccacgcctaggtcgtgagccattctgcttatcgtctcgtgtgtttaaaaattaccagttttcaagtcgagactgaaagcgaatgcttcaaataattttatgaagtaatcgcaaaaatattatttcagcacaaatatagtaatataaatcaaaatgtgagctataactcactttattttttttaacattggcagaccttggaaatgtgaataaacttgaaaagcgatataatcaggaaataagtctatttggtgaacgccttcgaagactccgagaacagaaaaagttaacacagctcgatatggaaattgcttccggaattaacagaacggaaattagcaggatagagaacgggcaaaaaaatattgaatttcttacccttgttaaactggctatcgctttagatgcagaaataaaggattttttttctgactgattttcttcacatattttccaatggagaagtacaacacaattttatccagtattagtggccacaggaaaaggactggaagtccattctaaaaaactgctggatttttaatttgagtttgaggagtgataatttaatgcatggcctcagtgccgatatttgcaactacatcaacaaagaatggataacccaatgaaaaagttctatgcgttcttttgcttatgaacatgatgtagatgagaagacaatacggcaaattattgattttaaaaatgcatcgtataaaatcagcctttataccttatacaaaatgtgtactgcaagagatttaacgcttgaggagtttttcaggttggttaagaggtaatagtattaacgtttgcgtcgtttgttttaaaattgctagctattacgtttcttcgtttgaaaataaatcaagaaatggtttgtcaagaagtataagttcgctaaatattattcttggtctcttttctatcaattccccttcttttgaaatccgatcaatgcgccctttgattaaacaatttgaaaataattttgatttgtgctcgttgatattacctttttctggagaacatgtaagaacatgtcctttataaaagaatccaatagtatttgagttttcatttcctcttgtaatgtgtcctccaagttcaatatattgcccgtcttgtaattctgggaataaaatttcgtcatcttcatccttactgtaaaatatttgcttttcactaatggctacgcggacttttctttcgtcatctttgacgtcagtatcattgagtcctatttctaattctctttggggttcaataatttttgttatttgggcaaatatattttcgggacaacctgcatatttttctagatattcaatcggaacagaaagactttgattctcatcattttttattataacaattttattgtcttgtgtaaactcaacatctttaaagtctcgcttccgcattgtctttaagtgtttagctatttttattacccataaaaaagcttgaaaagcttttttaaatatatccttaaagcctatcttttcaaaatctcgttcagccatcttctctaatgctttcttactataagctccggcactaataagtgcaatagttttaatccattgctcaatattttccggaattaatgcttcccaactacctttttgaatttttataggaatttcaaattctatatcttgaatatctgaattttcttgataaagaaaatatcttaaagatttgtcgaagccataaagggcatcagctgatttctttgcatctaaatacccatcttcgactaaatccccgtaatactttaaatacgctaaaacatcttgatttgtcgtcatttcaattaattaagcaccaagcgaagttagttgccaattagtataacatgtaaacatttacaaatggctttatccgttacatactttgatttctattataaattatactactgctattgtcatagtctttttctgtatttgtaattaactactaatccggcatatcttcattaaaactctttgtcaaggcttccatttcaatccaatgtattgttagatctgtgagtttttttaaatcctccaagtttttgccttcccattttcttatatagtgagtttcatcatttccaagccatacagctcgtttcgctaccgattttactctactgtcagttacatatctttcaatagttgctgataaaaactgtttttcaattttctccttatcatcaggatgattttgaattgcataatctttaatcaaaaattcaagtgcctttcgataaccaacgccacatatttcaatcagattctgctgttcagcagaataagcttgattatatattatttcaaattggactgatataccctttatagtattagaaaaatctctttcagttaatgagccaaaacttgttttatgcaaatagttagatacagatgccactggaccccaatcatagtagccgataaaagatctcttacattgatcattaggacaaaagaaaaacacatcgaaattatccttatgcttatgcccgtatagtggattcggcgtaattgatttatggcaatatgggcatttgtctggcaaccctgtaatatgcctgtcgcctgtctttgtatgtatgggtatgttactcataaatagttaagtatatatcttacaattgtctagcaatctcttttttttttcagtcagtttctgtttcatcaaagttagttgctttgctaatatacttattttttacaattgataaaaagtcttttacccctggttatacaaaaacattctcaatcgcagagcattattgcggaaaccgtaaagaagcgcttctatccttgtgtcatagtttgggtacctatgcaaggcacaggcaaaatagttggtaaaaatttaataactgatgtcagcccatcttttataaataccatgttaattgctgccttaaatacttattattgagtttgctactcttttttctcctccaacttgagttgtataaaatctttgttcgattccccataaaacaaatttcaaatcatcatcactttcaattttgaacttaccattctcatatacaacttggccatactgatttgtatagttgtagatagctaatttttcttcatcggaaagtctgttcaaggtttcatttactaaagctattcgctttctattgggtatagaaatttgggctacaacaaaatcttgtgatacttcaaggaagtcattttctaaaaatgtttcgctttcagcttctgttgcttccttgtacaattggtccattcctttaaagattttttgagcagatgtaagtttcttaaagtacaagatatcctgttgcttatcataaatggcatctgcaaaagagttaatagttattattggtttttcagtttctaatgtcaattcatctattgaaaaccattttttacttataaagaaggttgaatttattatttggaaaaaatataaactgtcttgaacagtacaaataaatgataatttctttaaatcttcttttgaaatttggtcatgttcaacagtatttaattcgtttgttaagaagtctaaacagtaatccgattcagaaaaatttgtcaatttgtataattcttcatcttcgattaaggttgctgggttataatcaattccattcaacacaaggtttgctatatcataaacctgagtctcagtttcaattattcgaaacattttttgtttcctttttactttaccaaatatatagttcgccataattaatttgttataagtcaatgaatgtataattatttattctcttaagattttcgaattcttcgtcacccggaactttgagtttttttctagtaatcaaaaatattttcacatttgttgtcgtctttatgaaataaaaatgataaccaaaaagtagaaaaattggattgaaatatagggtctgtgataagtatgtaaacacataaataactccaaaaacaactattaaagttgaaatatcgttaacaccaagcgatacaaaaaaataacctaaataggttggcaaaaaattattattggctaattctatttcagtaacagaattgcttcttaaattatcttttggcaatttcaaagcaattaaaaaacttaatgcagttagaaaaattggaattaatatgaatattgcccaagaataatacatcggataactgtctaaaatattgaacttatatttttcttttactagataaacaacaacaattaaccaagttgaattgaaagctagaaaaagttgataaatgcgtttcacttttacggattgttaataattatattgtttcttcaatttttgcacggactcggttcatagggttgccactacctcgccaattgacgcaattactaaacgtttaaacacggctatgccatcgcgtatattagttaaaaaaattgtttagttccgcaaccgtcctggtattttgtgcttcagcagtttcaattttccaaatggttgtactgctaaatatacttctttttttaattgttaaaaaaaattctagtgtcttaggacaaatatattttgctttaagatggtgtgattacgggaaaccgtaaaggggaagggtgtttgttgcctcgcggtattgctaacctgcttgttagcggtagcttttcttaccgccaattagtttattggaaagcattgtggcccaattgcaccacccccatactctaaaacgactttgtctgtataaagaatatacgtacaactgtcattgtatttattttttaaactgtctgggatcgggttgtcaaatatgttatagtaaaattttcccattccacttcgttgaaagccaatattgcaaggttcgccactttttacagaaatacaatttgctgcgtcaagtttttcttttagcacttttaatgtttcttttgtccagttcagttttttcaaaagtgtgtctgtctttgctgagtttaagtttaaatcccaattgctgtcataattgttcgtatccttcaaatgaaaaatgaacaattttttatttccctcaaattctatgtccacagatttgctcgtaggtataattttgttgacatatgtttttaagtcagtaatttggttgctcttttgattataattgtctatcaggtcttgagttgaataatgttttccgtcgtcaaatctgaaagttgaaaaaacgtaaaaaacgcaaccaaagaaaagtaaaagcccgccaccaagtattattaaaatccattttatagtttttctcatttcaaagtcttaaggtatgagtgaaaaggttgcctccaacccgccgattgttgaggccattaaacggctataattgtttgtaaacgcttaaacagggatctataattgcttttactggtttaaatacatttattttcgttgccccgccctattgccaaatcgcctgctggggcctgtgttttatacatcccgcacaagttttgtctttacaataaaccagggaacgggttcacaaccgtttttttcgtcgttcaaatagtcgagcacttgttttgaatttaagttgctgtcaaataagccatattcgtttaaaaccaaaccaaatttgccggccagttccctcccgatgtcgtggcaatgaaaactatgaaaactgccgtcaatttcaattccaatatagtcgtatcctaaaactatttcgttttccggttctagtatttccttcaaaagtgtcaaacgcaatccaatttctctcatggtttcggattgtggcctgaactctttaagaatagcctctttttcgtttgcgtcaaaatagagggcaaaaatttttatgtcacttaaatgaataaagaacctgcttttataatcaagtgcggtttcaaggtcctggaacacatttaaaaatccaattttgttgtcctggatcttgtcgtttacccaatttctaatcttgtctatttggttttccgacagcttaaaattactttttatttcgtctatttgtttgttgttgtccgttgcccaactataagaccaggtgtcaagtaaggggtcattaatgcactcgctgcaagtatatatcaaattacccaagccagacccataacctttaggcctgagtttggtcaagtagtaacccccaaaataatagtttgttgctatatcgttcatctgtttagggtatctgctatacttgtcaccaacgagctgatttttcgaaattacaaaatgtttgcagttgtttgtaacgcttaaaatacgattgtgcaatagtttttattagttaaaaattttgttttcttctgcaataattctggttattttgctttagcagtttcaattttccaaatggttattttgctaaatatacttaatttttggaactattaaaaatctgtaaagaagctgcggatgaattaacctaggtggttataaaatcatcaatggaggagactgtacaactttatcagttttagtagccatagcaaaaggactgaaagttcatcctaaaaaactgctggattttgaattcggggttgaggatcgataatttaatgcatggcctcagtgccgatatttgcaactacatcaataaagagtggattgcccaatgagaaggttctatgcgttcttttgctgatgaacatgaggtagatgaaaaaacaatacggcaaattattgattttaaaaaaacagcgtataaaatcagcctttatacgttgcacaaaatttatactgcaagagatttaacgcttgaggagtttttcagattgattaaaagataagaaaatcgtataaggagcaggttttatatccaggtactcggctttattaacctaaacccacttgcttttataacaactggaggaaattgagcctctgctaatttctttcggccaattactaaacttcccttagctacattttttacgcttagattggaacgattaggaggaaatgcgacaaatactcttttatttggataaatattatgaatggaattgatcggaggaaccaaatcgctatcccctgttattaaaatcgctgtatcatataggctattatgcgcgtcttccatcattgcgacggcaatatttacatcagtcattttttcattagagtatggataactatgcccacatctacgacatgtttcaatatgtgattgatagtggccataggttattttaaagtttgatagagtttcgagtgcttctaaataggtcttttgccggtcttctttatcagggttattacgtatccgggaggtaaaatattttatcgatattaattcctgatgcgattttaatagagataaaaccaactgttgtgggttcaaccatagcgtgccgttgccattttgtttcatcccaaaataaaggttgaatccgtcaatataagcaattattctttccatatttggttatttgcatttttcaatttatctttgataatacaagaacagctcctgagatagcatctcaggattgacgctccggaaacggggcgtttcgcatttataggaacgaagatagtacaaaataattttatttttaaaattgtcatcaataaatccacgtatatttattaattttacaaaatgaatattgaaactcattgataatgataatacgtggttgattgatgagttgtgaattgctttcaatttaagagaggcgcaatgcctctcttttaaaaatagaggtctgatagctaaaaacaaaaatgccccgcagataggcgaggcgctaaatgttttcacaacggaatcatccttattgtgaattgctttcaaaagcaaatataaattagtttttattgtagttattacgggaacccgtaaaatattttgctatgaggatttaactttaccaggatcaataataaacgtatgagaaggaatattttgggcctcgatctgggcactacttccatcggttttgccaaagtaattgaagatgaagattatcaaaactctgctgttgagctgataggtgttcgtgtaaaccccctgaccacggatgaacaaaccaattttgaaaaaggcaggccggtatctgtaaatgctgatagaacgcttaaaagaggcatgcgccgtaatctggaccgttaccagctccggcggcatcatttaattgaggtactgaaagcgaatcatattattacagtggatacaaaacttgctgaggacggcaaaaatacaacacatgctacgtatgcggtaagagcattggctgctactgctgaaattccattggaagcttttgctcgggtcctgttggctattaataaaaagcggggctataaaagcagccggaaagccaagaacgaagatgagggccagctgattgacggaatggctgtagctaaaagattatatgaagaaaaccttactcccggtcagctctcttacctgttattaaaagagggcaaaaaatacctgcccgatttttaccggtctgatctgaatgcagagttggataaggtgtggagttttcaaaagcaattttatcctgaaatattaacggaagagtttaaaaaacatttggaaggaaaaggacagcgggctacatcagccgcattttggggacaatatggttttaatacagcagaaaataaaggcagcagggaggaaaaaaaactgaaagcctatcaatggcgtagcgaagccgttgatcaacaattaacaaaagaggaagtggcttacgtgattactgaaataaacaatgaccttaataaatccagcggctacctgggggctatttctgaccggagcaaagaattgttttttaacaagcaaaccgttggccagtatttatatcagcaactgaaacaaaatccgcacacccgcctgaaggggcaggttttttaccggcaggattacctggatgagtttgaaaccatttgggaaacgcaggcaaagtttcatccagaactgactgctgcattaaaagaagaaattcgtgacgttattattttttatcagcgaaaattgaagtctcaaaaagggctgatcagcttttgtgaatttgagagtaaggaaatagaagttgaaaagaacggactaaagataaaaaagcggataggcttgcgggttgcacctaaatcatcaccattgttccaggagtttaaaatatggcaggtattaaataacctggagtttcgcaacaaaagttccaaagaagtgtttgtgccggatatgactgctaaacagcaactctttgacgagcttaatattaaaggaaacctgttagcaagtgaagccataaaaattctgggttataaaacgaaggattgggaagccaattatcatacgctggaggggaatcgcaccaataaatctttgtacgatgcctatctgaaaattttggaattggagggatatgatgaagatctgttgaaattaagcggcagcgatgatattgatgtttccaaaatcgaaaagtccgcatcagaaattaaacaaatggtgcatgctgtttttgaagttttgggtattaatagcacaattttagattttgacgcagaagcagatggtaaggcatttgagcaacaaacggcatatcggttatggcatttgctgtattcagcggaggatgataataaaaaatatttacaggaagatatttttatatatggacatgataatattggattaaaaaagaagctgtgcgaaaggtttggattcaggccagagcatacgaagattttagtgaatgttgctttcagtggggattatggtagtttgagtagtaaggcaatgcggaaaatttatcccttcatcaaagagcttacttatgacaaagcttgtagggaagcaggttatagacattccgcctcttcactttcaaaagaagagatagctacccggcctttgcaaaagcgactgggtttattgaaaaagaatgaattgcgcagcccggtagtggagaaaatcctcaaccaaatggttaatgtggtcaatgccctgattgatgatgaaaataaacggcgaaaagcccggggcttatctgatgattttcattttgatgaaatacggattgagctggcccgtgaattaaaaaagaacgcaaaagagagggctgagatgacaacaaatattaacgccgcaaagcaattacatgagaaaataattaagatcctgcaaacccagtttggagtgtccaatccttcccgaaatgatattattcgctacaaactgtacgaagagctaaagaataacggctataaagatttatacactaatacctacatctcccccgacatcttgttcagtaagcagattgatatagaccacatcattccgcaaatgagtttatttgatgatagtttttctaacaaaacggttgtgtttagaaaagataatcaggataaaggaaataaaaccgcctacgactatatccttggtaaatacggagaactggcgttggaagaatatatttcccggataaccagcctttttgaattgggaaagaaaaataaggaagagggcattaacaaggcgaagtttcaaaaattacaaaagcgccttattgatataggggatggttttattgaaaaagatctccgggagagccagtatatagctaaaaaagcaaagaatatgctttatgcaatctgccgtagtgtggttgctaccagcggtgaaattacggcaagactgcgtgaggattgggatttggtaaatgtgatgcaggaaattaatttgccaaaattcagagccctgggcttaacagaaatggttgagaaaaaggatggtggtcaaaaagagcgtattattgactggactaagcgcaacgatcatcgtcatcatgcgatggatgcattgaccatcgcttttacacgacatagccatattcagtatttaaatcacctgaacgcacgtaaagatgaggccagcaaatggcatcctgtcgtgagcaagattgaggaaaaagaaacagacctggtgtatgatgatctggggaaccgaaaaagaagattcaaggctccaatgcccaactttcgggaagtggtaaaagaacatctggaaaatgtgctgatttcacataaggctaagaataaagtagttactaaaaataagaataaaataaagacagccaaaggtgagaaaataaaaacggaacttactccgcgtggacaattgcacaaagaaaccatttatggcagatatcgctattatgaaagcaaagaggaaaaagtaggaccgaagtttgatgcggaaacgattgggatggttgtaaacccacagtatagaaaacttctgttggaacgacttacaacaaatggaaacgatcctaaaaaggctttcgggggtaaaaatacgttgagcaaaaatcctctttatattgatgaggccaagcaagagctactgcccgaaaaaattttattgcgttggctgaatgatgattattccattcgcaaagatgtaactcctgaaaacctgaaagatgtaaaaacaattgaaaaagtcttagatgaagggattaaaaaaatactgttgaagcgtcttgtcgattttggcaatgatcccaagaaagctttttccgacttggataaaaacccaatatggttgaatgaggccaaaggaattactataaaacgggtaaccatcagcggtgttaaaaatgcagaagcgctacattataaaaaagaccattttgggaatgctattttaaatgaaaacggaaagctgatacccagttcttttgtaagtaccggcaacaatcatcacgtagctatttaccgggatgcagaggggaatttgcaggaaagggttgtttcattatttgatgctgtgcaattagtaaatgccggagaggcagtgattgatagggagtataacaaagggataggctggcaattcctgtttacaatgaagcaaaatgaaatgtttgtattcccaaatgaaaaaacagggtttgatcctaaggaaattgatttattaaatactgataatagaaagttgattagtcctaatttgtttagagtacagaaaatagcgagtaaaaactatttctttcgacatcatttggaaacgaatgttgaagaaaggaaggagttaaaggatattgtatataagcctcaattaggattaaatgcaataaaagatgtcgtcaaagtccgtatcaatcatttggggaagattattagtgtaggagagtattaaaatgtgcttgccatgatcaaacgcaccctttatttcggcaacccggcctatcttaaaaccaaaaacgagcagttactggtggaactggctgataccggcgaggtaaaaacagccgccatcgaagatataggcgtgctgattttagatcaccagcagatcactattacacacagcgttattgccaagctgctggcaaacaatgtggcgctgatcacctgcgatgatattcacctgcctaccgggctcatgctgaacctggacgggcataccctgcaaagccagcgcttccagctacaggtggatgcatctgtgccgctgaaaaagcaattgtggcagcagacggtaacagctaaaatcaccaaccaggcaaatttgctggcccaataccgtattcccaataaaaccttgctgaacctggcagcccgggtaaaaagcggtgacagtgataactgcgaggcgcaggccgccggttattactggaaaaatgtatttcccctgttccccgggtttaaacggtttcgggagggggagccaccgaataatttattgaattatggttatgccgtgctgcgggctatagtagcgcgcaatttagtaggtagcggattgttgcccacactgggtatttttcaccggaaccagtacaatgcctattgcctggcggatgatattatggagccttaccggccttatgtggataaggtggtgtatgatattatacggggtaatgggaagttcctggagctgaccccctccatgaagcagcaactgctgggcattcctgctatggatgtggtgattgatggtggaaaaagcccgttgatgaacgcggtgcagcggacgacggccagcctggctaaatgctttgaaggaaacagccgtaagctgctgtatcctgtattgcctccttcatttgtttaaaaatgaattttgaacggttaaatgcctaccggattatgtgggtgatagtgatgttcgacatgcctacggaaaccaggatcgaccggaagcgctatgcaaaattccggaaacagatcctggacgatggctttaatatgttccagttcagcatgtacatccgtcattgcatgagtcgggagaacgccgaggtacatgtacagcgggtaaaaaagatcctgccgcaaaaaggtcatatcggcattttgtgcattaccgacaaacaatttgggcaaatggagatctttaacgggaaagaagcggctgaagccctgctaccggcccagcaattggagttgttttaataccggttaaaaccggcgtaataagagatgtcctggtgagcttatccctttgaccggctgccaatgacagagtacattatgtattgaaaaccaattatactttcgtcatgccgagcgcaacaaagtggagccgaggcttccctgtgataccagactatccgagaattgagagacccttccgctccgcttcgctgcggtcagggtgacgaaagaatagtatgccataggcacattgattttacaacgtaaattgaaaactcagcatgacagcataattttcttgttatggtgagcctgtcatagtgagtttgccgaactacgaaccatgattcatttgaaaaatatcctttgtcagggcgacaatcctttttaaaaatctgattggtataataacagaaacagccattttgaggtatcagcaataaaaaaacgggcgtaaagcccgtttttttatcctgttgacaacctgaaatcctttactgttgcgggttttgacaaatcgagttgtcaaagaccaaagttaattcgaaaaatgaaagcaattcacaaccgaagaacttgcgcaaccggttgttttccttgttgtcaaagaccaaagttaattcgaaaaatgaaagcaattcacaacgggtttacccttagcgccgccaatagggcagttgtcaaagaccaaagttaattcgaaaaatgaaagcaattcacaacttaaagctttaaacaatgaaaagagaaacaggttgtcaaagaccaaagttaattcgaaaaatgaaagcaattcacaaccgttatacagctgtcattatacggaaccgggttgtcaaagaccaaagttaattcgaaaaatgaaagcaattcacaacgaatgggcggcagattgggaatacttcaatgttgtcaaagaccaaagttaattcgaaaaatgaaagcaattcacaacggttagctcgtggagtttatcaatgagaaagttgtcaaagaccaaagttaattcgaaaaatgaaagcaattcacaacgtaataatttcgttggctattgtagctatagttgtcaaagaccaaagttaattcgaaaaatgaaagcaattcacaacagcgcctcttttatgttgctgtctgcttctgttgtcaaagaccaaagttaattcgaaaaatgaaagcaattcacaactaagcttgttgtgcttagggcctgcgcctggttgtcaaagaccaaagttaattcgaaaaatgaaagcaattcacaactgcagggaaaagtgtgattggataatacgagttgtcaaagaccaaagttaattcgaaaaatgaaagcaattcacaacaattttgcacgcttctccgaaggtgttcatgttgtcaaagaccaaagttaattcgaaaaatgaaagcaattcacaacaaaacgcttacatgaacatggccatccggcgttgtcaaagaccaaagttaattcgaaaaatgaaagcaattcacaacagacaatgctttgcttagtgttttaattttgttgtcaaagaccaaagttaattcgaaaaatgaaagcaattcacaacttgatggtacacgatatttttcataaaaacgttgtcaaagaccaaagttaattcgaaaaatgaaagcaattcacaacaaaaggatttagcagataggcttggaaaaagttgtcaaagaccaaagttaattcgaaaaatgaaagcaattcacaacataataacactgggattttaaattataaaagttgtcaaagaccaaagttaattcgaaaaatgaaagcaattcacaacgagctcggctctataaaacatagcaaaatggttgtcaaagaccaaagttaattcgaaaaatgaaagcaattcacaacacacatcgaaggaggggttaaatacattacgttgtcaaagaccaaagttaattcgaaaaatgaaagcaattcacaactgttaataccgcctcttttgtggagtggctgttgtcaaagaccaaagttaattcgaaaaatgaaagcaattcacaacaaaccataaactatgcgcagacgtagagggttgtcaaagaccaaagttaattcgaaaaatgaaagcaattcacaacacgtagaattaaaaagatatggctattaatgttgtcaaagaccaaagttaattcgaaaaatgaaagcaattcacaacaccctgcttggtaaaaacggcagctgggatgttgtcaaagaccaaagttaattcgaaaaatgaaagcaattcacaacataataagcaaaacagaaccggtatgcgaggttgtcaaagaccaaagttaattcgaaaaatgaaagcaattcacaacggtattgttggccttgatgatgatcaggaagttgtcaaagaccaaagttaattcgaaaaatgaaagcaattcacaacacttctgcgtcaccagcgtaatcgctattggttgtcaaagaccaaagttaattcgaatcccgattgttcgggagaaagcaattcacaactggcgggaaaaaggcggcgtattggccgcggttgtcaaagaccaaagttaattcgaaaaatgaaagcaattcacaacgaagttgggacggcgtgccttgaacctgagttgtcaaagaccaaagttaattcgaatcccgattgttcgggagaaagcaattcacaacaaatacagtcctgttcaaaaatgatggtgtgttgtcaaagaccaaagttaattcgaaaaatgaaagcaattcacaacgcgccggttccaatgtagtgcaggtgcttagttgtcaaagaccaaagttaattcgaatcccgattgttcgggagaaagcaattcacaacaatcggttgccttcaaatgcgccatgctggttgtcaaagaccaaagttaattcgaaaaatgaaagcaattcacaacgaatggcacaaaacatccatctgccaagcagttgtcaaagaccaaagttaattcgaatcccgattgttcgggagaaagcaattcacaaccgatgcactgcagcaaagccaggactattagttgtcaaagaccaaagttaattcgaatcccgattgttcgggagaaagcaattcacaacggaatattctgaggataaggatgagatgacgttgtcaaagaccaaagttaattcgaaaaatgaaagcaattcacaacacaggtgttgtacttgtggaaaacacaccaggttgtcaaagaccaaagttaattcgaatcccgattgttcgggagaaagcaattcacaacaacgcgaatggctgaacctgataccccgctagttgtcaaagaccaaagttaattcgaaaaatgaaagcaattcacaacgaactgaatattgggcgaaaggccaacaacgttgtcaaagaccaaagttaattcgaatcccgattgttcgggagaaagcaattcacaaccagagtctatcaattggccaaatggtttatagttgtcaaagaccaaagttaattcgaaaatttttcctttgccggtgttatgcctgcggcagataaattttcaccgacaacaggaagaggttgtaagttggtttggttcattggtcagaagaccagaaaaggcgccatcggtgtgttttggagtgtttcgtgaaacggtgctgacaggtatttattcgccatcattcgtgggatacccaagggcatttaaaaattctttccgccaggcgaaaacagtgggtgtgtattgtggattgtcaaaaataaaatgtcctccttcatccagcgattttagaataacaggattgcctgcagattgcatgagtgacaagaacttttcagcagattcatacggaacattcttatctgctttactatgaattaacagcatgggtggctggtgtttgcgtaccagattatttggtgaaattccctttaccaggtttttatcttttagctctttcctgatccaggccgttttttcatcggtaagatcgtaaacgccggaatttaccaacaatacatttggcaccgggctaaattgcaggtgatcacttttttcattccagtcagtggcaagagcggtagccagcacaaggtggccgccagcggaattaccggttgccacaatgcgactggtatcaatcccaaattcattggcatgttcccgcagccagcgaatagcggatcgcgcatccatgacagcagcaaaaggcagggtgctctgtgacccgtagatgcggtactccacggaacaggctatccagccttttgcggcataatttcgacacgcctgaaaatgccatgatggctgcccttctgaccaacttcccccatggaagaatacaataaccggcttcttttctttgttaccttctttgtcatttttaaataaatgaatgtccagaccataattgccaatctgtttgtattccagaacctggtgatctttcagatcgttgcgggcattgcgatagacctgctcaagcttattagtataggaggtgtcctgacaatgctttttaaacgcatcataaagttcttcggtgtgtttaaagccattactggtaatatgatcgagcagcaaatgatactgatgatagattctgcaatgctcctcgtttatatattttggcagcaggtgccacattgcatacaatcgtttattataaagaccattatatgccgttttctttagttcaatttcgatcttatagctcagataactttggataaaagacatcaggtccgtattgcccagcaattccgggttattaaataacggcagattgtcccggagctttgcttcaattatggggtagcttttgggtcgctcaccggaatacgtttcatgattggttggatattccgccagtattttatcaaaatagagtttgatctccaggcgctgagaatcggcatatgctgccgggagcgcttttttatactggcgcaacaatgtataaaaccctcgggctgctgaatccatctttgctacaaatgccttttcgccaagctgatgtacttttgtgtaattaggataaaagacacctgaaaacctttttcccagtatcttttgctcctccagatagcggctcttggctgaatcctgctgcaaggatgtttgcgcatttagcccaatggcaacactaattaacaaggaaaatataaggagccttttcataacctccgtttaggtatattgaaagataagcaaaaaagattgtacgctccaggttggtccggttagccaggcgtttaatatacaaactaccatgtctctctttacgtgtgtgggtaactaaaaaggttccctgattgtcatattgattgacgaaggagagctaatacaatcagggttctctccacggcgggcaggtgccaggctcacagtgacaagcttcctatagcaataagatgatcctattgtcaccctgagcctgcctaagagcgaccaacacaatcatggttcgacaagttgttaatgacaagttttttagacatttaattatcaacgacttgcagcttgtgctttttagcaaacttttgaagtaatgatagttctttcgctttaagttgttgctcatattttttaacaccctgttctacatattccactccctttgtaagtgtgttataaaaggcttcagctatttttcttccgccggccttgtaagccacagcagggcctctgcgtgcttttaatcttcttataaatgctcctatcgcgttatgcttactattttctaacgattgggctgcttctttaaagatctgaccggccttgttgcaaggtgcccgctttatccatttacttttctttccgctttgatgatgtcccggcgataaactacaccagcttgtaaattgtttcatgctggggaaacgactcatatctactcctgtttctcctatcaatcttaacaacgtataatcattgatacctgctatgctgcttacattcactccaaacaattgaaccatcattacatgcagattctttatttctggtttatgatggcgtaccgatttagttttacccaatgcatcttttttgacttccggcttatcctttacaagatcttttaacagtaaggcaatccgctggtctatgatatgtacctgttgctgatgctgcttccacatatcaagattttgttttagcataaaaaggtacgtatcattgtaactcccttccaatgcttttacaacttctgctccctttttacttttgatcccgcagggtcataacccccaggcgtgcttatttcgcgcaggcctggggcctgtgtggtttggtcacttaaagcagtggttcaattacgggcatgtacaggccggagacttccgcaagatggccccccaatttattaataacgcaacttatagatcatcagtttgcccgctgaatgaatttgatccagtttccgtagttgatggagcgtaagatgtcgtcattatcaaagaacaccgccagttccttatccagccagtcttcaacctgctgataagtgacctcctttttttcaacagcggcaataatattgctctgtgtggtgaaatacaggatcagctgctttttgctcagcggaacaacattcttgaaacgctcttctgttataaaattgaaattctttggattgaggttttcattggtccaggcatagctgttgttccggggcggtgagggatatttttttaaatagaccgtaaagaaccagctggtaaacgctttattactttccatttcagcaataaaatgattttcataaagcaccagccaggcccttgtttttaaaatacggtgggcctctgccaggaaccggtcaatattaaaccaatgcacaccggagcttacagtaataagatcaaagtagttatcagcaaatggctgctcctctgccggggcaatagtataatggatcttatcgggctgcagtgcctgattgagcatttcccgggaactgtctgttccatatacatgggtggcaattgctaaaagcgctttggtggaaagcccagttccacaggcgatgtccagcgcggtatcgagtttatgattgatctttaaatggtctcttatatgctgaattgtattgctgtgaaaatcgggtcttcctttggcataccgttctgctgctgtttttggatcaaaataattcatcaggttctgtttctttataaatatacagcatttacggcgtgtgcttatgctgtaaataattgaatttgtttaaacgtttagcgttaataacaaacagtccgctcctatggagcgccgttttaaggagctgttgtttttttttaccaggctttttgcccccggctgaacgccgttcagccgggcgacctgcggggcaatccaacccggggcaatctataaataagtttaaacaactctaattataacagatggttaataaaacaagacggtacagggctgttttccggcttgcttattgtaaataataaagtgtgtgtttatacacagaataaaagtttattgataactatactctttaaattatttcagttatgatacgcaaactcaaatcaggcaaataccggatctattcaagaaccccggataagaaaacaaacaagcgcaggaacctgggcacatttgataccctggaggcggctaaaaaccacgaaagggaaatacagtattttaaacagcatcattaattattggaaggtaaaagattgcccgttttcctgacgggtctttaatgcccggttatgaccggctgcagcaggttattggtctgctctttcatccagccggtaaagtcaaaataattgagcaattgctgctcataccggtttgcggtaagctcctgcagctccgtcagtatctttttggcagcaggttccatcagccgtaaccgtttgctgcccacggatgtcagcgcaatgatgcggaataacagcttttctgtttttaacaggcgcagctgcataaaataccgtttataagagcgtatttcatactccaggtgcagcagctctcctttttcataataggtaataatattcagcagccgtatggcccggctgatcatgagctgtttgggaagcttgaactgcgtcatcacttcccggattagcagatgcgcttttttgaaatccctgctcttaaaatggaccaggccggcataaaaataaagcgcgctttgtttctcttcatcaaccattgcgtaatgatgaaagatatctgccgggatggtttttaaaaaatgcagggcggcttcccattcctcccccaataaataaccggccatttcctgtagggccactgtttttcttaccaggtaccggaaatactccgggaaagtattacggtccagttttttgagcttgctgatgtagtaacggatctccgttttattgtgcaggatccgcaggctgtcgataatgccgttaagggcttcaagataatcaaccggaggtttatcaagcaggtcctcgtttttttcaagaagcgcattcagctgataaaaggattttaatgcagatgtgtaatcgccgatgtccgtaaaaaagaacgactggaacaataaatgcagtttttgggaagtaaagctttttgacttgctggcaatcagaaccgtttcgctcagcataagatcattgagctttttcctgccctcctcggagatcacttttcccccgtggatcaggcggtattttaataattcatacagggaataatgatcatggatatgatgaaacccttttaaaatatgctttccgttcatttgaagttttaccagggccgcttcagacagt

SEQ ID NO: 2144 - DNA, 24275 bp, synthetic construct
  misc_feature 1..24275: note = Synthetic
  source 1..24275: mol_type = other DNA
tccccgctcctgttaccttgatgctgttgcagtttccggtaatgactacgttgatactactgcctacaacattaatagtttcacccgtttcctacgttcctacttttgaattttgagcttttgtaattatcggcgtgacaaataaaatggttagcgcattctttttaagtttctcatatctggtaagtttaagtttctgagcgaacaaagattataacagtgcgtatttatactttaagtttgaatgatgcctacattaaatttcctggttattggtgattgattcgcggcctcgatgcccatagaaattactttcctagtttccagcggatcaataataccatctacccatagtcttgatgcagcatagtaaggtgtagtctggctatcgtatttatcggtaatttctttcaatagttctgcttctttttctggtgtaatcacttcacctttagcctttaatgatgcttcttgaatttgcaatagcgtttttgcagcctgagcgccacccattactgcaattttagcagttggccaggcataaattaacctcggatcataagctttcccacacatggcataattacccgcgccataagaattcccaattacaatcgtaaattttggcactacagaattggcaaccgcattaaccatttttgctccgtctttaataatcccaccatgttcagacctgcttccgaccataaagccggttacatcctgtaaaaataccagcgggatttttttttggttgcagttcataataaatcgggtagctttatctgcactatcagaataaatcacaccgccaaattgcatttccccttttttagatttaacgaccttacgttgattagcaacaatgcctactgcccaaccatcgatacgacctaaaccacaaacgatactttggccatatcctgctttatattcttcaaattcagaattgtcaaccaagcggttgatgatatccattatttcgtattgtttatctctgttttctgggataatgccataaagctctgtttcactttctttgggtttagcagatttaatcctgtcaaagcctgcattttgaggcgttcctaacatgctcatgatgttccggatactatccagacaagcttgatcatttggatgcttgtaatcggtaacacctgaaatttcacagtgcgtagttgctcctcccaaagtttcattatcaacatcctctcctattgcagattttaccaggtaggaacctgccaaaaacacagaaccggttttatcaacaatcatggcttcatcactcatgatgggaagataagcgccaccagctacgcatgaccccataatcgccgaaatttgcacaattccatctgccgacatcatcgcgttattgcggaacattcttccgaaatgttctttatctggaaaaatttcgtcttgcattggtaaataaacacctgcactatcaaccaggtaaatcaccggaagccggttttccatagcgatttcttgcgcacggaggtttttcttggccgtcataggaaaccatgcgccagctttcactgtagcatcattggcgacaatcatacattgcctgccacttacatatccaattccgcaaactacacccgcagacggacaaccgccttgatcagcatacattccatcagcggtgaaagcaccaacttctaaaaattcggtgtctttatcaatgaggtaatcaatccgttcgcgagccaataacttacctttctccttttgcttggccgcatttttttcgccaccaccgaggtaaatctttttaagtttggtccttagctcgtaaaccaattgtttgttcacgtcttcgttcttgttgaattcgatatccatgttggcaatttaaatcttattttggaataaagcatggcgaccaaattggtttctggtctacgctggtttttaaccacaaagaacgcacagcagaaggcgcaaagaacgccaaactcgtgttcgaaatattaaaccacagaatatgggagtgattttaaccgcaaaggatgcagagagaaaagcgaaaagaacgccaagttggtgtttaaaatgtaaccatagaataccaaattttgacttcttcactttattccctgtgcaacctctgtgtcctcggtggtaaaatctaaacacccggctttgcgattagaaataaaaaataaccacagagaaaaaagcacagagataatgtaatcaatttcaaattttatgttctctgtgagaccttcgtgccctcggtggtaaaatctgaacacacagctttgattagaaataaaaagtaaccacagagcaaacagagaaaaaaaagcacagagaagtcactgagattatattgtcgattcttaaactctctgttttctgtgcaacctccgtgtcctcggtggtaaaatctgaacacccagctttgcgctcttcgcgaaaaacttcccttcattttgcggttaaccacaacaaatcattttaaaacgatacttttgaagaaacctcattaaatggagctaaccataaatattcctgctttactatttccagccattagtttaatcatgctggcttacaccaaccgttttttggctttggcaacactagttagaagtttaaaagcgaagtatgaagaaggcgagaaaaatatcggtttacaaaatcaaatcaaaaaccttcgctatcggttaagactaatcaaaaacatgcaggctttcggtgtgcttagtttcgccagttgtttgttttgcatgttttttatttaccttgattggaatataatagccgaaatgctttttgcaatgagtttaatattttttatgatttcgctgattatttcattgatagaaattcaactcagcacgaaagcgctcgaattagaattgagtactttagaagatttagacgatgaatcattaagtggattcatcaaaaagaaattcaacagagattaattttgtaaaacaacattattaatctttaactttttccagtctccgggaaagccttttccttttatatattttacagaataaggatgtccctttaagtttggatggtaaatcatatcgaaatcaaaagtcatttctgtatctgtcttttggacaacagtaacttcattgtcgttgtaatccttttggcctgttgtaaaaaatttatctcctatattagccttaaaatcggcttttaaatatgtttgtagcggagacgttgggtagccttctattaatctattttgttcgtctattcttaaatacgaaatgctaacggcgtcgccacccactaaagaataaaatttatagaaaagtttcttatttatgctaaccgtatctgtaatctcggtatagttagcactattcataaaccataaattaccgatttgcatcggcaaaaaagtatcgtttgcattaagatccatcactttttctttacagcctgtaaaaaacaataagaatagcattacaattaagctggcactctggcaagtttttttcataagaatcattcttctttctaaccaaaacgagtgccgcagtaaaaacgctacaaagaataaccttaaggagttataaaatggtaaagaaaaaccacctcaccagtaaaggcaggtttcttttgatcctcaatttccatctctattgccatatgaaccttggttacaccacgtaagttaacaatggaggccaatttcgctttgagtctgattttagcatttaccaacactggttgcgcaaatcttaagctttcgataccataattaatctccattttaagcttttgaatatcaacaatctctttccaaagataaggaataagcgaaagtgttaagtatccatgggcaatggtagaaccgaaaggcccttcattctttgccttctcttcatcggtatgaatccactgataatccagtgtggcatctgcaaacttgttaatttgttcttgtgtaatggtatgccacgaagaaacaccaagttctttacctaaatgttgttcaaattccgcgtgagatgtaataatttgcatttttatgaatcttttatagtgatagcaatcccgaaaactattgacgtttacgattgcttaaattaaatctttttccttaaaccaaaccacatccggcacagccgaataattatccattttttcaattaatatttcagcatcagtttcattgaaaaccaaatcgcgattggcaggctttaaaaatttgctttgaaccatcgtttccatttgtgcaaatagcggatcgtaaaatccacctacgtttaaaactcctattggtttatgatggaggcctaattgtagccaggtaagcacttcgaaaaattcttccagcgtaccgaaaccaccaggcaaaatcacaaaaccatcgcttaaatcggccattttttgcttgcgctgatgcatgttttcggttaaaatcatttcagtaacacctttatggcctacctctttatccatcagaaactgaggaatcacgccggtaaccaaaccaccagcttctaaaatatcgttcgccagtacgcccatcactcctacacttcctccgccgtaaactaacctgatctcttccctgacaagtgtatctgccaactgtttaatggctttacgcaactgtggatctccattaaagtttgagccacaataaacacaaaccgctcttagcttattcatccgatttaaaaatttagcgaagttaagattttatccgtttgctataaattttattctgcacaaagctgttaatttaatgtttttgtgatttaaaatacttttttagtagtgtattttataggttattaaccatgattccaaatatattgaagttttgaaataattagcttcctctgaaacaattcagatcttaaaaataaaaagcgccgaacaatcgacgcttctaatccaaataaagagaaattatacaaactttaacagcttttaagactcttaaggttctgttaaaaattagaaactgtaacggaaagtagcgccataagttctcggatctccaagaacacctgcatacaaacctgagttacctgctgctgcctgtaattgctcataataatttttattggttaggtttctgctccatacaaatacggagaacttatcagacttaaatccaagtctcgcattcaacagcgaatatccctgaacatttaaaacgcttgatggtgttggatttgatgagtatgtagaacggtaactggcatcgccggcgataaagtaacgacctggtttagtagctaaattacccggtgtactaaattctgcaccgccggagacgttccattttgagattcctggtaatctgccacccgatgcatctttaaatgctacctgcgttgctacaccgtttaccagttcggtatgaccggtttcttctaacggaagcggcgcatttgtaaaggttacatattttccatccaggtaggccaaagctgcatttaaggttaagaaacgttccaactgataagttccgtcaatctccaatcctttaacctgaactttttcggcattggcaagatagcccctgtttacaccgagttgtggcgattgtacattggtttgataatctttaatatcggtattgaaagccgttacatttaatatcgctcctttaaaaggttttgttttaacgccaagttcataatgttctacatactcgggcttcacaacggccaatgttaaatctgcctgtccgtttgatgtagttggtaaaccacctacgttaaccccaactggtttgtaggctgtagaaaaagtggcataagcatttaccttcggcgttggacgataagaaacagtgatatttccagataaattattattatcaactttcgtagcaaactgttgattggcataaactgctgctttaagtgccaataatgcaggatcagtagtttgcaaaccaccataagtgtttctatcgtaatttacatcttttttatcataggtaaatcttaaacctggcagcacgtgtaagtgctcaattacttcccagtcgatttgaccaaatactgcagcacttaatgatttaatagttgaattggtcttaattccaaatccatctaacaaacctggcgtggagtatagcgcttgtgcgcccgtattagcggtttgcacaaatctccattgatctttgcccacttcttccgtttgacccaaaccctgcaggttttgaccaagaaaaaatacaccgaaaacaccacttaacttttcggtaatgtcgcctgcatatctaatctcttgtgagtattgatcgtgacgcgagttaccttgtgatttagtaagtgcagataattcagaaaaatctctatcatttgttggatcccaattccagaacctccaggccgtggtagaagttaatgttccgttgccaattttataatctacgtttagtgaaataccaccaattgattgattatgtctccagggcgtattggtattgatttctcttgaaaatggattaattttgggttgttggtatcctaaatctgaaacaattctggcatattgacgataggcacttctttcggttgtggtaacaccagcaatgactaaaggataacctgccggatgctgaatgctcacatctccacttaataagatttttaatttatcagatggcgtaaaatataactgactcttgaaacctaaattgttctgaccgctatatcttcgctcctctctagtattgtaaatcgtaccatcacgttgtgtaccagatatcgagatttttgccgcaagattttttgcaacaccaccagaaactgatgttttagcctgaataaaattatagttaccaacgctcatttcaacttttgctgtcggcgtttgtgtaggtttagtggtggtgatattaaaggcacctgcggttgtatttttaccaaataacgttccttgtggtccgcggataacttcaatttgttcaatatcaaggaaatcggtagaagtagcagccgggcgtgcgtgataaacgccatccacgtaaaaacctacacctggatcaattccatcattcgttaatccaaaagtagaacctaatcccctaatatttaatgtggtatttctggcgtttgaagcatacaactgaaccgaaggaaccaattctttcaaacgattaacattaaaagcacctgcattttctgccgcctgaccgccgataacggtgattggaatcggtacatcctgtaaaacttccgaacgtcttcttgaggttactacaatttcatcaagctgggtgtcttctactaaaactaattcaattggagcctcctgaagtcgcaaaatttgaaaatcctgaggtttatatccaacataactcacccggatataaaatggaggttgttgtttggcatcgatggcaaaggcaccctcaacatcggtaatagttgcaatttttgtgcctcttaccgtaatggttgcaccaggaatggttatgccattggtacctttcactattccttttaccgtattttgagcgaatacagtagttgcagatagtataatagcaaataaaataagtaaactttgtttcataattacatttaatgtgtttggtttagatatattgattattgatcctttcggaaatgttttgcttgagcacttagcgcagagcagcaacatgtttttgatttcagattgattggcttcatatttaattatattaaatctatagatttagtcgacaaatatattaaaaaaaagtatttgccaaattttattttgtgataattattatctgaggatttaaaaatgttcgccaagcaatttgcacccaaacaaatgcactaatgaccattgaatcaatgaacagaccattgaaccaatgaacaattttgttgccacgaaagcacaaaacaacacggatcgatttgtacccaaacaaatgcactaatgaccttgaactaatgaaaagttttgttgccacggaagcacaaagtaacacgggatagatagcgcttttttggccatagattcgcagattttagatcgcttgtctaatttccaaaagtgaagaagcctttgcaaattttataccttattaaggtaggagaaactaagtataaaaaaagtggggctatctttaggacgccccacattgtaatattattattttagaagcttttctaatacggtcgaagaactaatgactataaagctttagtcttttagctttcgtctttaatcctatctcgtataatttggtgcttctttagtaatggtaatatcgtgtggatgactttcacgcataccagcagctgtaatttgaacaaactgcgcttcctgtaaagcctcaatagtagcggcaccacagtagcccatactggcacgaagtccgccgatgtattgatacattacttcggctaaagtacctttaaaaggaacgcgaccaacaattccttcaggaactaatttcttgatatcatcttcaacatcctggaaataacggtctttagaaccttgctccattgcttcgatagatcccattccgcggtaagatttaaatttacgtccttcgtagatgatcgtctcacctggagactcttccactcctgcgaataacgaaccagccattacggtatctgctccggatgcaattgcctttgcaatgtcaccggtatgcttaatacccccatctgcaataactggaactcctgttccttttaatgctttggcacattcgtaaacggcatataattgaggaacaccaacacctgcgataattctggtggtacaaatagaacccggaccgataccaactttcaccgcatcagcaccagcatctgctaaaaatttagcggctgcaccagtggcgatattaccaacaattacctgtagatcaggatatttcgcctttacttcttttagtttatccactacccctttcgaatgtccgtgagcagtatcgatggtaattacatcaacacctgcatgaactaaagcatcaacacgctgtagagtatcagcagttacgccaacggcggcacctactcgtaatcgaccacgttcatctttacaagcagcaggataatttttaacttttgaaatatctttgaaagtgattaaaccacttaaataaccatctttagaaacaactggtaatttttcaattttataattctgaagaatttcttctgcctgaaccagatttgttccctctggcgcagtaattagattttcttttgtcatgacttcagcaattggcctggccatgtttttctggaaacgcaaatcgcgattagtaataatcccaactagtttattgtcgctgctcaccactggaataccaccaattttgtgctctttcatgattttgaaagcatcggcaacgactgctgtttccaatagtgtaaccggatcctgaatcattccgctttctgaacgcttaactttacggacctcttcggcttgtctttcgatcgtcatgtttttgtgtaacatcccaatacccccattttgcgcaatggcaatggcaagttcggcttcggttacggtatccatcgctgcagaaatcaaaggaacgttaagcttgatttttttggttaagaaagtggctgtatttacatcgcggggcagaatttcagaataagcgggtactaaaagtacgtcgtcatatgttaaacctgttgcaataaattttgtggagtcgagttgcatagcaaataaattacgatttattatttgccaggcaaagataagataaataagttgatttttaaaactggattctgttttggaaatgtaaaaaggaaataaaaatgccccgaagatagtcgaggcgctaaatgttttcacaacggaataatccttattgtgatttgctttcaagtcaaaggtataatttattttaatatacagcatacgggaaaccgtaatgaattaaaaataaatgaatttaagtttgaatatgatattaacgatgtcggtttgttgggattgaaaaaattaaaccagatattgttaaaatattaaaataacgctcatgaagaaaatattaggacttgatttaggaacaacatctattggatttgcatatataaatgaaagcgatgatttcacaaattcatcaatagaaaaaattggtgttcgtgtaaatccattaactacagatgaacaaaccaattttgaaaaaggcaagcctattactattaatgcagacagaacattaaaacgcggagctagaagaacattagatcgttatcaacttaggcgttctaatttaattgatgcattagttaaagcttatatcattaataatgataccatcttggccgaagatggaaaaaatactactcattctacttttgcactaagggctaaatctgctgttgagaaagtagaaaaagatgagttcgccagaattctattagccataaataaaaaaagaggttacaaaagtagtcgtaaggctaataatgaagatgagggccaggcaattgatggaatgttaaatgccaaaaaattatatgatgaaaatctaactcctggtcaactctcttatcaattactaaaagaaggaaagaaacaattgccagacttttatcgatctgatttacaagcagaacttgataaagtgtgggaatttcagagacaattttatcctgaaattttaacagatcaatttaaaaaagagcttattggaaaagggcagagagcaacatctgctattttttggaaaacatacaatttcaatacttcagatataaaaggcagtagagaagaaaaaaaattaaaagcttatcaatggcgaaataactcgatcagtcaacaattagataaagaagaagttgcatatgtaattacggagatcaacaataatttaaataattcaagcggttatcttggtgcaattagcgacagaagcaaagaattgtattttaacaaacagactgttggtcagtacctgtataaacaaattcaggataatccacatataagattaaaaaatcaagttttctaccgtcaggattatttcgatgagtttgaaaccatttgggaaacacaatcaaagtttcatcctgagttaacggaagaattaaaaaaagaaattcgggacattattattttttatcaacgaaaattaaaatcacagaaaggcctaataagtttttgtgaatttgaaaataaagagattgagattgatagaaatggacaaaaagttaaaaaaactattggtttaaaagttgcgccgaaatcttcccccctatttcaagaatttaagatttggcaggtattaaacaatgtgctgatcagaaaaaaaggtagtaaaaaacgtgtactaaaagatgctaatcaagaagaaatttttagcctaagcttagaagataaacagactttgtttaatgaattaaacatcaaaggaaatttaaaagccaataagattatcgaattactaggccgagaggccaaagaatgggaaatcaattatactgagattgaaggtaatcgaaccaataaagctttatatgaggcatattttaaaatactggaaacagaaggctataatgaagatttattaaaactatctgacaaagatgaaatcaatattaccgaactaagcacacctgttgcagaaattaaagatatggttaagcgtatttttgaagttttagaaatcgaccaaaatattttagaattcgatgcagagttagatggcaaagattttgaaaaacaagcatcttatcaattgtggcacttactatatgcttatgagggagataattctgcaagcggcaatgataaattgcacgaattacttgagcagaagtatggttttaaaaaagagcatgctcaaattttagctaatgtaagtttatctgatgattatggaaacttaagtgctaaagcgatacgaaaaatctatccacatataaaagaattacattatgataaggcttgctttcaagccggatataaacattctgcatcatcattaactaaagaagaaattgccaatcgaccattaaaagacaggttagatttactaaagaaaaatagcttacgtaatcctgttgtagagaaaatccttaatcaggtagttaatgtagtaaatactttaattgaaacgaacagtgaaaaagatgcagatggcaaaatcattaaatacttcaaatttgatgaaataagaattgagctggccagagatttaaagaaaaatgcaaaagagcgggcagaaatgaccacaaatatcaattcggcaaaaattgctcacgagaaaatttttaaactattacaaacagaatttggcgtaaaaaacccaactagaaatgatattattcgatataagctttatgaagaattaaaaaataatgggtataaagatctatatacaaatacatatatcgcaagagagatattatttagcaaacaagtggacattgaacatattattccccaatctaaagtatttgatgatagtttttctaacaaaactgttgtatttagaaaagacaatttagataaagggaataaaacagcatacgattatatcgacagcaaattcggcaaagaaaaactaactgattttgaacagagaatagaatttctttttgagcaaggaaaaaaaaataaagaagaaggaatttctaaagcaaaatatcaaaaactattaaaacaagaagccgaaattggtgacggatttattgaacgtgatttaagagatagccagtacattgcaaagaaagcaagaaacatgctttatgaaatttgtagaattgttacgcctacaaccggaagtataactgataaacttcgatcagactgggatttaatcaatattatgcaagaactcaatttcgataaatttaagaaattgggtttaactgaacaggttgaaaaaaaagatggcagttttaaagaacgtattattgattggagtaaacgcaacgaccatcggcaccatgccatggatgccttaactattgcttttacgaaacaaagccacattcaatacctcaattttttaaatgccagaaaaaacgaaaatcacaaagaacataacgccattattggtattgagggaaaagaaactacttggaaatacgatgatgatggaaacaagaaacgcatatttaagttaccactatccaattttagagaagaagccaaaaagcatttagaaaacatattagtttctcacaaggcaaaaaacaaggttgttaccaaaaacaagaataaaactaaatctgccaaaggcgaaaaaacaaaaattgaattaacaccaagagggcaactacataaagaaacggtttatggaaagtatcaatactacgttagcaaagaagagaaaataggaattaaatttgatcagaacacaatcaacaaaatatctaacccaaattataaaaagcttctattacagcgtttagcagaatatggtaacgatcctaaaaaggcatttacggggaaaaatgttttaagtaaaaatccaatttatttaaatgatgctaaaaccgaaatcttaccagaaacagtaaaactaatctggttaaaggatgattactcaataagaaaagacatcacacctgataattttaaggacactaaagttgttgataaaattttagatgagggtgtaaagcgcattttaaaagagagattagcagaatacaataacaatccgaaagaagctttttctgatttagataaaaatccaatttggctgaataaggaaaagagcatttcgattaaaaaggttaagattagtggcgttaacaatgtagaagctttacattataaaaaagatcatttaggtaataggattttagatgaaaatgaaaaaccgattctagtagattttgtgagtactggaaataaccatcatgtagcgatttataaagacgaaaaaggaaacttacaagaaagagtggtttctctatttgaagctattcagttggtaaatgctggagaacctataataactaaagattataaccaaggtttaggatggcaatttttatttactatgaaacaaaatgaatactttattttccctaatgaacaaactggttttgatcctaaaagtattgatttattagatcctaaaaacaataaggaaattagccctaacctatttagagtacagaaaattgcggcaaaaaattattttttcagacatcatttagagactacagttgaagaaaggaaagagttaaaagatacaacctacaaaccccaattaggattaaatgccatttcaaaaattattaaggttcgcataaaccatattggccagattgttaaaataggagaatattaatcattaaacacatcagaacataattaaaatataaatagcaaaccactcctaaaacttcttccacagaaaaaccgcgaatttcgacgagggaagatttaatcagaatggttgcacctggaaacaggtgtttcctatgcttttgaatgcgctcggttcttcgcggtaccatctgtcgtatgcttaagcgaagggccacctttttctgggtgtttaatttaaaacattaaaccctaacgctaatgccctcactacactggatcggaaaagaaaaggttatcaatcaccatcatgatatacctttcaaagttttaaacaaacaatataccttcaatgctgatgatgaaaatcattacaatgaaagtaaaatcattcacggcgacaacctcgaagcacttaaggctctcctacctgaatacgaaggtaaagtgaaatgcatctacatcgatccgccctataatacaggcaaagatgcttggaaatacaacgacagagtagaacatcctaccattaagaaatggcttgatcacgtagttggaaaggaaggcgaagacctctccaggcacgataagtggctttgcatgatgtaccccagaattaagcttttacaaaaactcttgtcgaaggatggagtaatatatatttcaatagacgatcatgaagtattcaaccttaaattaatcctcaatgaaatttttggattaaataattttattggaaatattatttgggaaactgctacagaccacaacccaaggcagatttcagttgaacatgaatacgtactttgctacgctaaaaataaaacacttcaaaaggaatggttcacaaaatcacaggctgccgaaactatccagtcgaaatacgatgacttaaaagtaaaatatttatctgataccattaaaattcaagctgaacttagaaaatggattaaatcaaataagtcgaagttaaatctagtcgaacattatgataatgttgatcagaagggggttttccatgatgcagatgtagctaacacaaaatttggaggttatgcttatgagattttacatcctactacaggcaaaccttgcaaaatcccagaaaaaggatttaggtttcctgaagaaaccatgaaatcattaatagcaaatgatgacattatgtttggcgatgatgaaaatacattaatcaaaccaaaaaaaaggatagaaaatgttaaggatagattgagaagcgtagtttatgaggatggaagagcatccacaaaagatctggaatcgatgtttcaaaaggaaatatttaaaaatcctaagtcggaaaccgtagttagaagattaattagtttctgtaccgattccaactccatcatcctcgatagcttcgctggtagtggaacaactgcacacgccgtgctcaacctcaatcaacaagatggaggaaaccgcaaattcattctcatagaaatggaaaagtatgcagaaagtatcactgcagaaagggttaaaagagtaattaatggttatgcgaataaaaccggaactggaggttctttttcttactacagcctgggcgaatcactatttactggcgaaaataacgaataccttaacgaagccgttggcatagataaaataagaaattacgtttggtatagcgaaaccagaagtcctttattgaacgacatccatatcgaccatccctttcttggaaagcatcagggtacagcctattacctcctttaccacgcaaaagaattttcttcgctggattatcaaacactggaaaccataaatattcaggctgatcaatatatcatttacgcagataactgcctgctatcaaaagaattcttgcttaatcatcatatcattttcaaaaaaataccaagagacattagccgcttttaattatggaactgaaaaactatcaaagtaaggttattcaagatttggaaacttatttaaattacatcaagcaatataaaaaaacggatcaatcgttcaaccagttctgggaagatcggattggtagctacaacgccttaactggcgaaggtatgcagccttacaaaaatactattccaaatgcagcaaatgtgtgtataaaagttccaacggctggtggcaaaacttttattgcctgtaatgcacttcatactgtttttagcgcttatccattaagcatgccaaaagtggtagtctggttggttccgtggagtaatctgctcgatcaaaccgtagctgcgcttagcagtccagaccacccttaccgacaaaaactgaacagtctttttaaccaccgggtagaaatttatcagaagaaagatttgctacaaggcgcaaacttcaacccatcaattgtacaaaaacagctttctatttttgtaatgagtttcgccagtttaagggcaaaaaataaagaagatcgaaaagtttaccaggaaaatggacaactggcttcatttgcttcttttttcaagagtagtcatcattttcaggatgataccgaagaaacctcgctaattaatgtcatcagaaatcttcagcctgtggttgtggtggatgaaagtcataatgcagaaagcgcactgagtatagacatgctaagggcgctgaatccatcttttgtactcgacttaactgctacgcccaaaaataacagcaacattatcagtatggtgccggcaattgagctaaagaaggaaaacatggtaaaattaccagtaatcgtttataatcatcacgaccgaacagcggtggtaaacagtgcatttcatttgcaaagaaggctagagttgctggccgttgagcaggaaaaaactggcggaagatatattaggcctattgtattatttcaggctcagcccaacacaggcgatgaaaatgtaacttatgagaaattaaaaaaacaactaatttcaattggcattcctgaaaatcaagtcaaaattaaaacagctactatggatgaattgaagggaatagacctcatgtctagcacctgtgaagttcgtttcatcattaccattaatgcactaaaagaaggttgggactgtccttttgcctacattttagcgtctcttgccgataagtcttctgctgtggatgtcgagcagattctgggtagagtactgcggcaaccttatgttcaaaaacataaaaattaccttttgaatgtatcttatgtactaacggcatcggtcaaatttaatgacaccttacaaagtatcgtaaaaggcttacagtcatcaggctttagcgataatgattatcgtggtgtcgatatgatggagcgtatggataattcggagcagatcatcatcgaaaataaacagctcaatttaacagatactgtagacattgaaacagaaatcgaccttcaaaacctgaattttgataaagcatcggtcatcgaacccgttgtcaatcatattgaaaaggtcgcttttgaacaaagtgaaaccatgcaacaacttattgctagtcaaaaaacacaaataaatgatgatcatattttcgaagaaatgggcgaaaagattagacgttaccgattaattgaacagcataaaaaacacttaatcgatttaaaactacctaaattttacctgcacaccacacagaacagtttgtttagcactggaaaaattagtttaagtcaggaacccttattaaatcagtttaagttaagcaacgaggatattaagatagattttaacaccacttcatccgatttatataaagtagatcttgaagaagttggaaaaaatgatttcgatgcccgcttttctaaaattgaagatttgatgtttagagaaccagtggttgcctacatcatgtctaaacctccggagcgacaaataaaagatattgtacatcagctgatgaaaattatcggagatatgtaccctatccccgatcaggaaataagactctatattgaaagggtgctgtcctctcttaatccagaacagttgcaggatattttaacccgaaaggatgattattcaaagaaaattaaagcaagaataaaacaccatgcagatggctatgccgaacaacgatttaatgacatgattaaactcggcaaaataaataccgaacctgcatggacatttcccgaacaaactgtacctggtaatgtgggtgcttctatcagcaaatcactttatgaacgggaaggaacaatgaatggttttgagactactgtaatatctgcagtttctgcactgcagaatattgttttctggcatcgcaatttaagtaaaggaaaaggttttaatatcaatggttttaaatcaaaccactatcctgactttattttatataccaaatctggaagaattatcctgctggaaacaaaaggcgatgatagagataattctgatagtagatctaaatgcaggttaggaaataaatgggcagaattggctggtgagaaatttaactactttatggtctttgaacaaaaccaaattgaaggcgctttcagtataaataaatcgattgaattgataaaggagctgtaaaatgattaaaagaacactccacttctcaaatccggcatacttaagtttacagaaaaaccagctggccattgatttaccacatttaaaatcgctgggagaaaaagaatcaaagaagtcgattccgatagaagacattggaattatcattttagatcatcagcaaatcaccattacgcatggatgtattgcagcattattggataataacgctgcaattatcacctgtaatcaaagccgacttccaacaggcatgatgctgccaatagatggccataatacacaaagtgaacgttttcgctaccagatagatgcttcacaacccttgaaaaaacaattgtggcaacaaaccacgcaagctaaaattttgaatcaggctgctatacttttcaaccgaggtattgcctgcgacaatatggtacattgggccaaatctgttcgttctggagatcctgacaattatgaaggcagggccgcagcctattactggaaaaatgtatttccaaaaaagttagatttctttcgtggccgggagggcgatccacccaataatctgcttaattacggctatgccattttaagggccattgttgctcgtggattggtttgttctggtctgctccctaccctcggcattcatcatcgaaacaaatacaatgcttactgtctagccgatgacattatggagccctaccgaccttatgttgatgaaattgtattgggcatgatagatcgtggcgaaaacttcttggagttgggaagttctatcaaaacacaacttttaggcatcgctactgttgatgtacatttcgataaaaatagaagtccgctaatggttggcctacaaagcactacttcatctttagccaaatgttatgaaggaacgattcgaagaattaattatccaatgatgaaaagttttgagacaaagagaacatttaattacagggaggaagaaatcccggagtctatcactataaatgaaattacagaatctggataccaaaaacctgatgacgaattacctttttaattgatgcgtttaaatgaatatcgaattttgtggatattagtttttttcgatttacctaccgaaaccaaaaaagaacgtagcgtagccagcagatttcgccaggatattatgcgtgatggatttgctatgtttcagttttcgatttatttgaggcattgtaatagtagagaaaatgctgatgtacatattaaaagagttaaaaaattacttccagaaaaaggccacgttggtataatgacggttaccgataaacaatttggcatgatggaattattttatggaaagaaagaaaaagagttacctgataccccacaacagctcgaattattttaaaaataacaatttaggataatagaaatacttagaataaaaatcctgatgcaattacatcaggatttttttaattctaatttttgaactaacctactgacggatagttaattgaactaaggtatgttgttgtaaatatcagtagttcaaagaatgaaagcaaatcacaactttattgccatacgggataaactaggggctgttgttgtaaatatcagtagttcaaagaatgaaagcaaatcacaacaaataaagtttgcatctttgttgtgtcgagttgttgtaaatatcagtagttcaaagaatgaaagcaaatcacaacaaacaagtcttttcaaagtcggtgacgtttgttgttgtaaatatcagtagttcaaagaatgaaagcaaatcacaacaaggtctactgtttatgtaaataacatcgagttgttgtaaatatcagtagttcaaagaatgaaagcaaatcacaactatccgctacctcttgaaaagtaatgcttcgttgttgtaaatatcagtagttcaaagaatgaaagcaaatcacaacaggttaacgctacttaactggccagctggcgttgttgtaaatatcagtagttcaaagaatgaaagcaaatcacaacagacaaggattttttgttgcctttggcattgttgttgtaaatatcagtagttcaaagaatgaaagcaaatcacaacaggtaagcaagacttacgaatatcaggattgttgttgtaaatatcagtagttcaaagaatgaaagcaaatcacaacatattccctatctacagttaaattgttcgcgttgttgtaaatatcagtagttcaaagaatgaaagcaaatcacaactagttggtcatagagattttagcaccgatagttgttgtaaatatcagtagttcaaagaatgaaagcaaatcacaacagttagatgaaagactagtacgagaatttagttgttgtaaatatcagtagttcaaagaatgaaagcaaatcacaacgatagggatgggagcgtgtgttatgaaagagttgttgtaaatatcagtagttcaaagaatgaaagcaaatcacaacggagtttaccagatgctttaccatcttcctgttgttgtaaatatcagtagttcaaagaatgaaagcaaatcacaacacgctatgctcgatttatttaactaccttgttgttgtaaatatcagtagttcaaagaatgaaagcaaatcacaacagtacatagctaaaccgacaatgacaatgcgttgttgtaaatatcagtagttcaaagaatgaaagcaaatcacaactacctccatgaaccgccatattcagcataagttgttgtaaatatcagtagttcaaagaatgaaagcaaatcacaacaccgagcattaaaagagttttcaattacagttgttgtaaatatcagtagttcaaagaatgaaagcaaatcacaactaattgtttgtgttattttagcatatttgagttgttgtaaatatcagtagttcaaagaatgaaagcaaatcacaaccattagttgaaactggcgttaaattttgtgttgttgtaaatatcagtagttcaaagaatgaaagcaaatcacaacttgtatctccatagtatatccagccggaatgttgttgtaaatatcagtagttcaaagaatgaaagcaaatcacaacgcacccaccaaaggatatgctttgcgttgggttgttgtaaatatcagtagttcaaagaatgaaagcaaatcacaacttgtaggcggttgaagcaacggttttacatgttgttgtaaatatcagtagttcaaagaatgaaagcaaatcacaacacggcataaatcaaaataatcatgagcaatgttgttgtaaatatcagtagttcaaagaatgaaagcaaatcacaaccgggagtcgtaaagttgttagcaaaataatgttgttgtaaatatcagtagttcaaagaatgaaagcaaatcacaaccaataagaaatagaaaaaacataaccaagagttgttgtaaatatcagtagttcaaagaatgaaagcaaatcacaacactaggcttcggaaaaaggaatcaacgggggttgttgtaaatatcagtagttcaaagaatgaaagcaaatcacaacatataacagtgcattacttgttattagtgcgttgttgtaaatatcagtagttcaaagaatgaaagcaaatcacaactaagttactagatccttgcaaaacaatcttgttgttgtaaatatcagtagttcaaagaatgaaagaaaatgacaacatgttaatgtatcagatatgaactggttacctatttcagaccgcttaaaattataattttatcctcaaatttgttataagaacctaaaataaattgattttaaatttcaataaaacctttaaaatagtccgatttaatttaaacgcaaaaagggtcccggcattaccggagaccctttttgtttcatactcacgaaatattatttttcagagtttttcttttcagttacttctgcacgaatttcttgtgctaatactttaagatcttgcattgctttacgcacacgagtaccagcagctgcattgccagcattataaaatttttctacatctgcttcaattgcagcaacagcagctttaacttttgagaatttttccatcgctaattgatgtttttaaggtttaaaaaaattatttatttccaataatacatatttaccttgaattaacaagataatgcatatattaatttgcaataagttttacacatattcacaatctaaaaatgcccttacgctgtttcagaagtattttttgtaattaagtgagaaaatctgttcaattagttaaactgctttgaaagctttattaaattatcaaaggtttgatttgcactatttatacaatcatcaaaatcagctgctgaaaccctttcattcaacacgctaacgaaacttttccatttagatcctaattctgatccatatactccataataattaaggccaccttcatcatttttaaaattagaattggctaaaatgtgctttttaatcacgttgccgcctaaggttgctccttctaatacatatagtgcacctaaaattgctgcactattatgatctggaataaacaattcaaaatccaatgctggtaaagttaaactatcaatatgccagtattccaaatccctctctaaggcatgcaatttaaatcggctattcatttccaattcctgtgcgagattattctccagcatattggctaacctattctctagcttttgatgaataatataatttatagtgagtagttttttataattatctatgctcaaagaattatccatgatgtcatttacaaacatcagcgattccaattccttatgcttctctgctgtttttgttcttaataagtcggcaatcattattttttttattttaaaataagataaaaaaagattcgaatagactatccgaatctttacattctaaatcgtgatgtatcaattcatccttagatgctgattaaaccaaaagttgtgcacgggatgtatacactttacaagattatcataaccttttggcttggtcgataaacatgtataatatatccgggcgtatttattattttatatttttaaaagctacgtagaacgtagatcctgcatttagtttactctcaaaccatacccgcccctgatgtcgctgaaccactcgtttcacaatagcaagaccaactcctgtaccttcaatctctttaacattatccatgcgcttaaatagctcaaaaaccctgtcgtagtatcgattatcgattcctataccattatctttaactgcgtaaattatttcgccaccttcaatatatccagaaatctcaattattggcttctctatcattaaagaatatttaacagcattactaatcaagtttgtaaacacttgagcaatcatggtcttatctccttttaagtctggcaattggcctaaaatcaattcggctttgtctgctttaaaagctatccatacttctgaggcaatttcatttagcaaagtttgcatattaatatgctcaaaactgatttcagaacggccaaccttagccaggtttaaaatt

SEQ ID NO: 2145 - DNA, 24266 bp, synthetic construct
  misc_feature 1..24266: note = Synthetic
  source 1..24266: mol_type = other DNA
gcgccacatcgagcgcaatgccgtgctgctgttcatgattcctgccgacgccgacgatatctgccgcgaatatgaggtactgctcaacgagctggaacgcttcaaccccgatttggccgacaagggacgcgtgcttgccatcacaaaatgcgacatgctcgacgacgagctgattgcagagatgcagcaacaccttccgaaaggcgtggaaacggtgtttatatcatcggtggcaggactgggactggcggagctgaaagacgtgttgtggcgcaccatcaacgatgaggacaaccgcatccctacgcgcatcacgcaccgcgacctcgacatcacgcaccgcgtgcaggaggaagacaacttcgtgattgagcaggaaggcggtgacgacacggaagaagagacttgggacgttgagtggcctgacgaatattgggaagaggatttcaaagatgattagccaacttcacttcaatcataatgtcggcagcatcgacgctttttcaacagagcgcggcgctgccgactgcttttcgccctactccgagttcaactgctgcggatatacgggcgacaacccggcgcacgtcgatgattgcctcaagcgcctgcgcactctgctcggcacagagcacatcgtcacggcgcggcaaacccacagcaccaacgtcgccgttatcgacagcgttccgccgactccaccgaccgatgtcgacgcgcttgtcacacgactcccgaatgtagcaataggcgtgttcaccgccgattgcgtgcctatattgctgtgcgagcctaagagcgggctgattgccgctgtccacgccggttggaagggctccgtgaaagggatcgtggcaaatgccatagaaacgatggtcgatgaaggcgccgacagatgcggaatagaggctgtggtgggggcatcaatctgccaacgctgctttgaggtgggcgacgaagtggtggctgaatttgccaaacgagccttctctctcaacgacatcgtatggcgaaacccagtcaccggtaaagcccatatagatctggcggaagccaaccgctggcttatggaaagcgccggcgtcccaaatgccaacatctcgttgtcggggttatgcaccaaatgcgagcctcaacggtttttctccgccaggacattgggcatcaactccggacggattctctcggcaatcattcgccggcaataacgccgagcgacttgcggtaggccttcggcgacattccgagcattcttttcacatatttgccgaaaaacgacagattgggaaatccgagttcgttggatatttccttgacgctcttgtcggaattatggagcaggcggcgcacatcgtcgatgatgcatcggttgatgacctctgatgcctgcatcacagcatcttgatgtcggcaggaggaatgcgtgatttttgacccaaggagggcgtaatactgcataaacagacttatctcatcttcggatagagacaacacgggattcttgccgagaaacatttccaaatcccaacctccgtcggccacccgcccaagctgatctataaacttggacgaaagcgccatgccgcgacactcgaaatcgagcgacacactgcacttttcaacaattatatagggcttgcacacaaacatcttgccggcatcgacacgatagtccaccccgttgatgttgagcgagccatgcccgttaagacacacaagcaacacgaaaaatttgagtttaaacggctgcatctgactgtactctcctatctgcgaaaaaagcgagatgtcatctttatacgacaagtcttcaatattgcctaatctctccgacgccattgtcattcctttcccatagctgaatttattcgatgcaaagtagcgcattttttccaatgctcacgctatcggaatggatctggaagtgttctatatttccgccattccattttatcggaattttagacccctatttcccctccgcgagccagactccgaaaatcacagcggcagaacccacaagagccaccgcagagacgtgttcgccaagtatcagaaacgctgcaacaaaagttgctacagcattgaaatttatatagttggacgcgcgcaccattcccaaatggcgcaccacggcattccacagagtgaagcaaagcatcgacgccacaagtccgagaaacaggatattgaaaaacaccgtcgggaccagcaactgttcgaaacggaaactcactgggtggaaaaacggcacccacacagccatggagagcagtccgtagccaaacaccttgcgcgaaatgaacacattgtcataacgttgcgacagctttttgacaagcgaactgtagacagcccacgacagcgccgctgaaaacgtaagagcggtgccacaaggattgaacgctgcgaagtcaccgccgttccacaaaataacgacaacgcctgccatagcgactacagagccgagaatcacgcgttccggacgctttgtgcgttccgaacggaacaccgccattcccacaagcgtggcaagcagcggcgtgacactgataaggattgccacattggtggcctgcatcatgccgagcgcggtgttttccgtgataaaatacacagagcctcccgtcagtccagcggcaatcatcctcatctcgtcggcaaacgtgtcggcaaaaagccgacgaggcgccataaacaaaacgcagatataagcaagtgcgaatcggtagatgaatatttccgtgggcgtcagtccgttgctgataagcgttttggtcgacacaaatgtggtaccccacacgcacactatgcacaacgcaagcagatgaaacaaatataatggtttctgtttagtcatatatgctgatataaattgttgtaataaaaaaatggcagctgcaaatgcaaccgccattttatgcttgttgttcctgggtcaacccaaggcgctgattaattgttgccagcgtccaatggttgaacattgataaacttgcggccgcctttaccttctgtaaagttgactgtaccgtctaccaacgcaaacaatgtgtggtccttacccatgccaacattcaaacccggatggtgaactgtgccacgttgacgtttgatgatgttgcctgctttagcaaattgaccaccgaagattttgacgcccaatcgtttgctttccgattcacgtccgttcttagaactacctacaccttttttatgtgccatttctttaaacttttagtggttatgcaactacgtctttaatctctacttgggtgaagcattggcgatgaccgttcaaacggcgatagcctttgcgacgtttcttcttgaatacaagaaccttgtcacctttcacgaggggacgtttcacctcgcaaacaacttttgctccttctacggtaggagcaccaactttaacgtcaccgtcggcatcaatcaagagaaccttgtcgaaatcaattgaatcgccttcttttacgttctcgccgagatagtggacatacaagtacttgccggcttctgccttgaactgctgtccctgaatttctacaattgcgtacatttaaaatagaaactttaacaattatgtccgtgaggcggacgcgcacctgcgcttctcttctctgagccttttcggaattagcgcacaaaattactcttttatttcgtaacccgcaaatattccgacaattatttctctacatccaaaatttttccgtcaataaacggggccggcagaaaaacctgattgaagaaaaatcgtagtgccagacattctcatgcctggcaccactggatttctataaaaatggggaatgttgagtattacttagtctggattacaaggaaattcgatttttcccagaacttctttgcatccttaatctttatcaccactgttccgccaaccgtctccatcgagtatgatccagctggatgtgatgtcttcagctccgccttcttggcgtaagtcttcacttctgtgagcttgcgcttgtcggcttttgtgaagtaagagcggtcgaaatcgccctccatggtctttgtcttgcccaagaatttcttttccagaatcttgtgttctttcagctccttgttgcttccgcaaacatagtagcagatgttgagttcgtcggtgaccttgtcggcacgctgtgtctctgcgttgcgctcctctgtcacggtcgacacttgtgtgttcaaatcttccacattcttgttcaaatctgagattttcacattcgcatctgccaatgctgcctcaagctgctgaattttttgcgactgctcatcaatgagttgcttctgcgactctatggttttctgcaattttgcagaatatccgtttgagcttttcaacttgctctcaagttcctccagcgcctgcttgcgtgcgtcaagctcctgacggagtgcgttgatgttggctatgatttcctgacgcttgtcgggagtgtccttgaaatcgccgctcacaaggatgttttccatacggttcacctcgagaaggttctggctgatgtcgccaataaggttcatcaagctgtcgcgctgtccctcaactttcgagatgtcgggttgcgtagtgtcggcaagagcgtctttttgctctttgttgccgttgcatgccacgagcgcacctgtaagcgcaagggcgagaatcatcatcttcttcatagtagattctgttttttttcggttttaaaatgtgcgtacttatctcttttgccggcgcttttttcttctttcttgcccgacactactataacaatctctcctcgcggttcgttcacggaaaaatgttcacaaagttcagaaagggtgccgcggcaggtctcttcgtgcagttttgagatttcgcggctgacgcttgcctctcggtcctgaccaaaggcttctgccaactgtgtcagggttttaaccaagcggagcggcgattcgtagaacacaattgtacgaggctctacgctcagttcggcaaggcgtgtggaacggccttttttttgtggcaaaaatccctcaaagcagaatttgtcgcatggcaggccgctgtcgacaagcgcgggaacaaaggctgtggcgccgggaaggcactccactttgacgcccacacgacggcattcgcgcacaagcataaaaccggggtcggagatggccggagtgccggcatccgacacaagggctatgcgctctccgcctttcaaacgctgggctatgcctgccgccgtctcatgctcgttgaatttatgatggctctgcatacgcgtctcgatgccgaaatgcttcatcagcactccgctggtgcgtgtgtcctcggcaagaataacatctacttccttgagcacgttcaccgctctgacggtcatatcgtcaaggttgcctaccggcgtcggcaccacatagagtatgccggcttccgctgtgggtttctgtgccatcgctatagaaaatgattttttattatcgccataaattctttcacgtcgtccgattcgcggtcccatccaagatcgccatagaaataatcttccgcctcgtcaaacgaatgcattgcctccaccatatggagagcgtcggtcatctctgcggcactgttgccgaaaagttcgcgacggaaacggaatgtgtcgttgagcgagaacgctgatttaaggtctttcgaacggctgcgctgcagtttttcgtcaagacgcagaggctcgctgtcgtcggatgccttttcattcgcttctgtctcttcttctatattatcctctgcctcgacgtcttcagtttcatccgcaacgttcggtgtctccgcgtcgggttctgcggtagattctgcggtgggttcatcgtcaagcacgagctcgaccataggctcctgctcattgtcatattcgccgtcggcaacttgctctgccgtcacttccgccacgtcttcctccggctctggttccggctcttcgcttacggcatcggccacgtcgttctccaccatacaggcgtcttcctgcgtttcttcgccatcatcgccttctctttcgccaagcagcatctgcaacctgtcgagcttctctcctattgccgtaaacacatattccggagtgtcggcgccacgattgtcggcgaggagcagaagtccctcgagttcgtaagcctcggcaatcatttttcttatgtcggttttcataattgaggagtattttgtcgtttgtcaatagtgtcctgatacgcttcaaacattcccaccatcagccgttctatcgatgatttcagttgttcgtaggtgcagtggaaattgtttgtaagcagcactacggagtagcgcggacgctcggcggggtaatagcctgcatagcatctcacgccggtcatgctgcccgacttcaatgcgatatttcccgacaggcacgtgccttttagcaggttgcgcaccgtcccgtcaacgccgcatcgtggcagcaatgtcgggaaaaggtcgccggtctgccagtcgagtgcggccgagcgcagcacgcttgccagaaacagaggtgtcatccggtttgtgcggctcaatccgctgccgtcatagagagtcacattgtccatgttgatgccccattgttctactatcttggtcactgccttctcgccatactcacgcttcggatcgccgtagatgctctcgcccaatttgcgctgcaccgactcggcatacatgttgtcgctgcggaaaagcaacgatttcagaatctctggcagcaccggcgactcgtacgacaggatttgcatggcatcgctgtcgcttgcactcaccttctttccttcaacggggatgccctcgctctcgagtgtctctctcacatcggcacacaaacctacggctggatgcggcatcgtggtgaccacttctatcggctcctgcatgcggcgcatagctccgctaagcgtgattcggctgttgtttttcttgcgttgcacgacagggctgaatctgccgcgattcaccaccgtcatccggttgtctatctgtatcgaacgcagatgcggcacggtgtcgaccacaagggcgcggccgctcgatgtgtcgataatcagcgagaacagattgtcgttgtagtttatcgaatgcactcccgcgccatagtcttccgtcacgtcggcgtcgagccaatctttgggcacggcgttgtgcggctgtatcttttcctccgggcggatgttgcctttgatagcttttatgccccacagtttgatgttttcaacagcggcggagacaaaggtttcgcggtcggggaaatgcttggagtcaagcgtcgggtcaatgccgccctcgatgacaatgtcgccgttgagcgttccgtttttgtcgatagtgcctgtatatttcagacgcgtacggaaatggaagttctgggtgagttgcttcaacgctgccgacgatgtgacaattttcatcaccgacgccggtatcatttgccgctcaagattgtaggacgcaactgggatgcctgtgcgcaaatccatcacgcagacgcccactgtggctcctgccatggctcggctcgacacaaactgcctgatggctgaatccattttcacagaaagcgagtcgacggtggtgtcgacaacgctgtccgacgccgtcacggctttcaccggttgcctgtcggcgaatccgacagacagcagtaagattatcagaatgatatgcttaatccgcttcatttttattttcttttcccattattttaacattcaaagttaaacataaatcccatgaattggcggtgtgtgtaaacatcttttactgaattaacaatgtttaaccacgcatcgtttcttttccctaatgcctgcgcgccaacagaaagacgccggctccataacggagtcggcgtcttcttgctgtattcctatgcagcgcgatggctattcgagcaccaaagtggcgcgtgcggggaacgacatgtgcggcgcgacggtcacggcatcgccggtaatcacgtcgcggaaagtgtcgccgggacgcatgatttcggcatatcggctcatgtcaacatcggtgagaggctcatcggtgccgttcatcagcacgatgaagcggcggtcgccgttggtgcgctcatagacgtagagctggttggacggcatgaaatgacgcaatgtgcctgccgacacggctttgttgccttggcgccaatggagcagacggctcatgaagttgaacgcgtcgcgttggagcggcgtgcgtccgtcggcggtaaacaccgacacgctgtcgcctgggaatccgcctggcatgtcgaggcgcacatagccgtcggtcacagccttgctgccgtgcatcagcacttctgtgccatagtatatctgcggaatgccacgggtggtcagaaggaatgcctgcgcctgtttccagcgggcaaggtcagacggctcctctaagaggaaacggtctgtatcgtggttgtcgtagaacgtcagcaacctgctgcagtcggcataaagcatgtcgagcgcaaggtggttaaacaggcggttgagtccgtcgcttcctgattttgtctgttctccaaacgcttgctgcgccatcaagcacaacgggaaatccatcaccgttggcaattctgtattgactgggttcaacttgttgccgcgttgcatatacgcaatgctcgcctcgttttcaagccagctttcgccaacgatgttgaaccgcggatactcgcgtgccacggcgcggttccaacgcgccatagcctccatgtcggcatacggataggtgtccatgcggatgccgttgattccggcatactcaatccaccagatggagttttggataagatatgtcatcaagtgggggttgcgctgattgaggtcgggcatacccgacacaaaccatccgtcgacggtgtgcttgaagtcgtattggctcacatacggatcatgcaccgtgttaagccggaagttggtgagcagcaacgagtcgacggcggcatttctcttgcctgtcaaatttgcctgctgcacgcttctgatgccgtcggctgtcggctgggcattgagccagtcgtggctgggaaggtcgtagagccacggatggtagagtccgcagtggttgaaaatcatatccataaccaccttgataccgcggctgtggcattctgaaatcaagcggcggtagtcgtcgttgcttccgaagcgcggatccacacggtaataatcggtggtggcataaccgtgatagcagccaccgggcatatcgttctcaagcacaggagtgagccacactgccgtgacgcccagttcctcaagatagtcgagatggtcggagatgcccttcagcgtgccgccgtggcgcgcgcccgggttcgtccggtctatgcggtagtcgaaattggtagactgatgcttcacgtcgccgccgtcggcaaagcggtcgggcatcatcaggtaaagcacgtcggaagagtcaaaaccctcgtgacttgctccgtcgccctgacgggcaagcagttcatattgcttcttgattttgcgcttgccgctggcaaacgtgatgtcgacagttccaggtttggcgtcgctgccgatggtgagatacagaaactgataattcgggctgtcgagacgcgccacggagtcaagtttcacgccagggcagtcgaccgacggcacagcgtcgcgtatgtcctcgcccgtaaccattatctgcagctgctggttttccatccctgtccaccacatcggtgggtccatacggtcgacagcagtttttgcgttggttgtcattgcgccggccaaaagaagtccggcaacaagaaagatttttttcatcataggtaattgagtttttgtttttccgccataaatttacgacttatttgccatgtaaatcacatttttgtgcatttttatgccatatttgcaactttttggctttacccctatcccttttcaattaataaaaaaacgcctgcagcatttaccgcaggcgcatccaccgttttaaggctgatggaaattcctaatgttttcacaacggagccaggctccttattgtgatttgcttaaaattctaccgcaaatttggcacttttcaacgacttttccaactttttttcaaaaaaaattactaccttgcaaacaaaaaaacaataacattgaaaacacccgattagttatgaaacttatatttggttttgaccttggctccacaagcattggatgggccgttgtccaagaaaaagaaaacgatacagaagcgtcaagaatcttaagacttggcgtccgcgtaaatcctttaacaaccgatgaaaaaacaaacttcgaaaaaggaaaaccaatcacgaccaatgcaaacaggagattggcccacggcatgaggctgaacctttccagatacaagcagagaaggaaagagcttataaaaagtttaatacgattcaaattcatatctcctgacaccgttctctgcgagaatggctcaaacaccacgtttgaaacacttcgcctgcgcgcaaaagccgcaaccgaagaaatcactcttgaagaattgtcacgtgtactattgatgataaacaaaaagcgtggatataaaagcaacaggaaagctcaaccaaacgacaatggggctattgacaacatagacattgcaaagaaattgtatcaaagtcacttaaccccaggagagtatgtattcaacaatctaaaacaagggattcaatacattcctcctttttatcgttccgacctaatcaacgaattcaataaaatagttgactgccagacgcaattctaccctcacctaaagaatatcgacacaggctctcttctaaaagccaaaaactgcgacatcattttagacggacaagatgtgcaacgcatcaagcaaaaaggcagcccttcagagaaaaagagagaactgtattgtttaagagcgcaagctgcaacgcaacaaatcagacttgaagaattggctttagtcctggaaaaaatcagctctgaaatcagaaattcaagtggatacctcggggacatcagcgaccggagcaaggagctgtttatcaacaatcaaacaatcggtcagtacctgatgtctcaattggacagaaatccgaacaacaaactgaaaggacaagtcttctaccgtcaggactatgaggatgaattcaaccgtatttgggaaacccaggcaagatttcataaagaactgactccagaaaggctacacataatcagagacatcattatatttttccaacgcgacctgaaatctcaaaaaagcaacattgccatttgtgaatttgagaaacagaagagggaaataactgtcgacggcaaaaagaaaattattgaattcggcccaaaagtatgcccaaaatcatcgccaattttccaagaattcaaaatttggcaaactatcaacaaccttaagatttcaaatatttacggtgaagagctcagtctctcctccgatgagcggcaaatcctcttcgaagagctgtcaattcggaagaaactaacctgcgctgagattctaaaattattacacaaagattccaaatgctccttgaattacaaagagattcaaggcaacgccacaatttctgccatttttgacgcattcaaggaaataattctgcaaagcggacacgacaacaacaacttcaataaggcatcttttaaagacacaatgcttataatcgagcctattttcaagatgttggggataaatactgacatcctgtctttagattgtcctaccgacagtcattccttaaagacatgccctatttatcaactgtggcatctgctttattcttacgccggcgacaattccaaaaccggagactcttctttgatcaagaaattgcaaagaagatacggattcagcaaggaatacgcatcaattatgtcgaaaatatctttcgacaacgactacggtaatctaagtgcaaaagccataatgcgcatacttccacacttgcgaaatggattgcaatacagcgacgcctgcaatgctgccggatacaaccactcaaaacggtatcttacaaaacaggacattctcaacaaagtcttagtcagccagattgacttgctgccacgcaattctctgcgccagcctgtcgttgaaaaaatcctcaaccaattaatcaacataacgaatgccttgatatcaacatacggcaaccctgatgaaatccgcatagaactggctcgtgaattaaaaaagagcgctgacgagcgggcaaaattaaactctgccaacaatgccaatgaaaaagaaaacaattcaatccggaaattattgcaagagcgattcggcatccagaatccgagcagaaatgacattgtcagatacaagctgtacaaggaacttgagcacactggcttcaagactctatattcccaatctctcataacagatgacattctatttagcaaagagattgagattgagcatatcatcccgcaagccagactgtttgatgattctttgtcaaacaagacattggaatttcacaacattaatcaaaacaaaagcaatcaaacggcatacgattatatcttatctgaattcggtgaagactatgccgtccagtataaaaaacgtatcgacgatttgctgaaaaatggcaaaataagccgaaccaaacacaaatatcttttaatgtcggagactgagattcccaccgacttcataaacagggacatccgcgaaactcaatacatttcccggaaagccatggaaattctcgaaccagccacacgcaaagtggttgcgtcgtcaggagcaatcactgctcgtctgcgcgaagattggcaattggtcgacgtgatgaaggaacttaattgggaaaaatacaaggctctgaatctgactgaaacaatacaagacaaagacggacgaagaatctacaaaatcaaagattggacaaaacgcaacgaccatcgacaccacgcgatggacgccctcactgttgcttttacaaaaccttctttcattcagttcctgaacaaccttaatgccagaagcgataagggcaacgccatttatgcaattcaacaaaaagagttgcaccgcaacaaagacggaaaattgtgtttcaatccacctctgcctttagacgaattccgagcggaggctaaaaggcaactgaatgacattttcgtttcgcacaaagccaaaaataaagttgcgacacgcaactcctatatgaccaaaaacggcaaagggacaaagattgtagaactcactccacgcggacaattgtttaatgaaacgacttacggttgtgtaaagcaatatgaaacaaaacttgaatctgtaaattcttcttttgacaccgacaaaatcatgacggttgccgacaagtcatatcgccaagctctgatgaaacggattgaagaatttgacggcaatgcctctctggctttctctcgaaagaactcaatcacaaagaatccgatatacgttgacgattcccattccgacactgtccctgtcaaagtgaaaaccgttgttcctaagcctgttttcactcaaagaatcgctgtcgacataaaactcgacaagactaaaatagcacagatattggatgctaaaatcagacgcatcttaaccgacaggttctacgaatttggagaagaccctcaaaaagcattctccaacatagatgaaaatccaatttggctgaataaagaaaaaggcattgccataaagaaagtcaccatcaaaaccggtatctctggagtcccaattcgccacaagcgcaacaacatgggtcgacctatcctcaactccgacggaaataaaattccttccgattttgttgttccaggcaacaaccatcacattgcgatatacaaagacgctgacggcaatataaaagagcaggcagttcctttctatatcgcgacaaatagagttatacataagcaacctgccgtagaccggaatttcaacgccgacaaaggatggaaattcttattctccattaagaaaaatgaatacttcgtttttcctaatgagaatacggggttcaatcctgcagaaatcgacctgctcaaccccgacaacaacaaaatcataagtcctaatcttttccgcgtacaaaagatttctccaggagactattttttccgtcatcatttagaaaccaccgtcgatgccaacaacgccctaaaaggaactacatggatacgcataacttcattaaaagcgcttgaaaatgtcatcaaagtccgcgtaaacaacatcgggcaaattgttactgtcggagaatactgacgtcacagcttatgattaaaaaaactctatatttcagcaatccggcctatctgtccctaaaacagggacagatagttataaaattgccggaaattgagaaggccggcaatgttgccgacattatcaaacaacagtcaattgtgacaaagcctatcgaggacatcggaatcctaatcctcgacaatcgccaaataacgctgacgcacgcactgctgaacgctttgctcgacaacgacagcgcggtggtcacttgcaacgacaagaatatgcccacaggattgctgcttccactggctggaaactccattcagacagagcgtttcacgagccaaatagaagcctccgcgcctctgaaaaaacaactttggcaacaaacggttaaggcaaaaattgagaatcaagcgaaagtgctgtcggtatgctccaacgttgaaatccgcggaatgatgaaatgggctgccgacgtgaaaagcggagatgccgacaatcttgaagctcgtgcggcggtcttttattggaaaaacattttctccccatttaccgactacaaattcacccgcgaccgtaacggaatcccgccaaacaaccttctgaattacggatacgctattctccgggctgtcattgctcgggccattgtgggcagcggactcttgccaacatttgggattcatcaccacaatagatacaatgcctattgtcttgccgacgacataatggaaccatatcggccttatgtcgacgagctggttttttctattgtgaaaaaatacggaatggagaatctgtctcttaccaaagatataaagatagcattgttaaacattccgacaattgatgtaaccataggcggaaagaaaagtcctctgatggtagccgcaagccaaacttccgcttctttggcaaaatgtttcaacggtgagattagaaaaatctcataccctgcaagataacagaatttatggatgaacgcatcagtcaatatagagttatgtggataatggtatttttcgacttacccaccgaaaccaagaaggacaggaaggcatatgctgcgtttcgcaagaatctaatacaggatgggttctcaatgtttcaattttcaatctacatcaggcactgcgcaagcatagaaaatgccgaaacccatatcaaaagagtgacatcaagacttcctgaatatgggaaggtgggaataatgtgcatcactgataaacaatttggcaatattagcattttttatggaaagaaaacagcaccaagttactctcctggcactcaattggaacttttctaatccgaaacgcacttcaacagaaaatgaaatccactaatagtaatcacttccgcctacaagaaagtccttcttttttttatttctacaactacacataacagcctatacaacaccgcattacacacatcctgttgtatctatagtaacaaagataagaattttaaagcaaatcacaaccttctcaacaacagtacttctacatttcctgttgtatctatagtaacaaagataagaattttaaagcaaatcacaacagaagccttgatggggtatgctcctcgctgttgtatctatagtaacaaagataagaattttaaagcaaatcacaacgagcaggtcgttaaacactgcaaaaagaaagttgcgtctgtagcaaccgagcgagggggtctacaactcagggaacagcgaaggctcggcgagcaggcggaaggtgtggcggtggtagggggtggcgccgaaacgcgcaatggcttcgcgatgggctttcgtgggataacctttgttcacgttccagccgtattgcggaaattcctcgtggatgcgtttcataaactcatcgcggtgggtctttgcaagaatcgacgcggcggcgatgctcatcatcttgccgtcgcctttcacaatgcattggtggctgatgccgtcgtagggacggaaacggttgccgtcgataagcagaaagtcgggacgcaccgacaagccgtccacggcgcggtgcatggcgagaaacgaagcctgaagaatgttgatatggtcaatctcatcgttgtcaactatgcccacagcccaagccagggcgtcgcgctctatcacgggacgcagtgcgtcgcgggcatgctcggaaagcttctttgagtcgttgagaaggtcgttggtgtagccgtcgggcagaatcaccgccgcggcaaacaccggtccggcaaggcatccgcgcccagcctcgtcgcatcctgcctcgaggcgtcccggttcaagatacggcaacaacatcagtggtggcgtttgattatgtagtcgaacagcgacaggaatgcccgcttggcttcgttgtcgggatatggctcaaggatgctgcgtgcctcggcgcgcagacgctccatcgtggcataggcatattcaattccgccctctgccttggcaaagtctatcagcgtctctatctgttcggtggtaagcgagtcggagtcggcaagacggcgcatctctccgtggcgcggagcgtcggtgtgcgacaatgcgtaaatcagcggcagcgtcacctttccctcgcgcatatcgttgcccgtgggcttgcctatggcatcatccttgaaatagtcgaagatgtcgtccttgatctggaacgacagtcccagcagctccacaaacttcgacaggttggcgatgtcgatgtcggaggcacctacagagtatccgcccaccttcacacaactctggaacagcgatgccgtcttcttgtttatgatgctgaaataagtctgctcgtcgatggaatgatgcttggcaacgtcgatttggtcaatctcgccggtcgacagttccttgccgagctcggagatggtgcttatcacacgaaaatcgttggtgcggatggcacaggcaagggcgttgctgacaaagaaatcgccgacaagcacggcgatatggttgtcccacgtgttgttgatggtgtcgtggccgcgacgctgcttggtctcgtcgataacgtcatcgtgtatcagagaggcattgtggagcaattccaccgacgccgcgccgcagagcacaccgtctgacacctcggcgccgaaaaacttggcgctgagcacaacgattatcgggcgtatctgcttgccttttgtttccaaatacttgtctacaatcttattgagcagcggactattgcttgagagcgactgctttattatcttctgcagccgctccaaatcggatgatatcaggtctcttatttcatcaaaattcgtcataaaacgatttttaagacacaaaagtaatcatttattctgcgaaaattgtaatttcacggtgaattaatgccgaatcattgatttttttatattaattagtactattcacctacaatatatggaacagaaaaaattatttttgctcgatgcctatgccttgattttccgggcataccacgcaatgaaatactctcctcgattcacgtcggggggaatgaacacttccgccatcttcggctttgtaaacacgctcgaggaggtgctgcgcaaggagaacccgacgcatatcgccgtgtgtttcgaccctgcgggaaaaacgttccgccacgagatgtttgccgactacaaagctggtcgcgaggctacaccggaggatatcaaggtggctgttccatacatcaaagacattatacgggcttacggaatccctgtggtggaaaaagagggatatgaggccgacgacgtgattggcacgcttgccacgatgagccgcagccgcggattctcaacgtttatcatgtcgcccgacaaggatctcagtcaacttgtcgacccgtctgtgaaaatctaccgtccgggctacaagggacagccggcggaggtgcgcggcgagaaggaggtgtgcgacgtgttcggcatcaaccgtccgatacaggtgatcgacattctggcgctcatgggcgacaaggtggacaacattgtcggatgtccgggcgtcggtgagaaaacggcgtcgaaactgattctggagttcgacagcgtggagaatcttatcgccaacaccgataagctgaaaggcgcgttgaaaaccaaagtcgaatcaaacgtggacaacattctgttctcaaaaaaactcgccacgatatgcaccgaggtaccgattgaattcgacgaggaggcttacagccgccaccctgtcgacgaagccgccatccgcgacatcttcggcaaactggagttccgatcgttgctgtcgcgcgtgctcggcgacaaggcggaggcaaagcctgcgacgaagcccaagcccgctttcggcgaactttcgctcttcggcgacgacatgactgacgcggcagccacagaggcggagcctgcgccaaccgagcatacctgcaaaacgatcatcgcaaccgatgccaacatcgacgagcttgtcgacaaggcgttgtcgcagaaaacaataggaatccatatggtctgcaccgcgccaaacgccatggaggctgttcccgccggcatcgctgtggcactgagccccgacgaggctttctatcttgaagccaccgaggagtcggctttcgacattttgcgcatccttaaatcggaaactgtggagaaagtgggcataaacctgaaattcgatatggtggtggcgctcaacattgctgagaaattagcggcgccctactatgatgtcgccatcgcgcactatctgctgcaaccggagatgagccattcaataaaccggttggcggagatatatctgaaaaaaattctgcccgactatcagctgcccgccacggaaaaggccaacaagttcaacccggcgctctcgcttgaaatcgaggatatagccaaggtggcttgcgcacgtgccgcggcatgcctcgagctgaagcctgtgtttgacaagaaactcgaggaggagaaaatggcgcatctgctccacgacatcgagctgccgctcgtcgaggtgctcgccgacatggagcacactggcgtgcgcatcgacacagacgcccttgccacctactccaaagccctgactcagcgttttgccgacatcgagcgggcatgcatcgaccttgcgggaatacagttcaacgtgggctcgccggcacaggtgggcgaagtgctgttcgacaaactgaaaatcgacgagaaagcgaaaaaaactaaaaccgggcaatactccaccacggaggaggtgcttgaaaagctgtcgggaaaacaccccatcgtgggcaagatcctggagttccgaaagataaagaagcttctgtcaacctacgtcaacgctctccccgaacttataaaccctcacacgggaaaaatccacaccacctacaatcaaactgtcacggccactggacgcctgtcgtcgacaaaccctaacctgcagaacatccctatcagaaacgacgatggtcgggaaatccgcaaagcgttcatccccgacgacggacactcgttcttctctgccgactattcgcagattgagctgcgcatcgtggcaaacatcagcaaggacgaggcgctcgtggaggctttccttgccggcgaggacatccaccgtgccactgccgccaaaattttccacgaacgcaccgaagacgtgaccgacgatcagcgacggaaagcaaaaaccgcaaacttcggtatgatttacggcatttcggcattcggactgtcggagcgactgcaaatacctcgcagcgaggccaagcaactgattgaaggctacttcaagacattccccggcgtgcgtcggtttatggaccaaagtatcgagatggcgaaggagaaaggcttcgtgacaaccctgttcggacgacgccgcatgcttcccgacataacatcgcgaaacgccgtggtgcgcggatatgccgagcgaaacgcaatcaacgctccaatacagggaactgctgccgacatcatcaaaatcgcgatgaaccgcatttaccgtcggtttgaccgcgagggaatacggtcgaagatgctgctgcaggtgcacgatgagttgaacttcgacgtcgttcctggcgaagaggattctgtgtcccgcattgtaaaagaagagatggaggctgccttcagcggaactgtacctctcgttgccgactgcggctcgggcgcaaactggcttgaagcgcattgacaagcaccgacgcaaacgcgtctttaaataaaaattttgccctgcaataaaaaaatatccgcaaaaacattgcaatattcagaaaagtgagtacctttgcattcgattttcggactcggggtgtagcacagttggttagcgcgccacgttcgggacgtggaggtcggaagttcgagtcttctcaccccgactatcagaggcttaaatgattggcatccaatcatttaagccttattttttcaacaacagccgggacaaattcgggacaaaatagtgaaaaagcacccccgacaacgtttgccggtcaaggtgtggaggtggctctttacacctgattcacccggcaaaccgccgaattcccaagaaaaacactacctttgcagaaagaaagcggcatgcatatgctttagcagcgttttttcaacaaccacaagaaacatttatgattacagttgatggactgaccgtcgaatttggtggcaccaccctattcaaggatatttcctttcagataaacgagaaagaccgtatagcccttatgggcaagaacggcgcaggaaagagcactttgctgaagattatcgccggcgtgcggacagccacacgcggctctgtctccgcgcctaaagattgcgtaatcgcctatcttccccaacatttgatgaccgaggacggccgcaccgtgtttgaggagacatgccaggctttcgctcatctgcaccaaatccaggcggagatagaccgcatcaacaacgagctcttgacacgcaccgactatgacagcgatgaatacatgcagctcatcgagaatgtgtcaacgctttctgagaagttctacgcaatcgacatgactcatttcgaggaggatgttgagaaaacgcttctcggtctgggcttcgagcgcgaggacttcaaccgcccaaccagcgagttttcgggcggctggcgcatgcgtatcgagcttgcgaaactgctgctcaagtcgcccgacgtgctgcttcttgacgagcctacaaaccacctcgacatcgagtcgatcggatggcttgaggactttatctgcaacagttcaaaagccgtggtggtaatcagccacgaccgcaagtttgtcgacgacataaccactcgcaccatcgaggtgacaatgggacggatatacgactacaaggcaacttacagccaatatctggagttgcgcaaggagcgtcgcgaacagcagatgaaacaatatgaggagcagcagaagatgattgccgacacaaaggaattcatcgagcgtttcaaaggcacgtattccaagactctgcaggtgcagagccgcgtaaagatgcttgagaaactccaactcatagaggtggacgaggaagacacaagccgactccggctgaagtttcctccgagtccgcgcagcggtgcctaccctgtgcaaatgagcgatgtggcaatgtcgttcgacggcaagaatgttttcagcggtgtcaaccttaccgttgaacgcggcgacaagattgccttcgtggggcgaaacggcgaaggaaagtcgactctcgtgaaatgcattatggggcagctgcaaaacgaaggaaaactcgaactcggacacaacgtgcagattggctacttcgcacaaaaccaagcttcgctgctcgacggcgagctaacggtgttccagaccatcgacgacgtggctaaaggcgatgtgcgcaacaagattcgcgaccttctcggcgcatttatgttcggaggagaggagtcgacaaagaaagtgaaggtgctgtccggtggcgaacgcactcgccttgccatactcaaactcctgttggagcccgtcaacctgcttatccttgacgagccgaccaaccaccttgacctcaagacaaaggacgtgctcaagcaagccctgctggacttcgatggcacgctcatcgtggtgagtcacgaccgcgacttcctcgacggacttgtcagcaaggtatacgaattcggccacggccgcgtacgcgagcacttgtgcggcatttacgagttccttgagtcaaagaagatggaaagccttcaggagctcgaaagaaaccgcatgaagccgggaaaggcttaacacaaaaacaactcgttctttttccgatcacggcagagcggctcaaggcgggctgccagcactttcagagactcgccgattcccctcgcatgcaacgggcagaccgacacgcaccgcatacagccgatgcagagctggttgttgttgtcttttggattgtcggcagatattgcacctgtcgggcattggctcgcgcagacaccgcattccgtacagtcttggtttgccacaggaaaaggtccgctgcagccttgcttgtacgggcggttgcctggcaatgcgagacggccgaacggtttgccgccttgcaccctctcaagaatggctctgccaaaggatgccagctctccggcatcggcagcgtcaggcctgccggcgccgtacatacggcaaatgctgtgctctgcgttggcggcaacggctgctacgacgttgaatccttgcgctgtcgccacatcctgcatttcaaccaaagcatcctcgtaggctctgttgccgtaaacggcgacaatcacacaggtggcaccgtttgactcaacggcattcagcctttccacagccaatgccggcacgcgcccggcatataccgccatcgagacaaccaccaagtcgccggctgctatacttggcaagcacagctcttcttcttttacacaaagttctgtaagtatgctttttgcctcaatgccgctgcacagcagttcgctgacgcggcgtgtgcctccagtggggctgaacgcaatctgatgtatggtcataatatcttcgttttgtttttgttttctatttcaagcaacattctttttgcctccaatcctccggcaaagccggtcagggaatggttgctgcccacgacgcgatggcatggaataaaaattgctatgccgtttgcccctacggcttgcgccacggctctgacgccttcaggattgccaacgctcagggcaatatctttgtagctcacagtctctccgtatggtatgctgagcaatgcttcccacacttgctgttggaaatccgttcccacaagacgcagcgggatgtcgaaagccttgcggcggcatgcaaagtagtcttcaagttgtttcttcgcttgctcgagcacggcggatgtctcaaccaggaattccgcattcagccggcgcgcaagccggcgcttgttgcggcaggcgcatggcatcccgttccagtcgcacagacacaaagcctctcccaccgacgccaagaccatctctccgcacggcgagtcgtaatattgtacacttaccggttgcctgcctctcatcttcgccacatcacctgcttattgctgcattttgactgcaattccgcatcacttctcatacaattcaatcggcaacccgtcaggatcgctgaaaaacacaaaccgtttgccggtatattcatccgtgcatatcggctcgcaggctacgccttttccctcaacctcgcctacagctgcggcaacgtcgtcgacctcgaaggcaagatggcgcagaccggcggcttccggacgggaaggacgcgctggaggattcggaaaagagaacagctccacaacatacgttccgccgagccagcagtctgccttccaggagtcgcgctccttacgatagtgctcgctcacaatcttcaacccgagcacgtctgcatagaaacgcttcgaccgctcatagtcggagcaaatcactgccacatggtgtattttgttcagtttcatattatcagtagttttaataacattttcccacacaatg

SEQ ID NO: 2146 - DNA, 24266 bp, synthetic construct
  misc_feature 1..24266: note = Synthetic
  source 1..24266: mol_type = other DNA
tgcctatggacaggcacacatatcttctacttttaacaatgttatcgttacactgaccaacagcaccggacaggtaatcagttggtcatctgccggtaagatgggtttcagagggtcaaagaagaacactccctatgctgcacagactgcagctgaagattgtgcaaaggtggcttatgatatgggtcttcgcaaagtaaaggcttttgtgaagggtcctggcgctggtcgcgaatctgcaatccgcaccattcacggtgcaggaatcgaggtaaccgagattgttgacgttactccgctgcctcataacggatgccgtccaaaaggacgccgtagagtataaccctttaattcattttaaattatttgatatggcaagatatacagggccttcaacaaaaatagcccgcaagtttggagagccaatcttcgggcccgataaaagttacgaaaagaaaaattatcctccgggacaacacggtcttacaaggaagcgtaaaaaagtttccgagtacggaacacagttgaaagagaagcaaaaggtaaaatatacctacggaattctcgaaagacagttcaggaatatgtatgaaaaagcttccaagatgaaggggcgtaaaggtgaaaaccttatcctgcttctcgaaagccgtctcgataacctggtttacagaatggggattgctccctcaagagctgctgcaagacagctggttacacactgtcacatagttgtaaacggtgaaatctgcaatatcccctcatcaattgttaaacccggagatttagtaggtgtaagggagagatcaaagagtcttgaagttattcaggaaagtgtttccaggggatcatcaaagttctcctggattgaatttgacggaggcaagcttacaggcaaattgctcaatctgccggacagaagcgaagttcccgaaacaatcaacgagcagcttatagttgagttatactctaaataaaaaataaaatggcaatattagcatttcaaaaacccgataaggtaataatgcttgatgcaaccgagactttcggtcgctttgagttccgccctctagaacccggttatggtataacagttggtaacgcactgcgtcgaatactcctgtcatctcttgaagggtatgctattactgctgtgaagatacagggagttgaccacgaatttgcaacaatcccaggagttattgaaacagttgtagacataatattgaacattaaacagataaggtttaagaggatgatagaaggagaggattccgaaattgtaaatgtctctgtaagcggaaaacagagctttagtgccgaggatatctccaaacaactttcatctttcaagatcctcaatcctgaactgcagatatgcacaatggaaccgtctgttaaactgtcaatggagctcaggataggaaaggggagaggatatgtccccgcagaggagaaccgtcctgaggatgccgcaatcggtcttattccgattgactcgattttcactcccatcaagaatgttacatattcagttgaaaattggcgtgtagaacagaaaaccgacttcgagaagcttaacatcgagattactaccgacggatcaatacatccgaaagatgctctcagagaggctgcgaagatactgatacatcactttatgctcttttcagacgagaagattactctggagactcctattgaggttgtcagcagtgaattggatgaggaatcactccgtatgaggcacctccttataaccaaacttgctgatatggaactttctgtaagagctctcaactgccttaaggctgcagatatcgagacctttgctgaactggtatctctccagagaacagagctgatgaaattcagaaacttcggcaagaagtcactctccgagattgacaatctggttgagcgctacaagctcaactttggaatggatgttacaaagtataatattgaaaagaaagttttgaaacatgaggcacaataaaacaataaatcacctgggccgtaagagcggacaccgcaaatcaatgcttgcaaatatggcttcttcccttataatgcataagagaattgagacaacgcttgcaaaggccaaagccctgagagtatacatagaaccccttcttaccaagtcaaaagacgattcaactcactccagaagggtagttttttcttatctcaaacaaaaagaggcaataaccgagctttttagaattgttgctccaaagattgctgaccgtccgggcggttacaccagagtactcaaaaccggtttccgtcagggagacgcaaccgatatggcaattattgagctggttgactttaacgaggctgtcattgctgctgccgctcaggaaaccaagaagagcactacccgccgcagccgtgcaaaaaaatccgacacaccttctgaaaaagcagaaccaaagattaaagctcctgctaaagcaaaagcccccaaggcaaataaagagaaagcagttgcagttgaagcagatgttaaggatgaagttgcagaggttgttgcagaggttaaagaagagattaaagatatagaagaacctaaagcctaattatttacatctggagttgattctcccggtgataattccgaagattgtggagggcgaatatagttgagagagaggcagagatgcctctctcttaatttattttagcactaatatgttgataatcggattaattgtcgtagctttgcagcaatgacatttaaagaactgaacgtaatcgagccaatattacaggctctgatacaagagggttattcaaccccgacaccaatccaacaagaagccataccaattattctaaataattcagacatcttgggctgtgcccagaccggcacaggcaaaacagcagcattttctattccgatcctgcaaatgctgtactctaaagtgaaacaaggcagagacaaagagatcaaagccctgattcttacaccaaccagagaattggcgattcaaataggcgagagctttgcagcatacgggaaaaacactttactgatacacactgttatttttggcggagtgggccagcagcctcaaacaagagacctaaaaagaggcgtcgatatactgattgccactcccggacgacttctcgatttaatcaaccagggatacatcaatcttaagacaatcgacttttttgttcttgacgaggcggacagaatgctggatatgggatttatacacgacatcaagcgaatattacccttgttacctaaaaagagacagacacttatgttctcggcaactatgccgcaggagattgcttctctggcaaattctatgctaacgaaccctgttaaggttgctgtggatcctgtctcatcaacagtggattcaattgaacagtttgtatattttgcagagaagagagaaaagacatctctgcttattgacctgttgaatgacaagaataagaaatctgtactggtcttttccagaacaaagcacggagctgataaaattgcaaaggcactctcaagagccgggataggttcagatgcaattcacggcaacaaatcacaaaatgcccgacaggctgccctcagtaaattcaagaaacatacaactcgtgtacttattgccaccgatatcgctgcaagggggctggacattgaccaactctcacacgtaatcaattacgatctccctgaggtacctgaaacttatatacacagaattggccgcaccggaagagccggttacggaggagttgccttgtcgttttgcgacccggaggagctcccaagactcaaagacattcagaagcttcttggaaggaagatctcggtagaacgtaatcagcactataaagctgcaatttaatcaggattttactcctggcgtttattcatttactcctgacgtttaatcacaggaatcccaatgggcatcatataaagcggctcctcttcatcggggagctgcattactttacggacctcatcgtcgttgaatgctcccacaggacaggtaccaagcccgagtgccactgcctgcagaaaaacattttcggcagagtggccaagatccatacaaacataacgtgttatttctccttaagatatccgacagggtgattcaaccaaagatactgagtatctgtaagtttaagttcatctttgattgccgccttgttcatctgagctctgggaacagttccgagccccataccggcacaaaagagagcaatgttctgcgatacaatgccgcagtcaacagcacccatttcgtaatagtgcttgttattgggagatccggctgcataaccgcggtattttgagatatccgcaaccagaagcagaatggtgtgtgcctttgtagatctttccccttccataaagggacggagatctgtcttgtttacctgaataaggcaatgatcggcagagttgtagagatacgttccatctggtctgcatacgtatagaataacatcctgagaattctgggctgtgggtgatgtaagttttttggattcgggacggttaatccctacagcagcccaaaccagatctgagagatcctgcagtgaaagttccccgggagaataagctcttgtagaagaccttacccaaagggatttcataatcgaatggcctttgtcagttgagggcggatttagttttattacatcaccggtctgcccttgcagtgagattgaaaataagataagagataaaaaagtaattgtgtgtttcatagccttaattcatattaaggtaatttaacttattttttctgtttgacaaaatcaataccccagttttatcagaccctcctctgaggtctgaggctcacccttaggttgcttaactttaaatgagtttatgttaagtgtgattccaagccagacgaccctggagttgctcttgctgttgttgttcagatggaatacctcgttgtcgctatggatgttccactttttggtgttaaaaatatctgttacagacaggttgcctgtgatctttcctccaaggaatcttctcttgagggcaatgtctccggtgtggtagccctctacattaaaccggggaagggattggggagagatgtaagtgtagtatagctgcaaatcggtttttttgtcaggatagtaatttatccttactccggcagtgcctgcaaatcccgatgcgtcaagtgtaagattgttttcccgtaattctgcaggatcagacgggtcatctatgaattcatcgtagaatatagtcaatgaggggcttacagagaattttcctccaatgtttattgtggcatccaggtagcttccatacttgaaatagcggggaacatttacataagttatcagcagtttattccctgaggtaacatttgtcacctgagcaatataatcctttgtaaagctcacataaattcctgttctcaaagtgtttttgcttctctgaaacgtatgttcaatctctgccttgtctgtcagttcaggtcttaaccatttattccctgactcataggttatgtggtcaatctgattgatataagggttaagctgggggtaggagggtctggttatcctgcggttataaacgaaagagaggctgccggcattgttaaatccatatttaagtgagagaaagggaaagagtgagaatctttggtcatagatatcctctccggtgcttctttgattgagttcagaggtaaagtattcacctcttgcaccgtagcggtattgcagcctctctccgacttttcctgacagggagagatacgccgcataaacattctctttgtgtttgagatcgttgctgaattcggtgtttaatatccagttattttgtcccgctcccttgtcataaaagcgatactcaaaattgttccatctggaaagaaattttgctcctgtctccagacggattttgtttttcaacacttttatatagtctgtctgcattgcgaaactggtgggccttccgccaccttctgagcgttgtatcaattcgccttctgaatagtaattggcaggtcttgagccttttattcctgagaatgtaatgtcaaacgacaattcattgatatctttttcaaatatgtgtttaaaatttgcagttgcatcaatgttcttacgggagaagttgacatcgttgactcttgtgtaagcaggtactgatgatacgggattgctgccggtgatctcctgccgggtattcaataaagggaacaatcccttaatgttgagcccaaagatatttttgccggccggagtgtataagagtgccagatttgccgaatggatattgttttttctccgggattcggctgtctgatagatattgtcatagggctcatatatctccctggtgagatcactgctgatttgctcaatctcataccttccggaatatcccagatcaattccccacttaccgttgttatagctgagccccaatcccccgttcaggcggttttcatatcccccgttgagggtggccatcatactcttgctcccggcaaggctcccttttgatattatgttcacaatccctcctgacccctcagcatcgtattttacatcggggcttgtaatgatctcaatatgtctgactccggacgcaggaagagtgcccagagatgagagagttgtgggcttcccgtccaggaggatcattacattcttattcccccggatataaagattatcttcgttgtctatagtcactgccggatcgctttttataatttcaagaaggttcccgctggctgaggaggcgcttttacccacatcaattctgctcttttctatggatacgctcctctccttcactctgctttcaacagtaacagaggataacaactctgccgaaggtttaagtttgagcacacccagatatgaaactttttccttgacagaaacttccagtgagataccttcgtaacccatatactccactctcactctgtaactgccttcaggtatatctttgagtatgaaacttccgttggcagaagtcagcgttcccgaaattgcactttctcccgattgaggataaatggctacgctggcatagtcgagaggactaccgcttagggcatcagttactcttccggtaaccctgaaaagagccggagcatttgcagaaacctgaccggaattacctaatgaaatttgactgtaaatatttgattgtacagcaaaaagagaaataatcagtaacgtgaaaaatttataaactgtggatggtttgattgacatttttaccttattttatgcgaattaaaaatttatttcaggcctttctcatctttgcaaaggagagaatcagtccaagaacaatggacagtgaagcggcaaacagcaccttgtactggtcgggcagcaggaatgtgatggtgtgagcaggtatccagaagagaggtatggtaacacccacaatctccttaatgaaccggggccagtctatcacgctgataatctgtgaaatgtcaggcttttcacctgagaagcgcttatctatgtaaacatctgtaatcctgtgagaagccataaaaaccggggcaaaggtgaggttcattatcgcagaaatcagaaatgccctgcgaagttttgccagaaatacaactgttgttgagcagctatcgccacatccggtacaaattagcccttgtgctcctgctccatccactccgttggcaaagatgctgaacatgagcactatcatcattcccagtattccccagacaaacatcttgggcagtactcccttaaccattatccatcttttatgaatcagccttgccgccaggaactcccccataatcgagagaattgcaaattttacaaaacccataaggaaggggtgccgggcagttgtttcaataaagagagagtgtgtagggggaaagataagaaacgccgccaccagagccagcaatcctatccagataattgttccgtattttgacataatagttttttgaggggacaaagataagaaaaacggagacaccttgccacagttttcggcaagtagttggttatgacttaattatgcgtgtcggttttttttggtaagcaagaacctcaaaaaatgaacttgctaaaagccatatattaagttacttgccgaaaactgtggcaaggtatctcccaaaaagcatcaataagaatccccaaaaagcatcaataaccattaaaaatgaaaaaaaatcaataactttggcaatagttattaagggtaatattatgatgtatcttaatagaatggccgataagcagcttagtcaaaatcttgaggcctttggtgctgtcttgattgaaggacctaaatggtgtggtaaaacaaccacagctatgaaacatgcaaaaagtgtattagagctgcaagatcccgatactagagaaggatttttggcaaccgcaaaaattcgaccttcattattattagcaggagatactccgagactgatagatgagtggcaagtggctccggccctatgggactctgtacgggttatgattgacaaacgaggggagcccgggcaattcatcctgacaggctctaacagtatagacagaactcaaataatgcattcaggtactggcagaataactcgcatgcaaatgtaccctatgagtctgtttgagtcaaaagaatcaataggcgatatttcattaatggacttgtttgataatcctggctttgatattgatggagtaaaatctaaaatgactattgaagatctgatctttgtagcatgtagaggtggctggccagcatctttaaaaccaaaaacatcagaagctcaattattgattgcaagagactatatgagaagtgtttgcgaagtagatctttcaaccgtcgacgaaataaacagggataaaacactcgcacgcctgatacttagaacttactcccgcaatttgtcgactttggtaacaaaaacgacaatgataaaggatgtcagatctaatgtagaaactttggccgaaaacactttcaatagttatatcaatggttttaagaaactttttgtgatacaagatattgaggcatggaacccttctattcgttcttcaacctcaatccgcagtagttcaaaacgaaatctgattgatccgtccattgccgttgctgctcttggtttgactccggaaaagcttcaaatggatttaaaaacatttggatttatttttgagtgcatgtgcatacgcgatttaaaagcatattctcaagcacagggtagttctttgtcatattaccatgataggtacgatcttgaagcagacgctgtattacatttgactgatggtagatatgccttgatagagtttaaattgggaggcagtgaagtcgaagaaggagcaatgcatttgttgaaaattaaaaatttggtgagagaatttaataaaacagcgaaaaatgctcagcttagggaacccgatttgatgatggtaataaccggaggtccaattgcatatacacgtcctgatggggttaaggtactacctcttgcatgtcttagagattgagtcagaaatgcaccttgccatagttttcggcaagtgtcttaatatcacgacaatattaaaagtgttttttagatgttttagatttcatgtaatcatcaaaaaatgtcaagcagaaataacaaataaacagctacttgccgaaaactgtggcaaggtgcctccaatgctcgtggcaacttacggaatgaaatcgtgccaacttgtgaacttgcggaatgaagtatcgccaaataaataaggacagagttcttgaggaataaaaaatgcccccgataaaggacgagggcaacctgaatgttttcacaacggaataatccttattgtgatttgcttcaaaatttgacacgaatataaaaattaattacaaaaaaacaaaactaaataaatttaaatttgcataattgaaatatatttagttgatttggtgtatattaattaataatattataattttatgaagcgcgtcttaggattagatttaggaacaagtagcattggatgggccttggttaatgaagcagaaaactgtaatgaagagtcgtcaattgtcagattaggcgtaagagtaaatcctcttaccgttgatgagctacagaactttgataagggtaaaagtattaccacaaatgcagatcgaactcttaagcgttgcatgagacgaaatttgcagcgttacaaactccgccgtgaaaatctaattgacattctaaaagagaattgctttatttccgaagaatctatcctttcagaaaatggcaataagactacttttgaaacatacaaacttagagcaaaatcagctagccaagagatttcacttgaagagtttgcccgggttcttttgatgattaacaagaaacgagggtacaagagcagtcgtaagacaaaaggaaatgatgaaggacagactatagacggaatggaagtagcacttaaactatacaatgaaagcctaactcctgggcagttatgtttgcaccttattaaatctggaaagaaacatcttcccgagttttaccgttcagatttgcaagcagaatttgaacgaatttggacaaagcagaaagggttttatccggatattctaacagatgatttaaaagaaaaattaaagggtaaaaatgagaaagtaacatgggctatttgcagagataatttcaagtggagtgaaacagtaagagtgtggaataacgatgaagcgaagaaccaggatattataattgaaaaaactctaacaggaataaagcgtgaaggtaatgttcaagagcaaaaaattgaaaatttctattggagatcaaaagcaatctctgaaaaattacatccggaagaaattgcggtagtgttgtctaaagtaaattcgcaaattaacggatcaagcaattatttgggtgcaatttctgacagaagtaaagagctgtattttaataaacaaacagttggtcaatatcaaatgtcagtattggaacaaaatccaaatgctagcttaaggaatatgattttttaccggttggattatttaaatgaattcaatacaatctgggagactcaggcaaaatatcataaaaaactgaatgaagagttaaaacaggaaattcgagatattataattttctatcaacgcaacttaaagagtcagaaaggattgattagtttttgtgagttcgaaaaaaaacaaatagaagttgaaattgaaggtaaaaagaaaactaaaacaattggaagccgtgtaatccctcgctcttctccactttttcaggaatttaagatttggcaaattttaaataatatgatagtctctggaaaaggaaaaaattcaaataaagataaagatgatacaaatctacattttatggataatgaaaatcgattatctattaatggtgctcgtgaattgtatcaggaggaaaaggaactcttagcttcagaactttcaataaaggaagaacttaaaaaagatgagattttaaatttattatttaacaatcctaacggacttgatttaaattttaaatccgtacaaggaaacttgactcaagcaaaattatttgagacatacaaaaccattattgagctctccggccattctttagacttgaagaaaccggcaactgaaatagtaaagaatgttgaagagattttctccgggcttggttatcagtcaaactttttatgttttgactcatctaagccattggaagagcaaccaatgtttaaactatggcatttgctctactcatatgaaggagataattctgttacaggtaatgaaggattgataaataaaattaatgaaatctgtggttttgaaaaagagtatgccacaattctttcaaatgtagtatttcagaatgattacggtagtctttctacaaaagcaatacggaaaattctaccataccttaaagagggaaataaatacgacttagcatgtgaatatgcgggttacaagcactcggccagctctttaactaaagaagaaattgagaataaagtattaaaggagaaacttgaaattctacccaaaaattctttacgcaaccctgttgtagaaaaaattctcaatcagatggttaatgtaataaacaccattaccgacatttacggtaaaccggaagaaatccgtatagagctagcaagagatctgaaaaagaatgccaaagaacgagaagaactgacaaaatctattgcagaagcaacaagagcacacgaggagtataaaaggatccttacaaaacccctttctgaaggaggtcagtttggattaacttatgtgaacagaaacgatatcattcgatataaactatatgaagaactaagagagaatggctataaaaccttatactctaatacttatatttcgcctggtaatgtttttagcggggattttgatattgagcatattatccctcaatcaagactttttgatgatagtttttcaaataaaacattagaattaaaaagtgtgaaccttgaaaaaggcaatagaaccgcaattgattttgtaaaagataaatatggtgaaactggaaacgataatagcctggaaaactatttaaatcgcattgaatcgcaatttaagaaaggcgttttatcacgcggtaaatataacaaattaaaaatgcaggagaaagatattccagaagacttcattaacagagatttaggagatacccgctatattgccaaatatgccaagacaatgctcggcgattttgtaaaaagagtagtcaccactacaggctctattactgatgctttaagagaagattggcagttggtcgatgttatgaaagagttgaactgggataaatataatgctcttgggttaacttattatgaagaaaacagagaaggtaagaagttgaaaagaattgtaaattggacaaaacgtaacgatcatcgtcatcacgcgatggatgctctaacagtagcatttacaaaagatgcttttgtccagtattttaacaataagaatgcaagttttaatccaacttcaaacgaatatgctttaaggacaaagtatttctttaataacaaagcaattccacctatgcccttggaggtgtttcgttcgcaggcaaaacgtcacttggagaacacgctgatctcaattaaagcaaaaaataaagtggtgacacaaaatgtaaatgttacaaaaaagaaagagggcaataataaaaaaatccaactgactcccagaggtcaattacatttagaaactgtttacggaagtcaaaagcaatatgttgtaaaggaggaaaagattgactcaacttttgaccaggaaaaaattttaacagttgcaaaacctgtttacagagatgtgttattaaaacacttgaaaatatttgatggagatcctaaaaaagcttttagcgggaaaaactcactagctcagaaccctatttatattgatgaaaaacaaacaatctcaatccctgaaagaatcaaaacggtctcttttgaaactatttacaccattcgtaaggagataacaccagatctaaaactggaaaaagtgattgatattagaattcgtagaatattggaaacccgattaaaagagtttgataatgattccaaaaaggcattttcaaatttggatgaaaaccccatatggcttaatcgacagaaacagatattaataaaacgcgttacaattaaaggaatcagcaatgcagagtgcttacacgaaaaacgggacaaagagggtaatttattattggatgcagagggtaataaacaatttgtagattttgttaatactggcaataatcatcatgtcgctgtatatcggaatgaaaatggagatttgcaagaatgtattgtatcgttttttgaggcagttacccgcagaaacttaggattgcctgttatagacaagacatacagggctttatatggatggaaattccttttcagcatgaaacagaacgaatattttgtatttccaaacgacaaaacaggttttgatcccaacgaaattgatttactcgatccggaaaattacgcattaataagtcctaatttatttagagttcaaaaatttgacaaaaatggcataaaaatgttcagacatcatcttgaaacatctgtaaaagatgaaaatactttacaagaaactgcatggaaaagattaagtagtcttagaggtattgataaaattgtcaaggtgaggattaaccatataggtcaaatagttttggttggagaatactaatcagctgcatataagaagaatatcatgataaaaagaaccctgtattttgagaatccggcctatctaagtctgagaaatgatcagttgattataaaaatacctgatgttgagaataacgatactcttcctgaatctctcaaaacaaaaaatgttaggagtatccctgttgaagatattggagtaattgtattagataataggcaagtaacaattactcaaggagctttagaggctttgttagaaaataatacagcagttatttcctgcgatagtaacagaatacctgtaggccttatgttgcctttatgtggaaatactatccagaatgaaagattcagagaccaattagatgcctcccttccattgaaaaaacaactctggcagcaaactatccaggcaaagatttccaatcaggcgtctgttttaaagatatgcagagcagcagaggtacgcaatatgatgaagtggattgatgaagtccgcagcggggatattgataatattgaagcccgtgctgcagcttattattggtcaaatctatttaagaatttttatcgtcatagagatggattaccaccaaacaatctcctgaattacggatatgcaattttaagggcaattgttgcccgcggtttggtatcaagtggccttttacctactcttggaatacatcaccataatcgttataatgcttactgccttgctgatgatattatggagccatatcgtccttatgttgataaactagttgtaagtatgtttgatgaggggaaggctgatttagataaagatacgaagatgcaactactctcaatccctactattgatgttattatcaatggacaacgaagtccattaatgatagctgtaagacaaactacatcgtcgctatataaatgtttcagcggagagaaccgtagaattatatatcccgaaatgtagtggaaaggttttcggaatatagaattatgtggatacttgttttttttgaccttcctactgatagcaaaaaagagaaaaagcaatatgctgaatttcgcaaaaaacttgtgaaggatggatttactatgttccagttttctatatatttacgccattgtccttcccgagaaaatgctgatgtacacattttgcgtgtaaaatcctctttaccacctgccggtgatattggtataatatgtattactgataaacagttcagccagatggaaattttttcaggtaagaaaaaaatagaagagagagatattcctcaacaactggaactattttagttcctcaacaatatttaattataaattttacagttatgtgaatgctgagttcattctaaaataacaaaacccacctcgagagtgggttttgttgaccggaataagtttgttttttatttctatcccaactcttaaatcgttgatttaatgtgttttcaacagattcagctgtatccggtatgtcaaagataaaattttgaaagcaaatcacaaccaaatctcaagactggttctcaggtttcgcgctgtatccggtatgtcaaagataaaattttgaaagcaaatcacaaccaactgcgattgatgttgtaggagaagactgctgtatccggtatgtcaaagataaaattttgaaagcaaatcacaacactctctccgttcttattgtctccgtctatgctgtatccggtatgtcaaagataaaattttgaaagcaaatcacaaccatgaagacaggagttgatgtctatggcgggctgtatccggtatgtcaaagataaaattttgaaagcaaatcacaactcgaagtacaggtttgcctctgctcttcttgctgtatccggtatgtcaaagataaaattttgaaagcaaatcacaacctcacatctgcctttctggtacggcgtggagctgtatccggtatgtcaaagataaaattttgaaagcaaatcacaacttctttgtgtcttatgttcgctcctattggctgtatccggtatgtcaaagataaaattttgaaagcaaatcacaacatactccctgtaacggatctctcctgtgagctgtatccggtatgtcaaagataaaattttgaaagcaaatcacaacctgtgcctgcctgaccataaatcagggcttgctgtatccggtatgtcaaagataaaattttgaaagcaaatcacaacccctttcgtcagaaccctcaccttgctatgctgtatccggtatgtcaaagataaaattttgaaagcaaatcacaacaataaagtgatagatattcccccatataacgctgtatccggtatgtcaaagataaaattttgaaagcaaatcacaacgggtcaagacggcctttgttgtctttctcggctgtatccggtatgtcaaagataaaattttgaaagcaaatcacaactctccgtcttctcatccacctgaataactgctgtatccggtatgtcaaagataaaattttgaaagcaaatcacaacagcaacgagttacaccctactgaaaaacagctgtatccggtatgtcaaagataaaattttgaaagcaaatcacaactagtgaggattaggggccaacttattaatgctgtatccggtatgtcaaagataaaattttgaaagcaaatcacaactaactttcccggcgttgctgtttataatggctgtatccggtatgtcaaagataaaattttgaaagcaaatcacaacgcgtaccgacacctatctttaatgatgtacgctgtatccggtatgtcaaagataaaattttgaaagcaaatcacaacgaccatactgtgtttgatatcgagacgttgaggcatggatgcggagagagatatgccgggttagttagggaaggaaaggcaccggaagataaaataaatatatatcatatattattgagggtaaaacatataagctaaaataaaaaaaccggtgataaatcaccggtataatggacgatgcggctgcacagaagtacctccccttcgttaggacaaatataaacattttttattaatacaaaaaagatggatatttctgaattcgcaaaaaggtttcctgagaagatgaaggaggtgcaaggttttgttgaatctgatgacatcaaagatattcttggggttgaagcagcgaatcactttaaagagtcgtttgaaaaagaagaatttactgataaagccctacagaaatggcctgatgtgaaaagacgaaatcctaactcgccaagggatggtcactccggcccgacagggaagttctctgaagcaaggacggttgctatgatactaacaggagagacgggagaattgaaaagcgcaataaaatacagatacgcccctaatggggtaacggaatcaaatgaaaagccctatgcagcagtgcaccagttcggctgtatccggtatgttaaagataaaattttgaaagcaaatcacaagggcttaatttgtgttccgaatgtttttatctaataatcagatattgagtcattgttattatacgggaaccacttaccatgccaaaggtctaaataaaacatcaggattcttttatcaaaaaggattgatgaatcaattaacaccccggagagatgaccgtctttatcggcctcggtaaaagattcattaatccttgcgaaaaactcctcatcatcagtacagtgttcaacaaatagcttttctcctccccactataatttgtaatttttgtcagcattttgtggagggctctcttccccatgataatacttgcaaatctttaaaaatttatccattttcattatataaatatttattttcattcttagcttttcgaggtaaaaaatagggttaaggtgactagttgtccggatccctggctgatattcaaagatacaattttaaaaagcaaatcacaaggtgtgtttttataccttttattgcaacaaaagacttataataaacctattgaagcatcaaaaggttatgattgcttaagaagttagcgccttgtaaggcaccaaagcataaagacatgaccagattgcctgacaaaaactcgccaaatggcggaatgaaatcacgccaaattaccgaatgaatggataaatacttatatttgttttataattttagaggattgatgtctatgaaaaattataaaacaagaattgcagactggctgttaaaggagaagcttgaaattatgggagctgtattaattgaaggtccaaaatggtgcggtaaaactacaaccgctgaacaaattgccggctctgttttatatgtagatgagccttccaaaaaagatcagaataagagacttgccaggctaaaccccaaactgttattggagggtgcaactccaagattattggatgaatggcaggaagctcctgaattgtgggatgcagtaaggtttgatgtagatcatagagataacggctttggacaatttatcctgaccgggtcagcagttcctcttaataaagatggtagggataaaattagtcattccggaaccggacgctttgcatggttgacaatgagacctatgtcgctgtttgaatccggggagtcaaatggtactgtaagtttgaagaatgatttgtttaaaggaaatacggatctggcatccatcaacaagcttactttggaggatatagctaaactaatgtgcagaggtggatggccaagggctacaatgattgattctgataatgccctgaaaattgccggagaatatgttacagctatatcaaatattgatatttcaagggtggacaatatcaaacgggatcctgatttcacaaaaaggttgatgagatcttatgcgaggaatcagggcacccagtcttcaattgctacaatatatgcagatatagtaagtcatgatactgaatcattgagcgtagagactgttacttcatatataaacgcactaaagaaactatatgttattgaagatgtgcttgcctggaatccaaatcttcgttccaaaacagctatccgcacatcagacaccctttattatacagatccttccattgcaacagcatctttaggactaggtccgcaagacctgataaacgatataaagactatgggactgattttcgaaactcttgtgataagagacctgagagtttatgcagaagctaacaatggtgtgctgtatcattacagggataaatctggcttggaatgtgatgcggttatttgtcttaggaatggatcgtatggtttgattgagataaaaattggtggagatgatgagatttctgatggaagcaggacattgaaagagcttagcacaaagatagacacagataaaatgaaagcaccaacttttctggcagttgtgacagctgttggagattatgcctacagaagagaaggcggagtatatgtagtccctgtcggatgccttagagcctaacaccttgccacagttttcggcaagtggcataatatcaggacactatcaaaagcatttttttagattctagatggttaccgataattatcggtggctgtcaaaaaaaccacacgcaattaactaacaatcaggtgcttgccgaaaattgtggcaaggactcattaaaattcctaactttaagtaatccctaaaaattaacactatgaaagcgaaaatttcattattagcaatgttgtttttgatttcctgtataactctctcattatcacaagaaatacacagaaatgtattcagacttccacaaactgtttcaggctaccatgttttaaagtgcgatttccatctgcacactgttttttctgatggttcggtctggcctgttgtgagagttgaggaggcatttgcagagggtcttgacgtaattgcaattacagaccatgttgaatatcgccctagaatcaaagagatgggagcaaaggatagtgaagtctcttacaatgctccctataacctggcaaagagtgcagcggcaaaatacggtgtcattcttatcccgggtgttgagataacaaaagaggtgcctccgggacattttaatgcgttgttcataaaagatgctgatccttttgggaaaaatttcgatcctggtaatcccacaagaggttcttttataagaggatctcttggagaagcgagaaaacaggatgcatttattgtatggaatcacccctggtttagaacacataataacacatctatatggttccctctgattgactctctctacaatgaaggatacataaacggagtggaagtggtcaattccaggcgctacgatccggtaattttcagatgggtattggataaaaatcttactaaccttgcaaattccgacacacataatcctactaccctcaatagaacgcttcccaggacaatgacaattgtatttgcaaaagagaggacttctgaaagcataaaggaggcattaaaggagaagaggacaatctcttactgcaatgattcactctacggtgatagtgaacttcttgaggctctgttccataaatcaattgaaattaaaacatatttttcaggcaagaatggttatatctccttttccaacaacacctcccttccttttgagattaaattttcagataccggacgcattaaaatcagtacttattccggagggatcgccatccctgcaaaaggagaggcggctgtattgatttcgaatgactcaattttcgaatcttccaaagagtacataatcggtatcaggattatgaaccttgaaaccgcgccaggagtaccgctgacaacagaactggtggcaaggtgcccccaggtcaaagactccctataattgatttttctcaaaaaaaagactctgtaagatttataaagtatcagatagtttatcatttgccgggactttctttcagagaatttttagcctttgagaaaactgtggaattcccgtcctacgacctggaaaacctgctgaaacaacatgtttcgatctcttcagaaatatcggcaaccgtgaaaattttacctatgtttgagaaatatcttcacaaaggatattaccctttttacaagtcagtttacgaaggatatgatttcagaatacaggaggtaataaggcagataattgaatcggacttgccggctattgaggagattcagtatatcactatctcgaaaattaaaaaaatgttgatgatcctggcagaaaaagttccccacactcccaaaatggttgatctctataaagagcttgagaccaatagagaacatggtttaaaaatgctctacgctttagaaagaggtggccttttggcgctgcttacttcacaagtcaaaagctacagaagtttttccagacccgataagatctatctaaataatacaaacttgatgtattcactatcatcccattcagatatcggcacagtaagagagactttcttttacaatcaacttaatgtaaataatgaagtattgatgcctcccaaaggagatttttttgtaaacagaaaatacctctttgagatagggggacgctccaaaacatttgaacaaataaaagatattcctaatagctatttggcagtagatggcattgagaccgggcatcacaatcgtatcccactgtggcttttcggcctcttatattaaagcttatcttttgtaatagtaagttgatcttttgtgattatgtcaaatattacaggggccggcagtaccagggttgtggtgcggctgaaacgggcaatgttaattccgtaaaaattgccctctgcatcaaacaccgggccgccgcactcatccgattttatattggcatcgtgtgcaaagacttttttaaacccatcgagtctaacgctttttcctccttcaaatttatcggcggagtgtgtgccaaccggccattcaccgggctcgtctattttgagcatagccaaatcgtgctttaccctggtatttgactctttaaaagctatcctgcccaaagttactgttgacacctctgttccatcggggaaaattgcaacatactttttgccgacttgaactccgtgtgcaactgtgaggatatgtccctccttactcaccacaaccccgctgaaatatgaaggaattttcatttttcgaactgtatcataaaggcagatcctcacacttgccgaataccctttttgaatagcattatctacaaaccctttcaacatctgaggctccggattctggccttgggcgtggttgaaactaataagcgctaaaaccatgagcatcagtaacactacctttctattcatctaacaaattctttttgtgacattttctctttgacagtaatattcaacattggtttaattccatctctttaacagcttttaatatggcattgaattcttctgcaaaagaaatctgtatttcaattatttcaaattataccttatatttattgttctatttatgtcaaaaaataatttaatatcggataaatttaatacaatctgtttatgagaaattttcacggagttctttttgcaatagttgcagttttttcatctcttctctttttaaccggtgcttctgctgccgaaacctctgagacacggttactcagattccctgatattaagggcgataaaatagttttctcctatgcgggagatctctatattgttccaacaaatggaggagtggccagaaggcttacctcctcaattggctatgaaatgtttccgaaattctcacctgatggcaagatgatagcttttacaggccagtatgacggtaacactgaggtctttgttatctcatctgagggcggagaaccaagaaggattacttttactgccactctgggcagggacgatataggagaccgtatgggaccaaacaatattgtaatggactggactcctgacggtaagaaaatactctacagaacaagggcatataccttcaatgactttactgggcagcttatgctggtcccggttgaaggagggctctcggagaaggtgcctttgaagaacggaggttttgcaaatttttctcctgatggcaaagagctggcctacaactatatatttagggaattccgcacctggaaaagatatcagggaggaatggctgatgatatccgcatattcaactttgatactaaggagtcaaagaagattactgaaaaccttaaccaagatgtttttccaatgtggtctccagatggcaacaaagtattctatgcatctgacagggacagccatatgaacatttatgagtatgataaaaatagcggaaacacaaggcagataaccaaatacaccgaatacgatgttaagtttccatcggtaggagataactatatagtgtatgaaaacggaggctatattcacaggctggatatgagtaacggaaagtgggagaaggtgactgtaaacattaataacgatattgcctggtctcgcccggagtggaaaaatcttgcgggcagtatcagctctgtttcactttcgccaaatggggagaggttgcttggagtggcacgcggggatattttctccatcccggcaaaggaagggattacatataacctcaccaattcatctggagcgaacgacaagagcgttgactgggcacctgacggaaacggatatgcttatgtaactgataaagacggtgaattcaatatctggtttgttgatgctaagggtaaggagagaagactcacagatgttaagactaacatacttggctttgagtggtcgcctgattcaaagcatattgcctggagcgaaaaaatgaacactctcaatatactcaatgtcgaatcagggaagaatgttgtggtagaaaaatcagacatcagcccgatgaatagctataactggtctcctgacagcaagtatctgacatatacccgcccgggtaaagaggttgattttataatgatttttgacactcaaagcggtgaaaaacatcagataacagatcaatggtacaattcgtcatctcccaatttcagcaaggacggcaagtacctgctattct

SEQ ID NO: 2147 - DNA, 24266 bp, synthetic construct
  misc_feature 1..24266: note = Synthetic
  source 1..24266: mol_type = other DNA
ccctgtgttgccgcccataacattggtatctgcacctagtaggttagaataatcgttgatgtagcctatcaattcagcgtctacaaagttgttattaaaccttgttcctagttcgtagttccagcttctttcttccttttgtccttgttgaattcctggaggcgaaaatcctttgtgaacactactaaatacttttaaaccatcacttattttataaagtaaggatagccctggtatccaagactctactttgttagtcgtagtttttaaatctttacccgttctatctgcatcagaacgcccatagtttatttgtcttagagtgatgttttcatatcttactcccgcagtggcaacaagagctccaaactcttgctgatattgaacataagaggctgtagcattagcatcttctattctattgtcttgagagcctgcacttcctcgtttttttagtgctaaaccttgtgatgtggaaagatattcatcatctgcttgaaaacggtcttggctatcatagtggtatctcgctccaaagcgaaccattcccgttttacctaaatgataatgcccattgaactgaagcccttgtgaaatatagtctctatcgttatgtcttatatagatggtattatctgcattataagctccttttaaagctaacatttcgttagagttatcagccatttctaaagcattagaaagccctactttgttacctccagctttaacatcattcactttgtaccaatttcttgtaacttcatttctataagcatcaaaatttaagtgaagttttttgctaggttctatttgataagatagcaaatattgtcgctgattgatttctatattatctaactctgatgataagtaacgctggtaagcatttttattgaagtcctctttagaaattcccatataggtttcgttagagttttgtttagaagcctgaagcttaaactgaagtttattagggatagccgcattagaattgtcatacaacaactttatcataccatcattaagtgtgaaccccgtgtttttaccatttggaagttctttaaaaccatctgaattattggtaaaatactctaccaagtatccgaatttgccaattttatctcctacatgagtatgcactttataggtgttaaaattaccgtaagaagcatttaaaaactctgaaaatttattaggtacttgagtagaaagcatgttcatactccctccgatggtattgggaccatacatgatttgtccactacttttaagaatttctacaccagccattcttcccatggtagggaagtagtaagccgcaggagctacataaggagcaggtgcagctaaaacaccgtcttccattaaattgatagatgaactcctaagcgaagaagctcctctaataataatgttaggacgcaacccaaaaccttcctcttctactacatgtatccctgttttacccataagtacacggttagcatcagagtagttatatttctgtaattctttagtaccaatatagataaaagaactcgctttttcgttcttatctttattggtaaaaatagtttgagattgaataacaacctcatctatatttctagattttatagaatcagtttcctgagcgaatgaagctactgaaactaacattataagaggtaaaagttgttttttcattacactttatttagaattgttaaaagttttgacaaaggtataatatctgagtaattacacaaaatttatttaggataattctaaataaataaagtttgttatatttaatttgttgaaaatcaatgaatttttgaccaatgatttttgtcatatctttatataacaaaatcgggctatctcacagagatagcccgattttgttatttttaaataaaattattttacttctttgcagtaggttgagatagtttgtttaaagcatctactatctgcatatctatattacctatagctgcaggactagccactttaccatctttatctattaccatagcactcggtaatttaaatccataaataccaaatttatcagcagcttcagaattcataccgtttttagcatacaggctttccacttttaatcctttaaacatagccacttcggtttttttgaactggtcttcagtatcatctagatttatcattaccaaattaaccttacctccatattgagttgcaagttgctttacagaaggagtaagactttcggatacataaggattccaagaagcataaaatactaaaacgcttggtttaccctcatatttagataaactaactttttctcctttattattaactaaatcaacgctaggagctttctgcccaacttcaataccttgtatagcgagtttaactttttctaactctttctttatctggctgtctttaatagatttattaaccacttccattacttgcttaattcttgggtgttgaggttgtaaatcgtattgtgttgcaacgaaagcaattaggtggtctttcgtgtactggtcaatatcttttttaccttctagatatttaacaaaggcttctgtagtagagatttctttgttttgaagcgtattcataaagttggtaaaaccttcttgattcttaatgagcaggtagcttctataagtaggcaaggtttttatccatttcttctcatctccttttagactatcttgatattttgtaaattcagccgaaggcttgaaattagggtttccagtagccgcaccatgcatagccgcatattgttcggtaatcattagaagggttactttcatctcgcttgatttccattctaccacttcggagtctggttttgttttagacttaacctcttctatttttttatctacatctgtttgtatttttttaactgctgcaatgaactctttttcagacttagacataagttgcatatctattttgctcatgtagtcctctatataagattgcatttgagtaaggaattcattgtttttttcgccatctcctaagattttcatttttctaggaaattctgtagcgtcagccgtaattttgatattatctccttttttaagataaataaaattcatctgtcttgcgtaggttattagatagatgccgtcttcctctatttttggcgttgcggaaaaattgcctttagcatctactcctatattcataataggcaacgagctggcactagatacattgatgagttctatcctgtccaaaggagaagcatttttaagcgttcctgaaatttgaacttcatttttagaacaagataccattagaatggtaaaaagtactaacaaaagatattttttcatagatataaatgattatttttttacaatcacaaaggtagttaataaaactcggttaaaaaataagtaaaggaaattaacatttattttaacagaacactatcctgattagtgatttggaatttcaataaaaaagactcaccaaaagtaaattaactattattgtatttgattattttcataaaatatatttttgtagcaattaaggatttaattttatgtttaaaaaatacattttcactataacactgctgttatttgtatgcattgatgcacaagtatataaaaacgattcgttacgcggaagttttacttatctattgaagtctaaacctaataatctttatcctgaaaatctttatcaagagctattttctcttcaggttagtgataatcgctcattttttattagtgaaaatttactaaagtacgattctatttttactagtgagctgaatacagctatgagaagcggctcaaattctattaattttagtggtaagtcatttccaaaaacaaattctaaatttctagtcgtacaagaaaatgataaaactattttttatggaactgtaggaacttctgttctttcttatcaagaacctaaaatcaatagttggaaattagttaatgaaacgaagatagttagctcttttagttgtaaaaaagcagagttaagatttaagggtagagattggattgcttggtactctactgaaattcctttcccttatggaccttataagtttggagggctaccaggtctaattataaaaatgactgacaaaaaagaagagtacgattttgagttagtaaaatcattacccagtcgagatttaaaaggaaagatagtaggtataaacaaaaaacgctatgataattctatatctgttacaaagcaggaattagaggatacgaaagataattttaggaagaacttattacaatcaatgaaaaatgatggtgtagttctctcgcctgaacaaaccaccgcattgagagaaaaacaaaaaagagatgagtcggaaaagaagggatacaatcctattgagttagaagactgatacattattttttataaacctcctcatctagtagtttttggaaataatcttgcaaaagctgtctttgtttttgggtgagttgtgcttctgggtgttgtgctacatagccttttagtggcatttcgtggcgttttatagtttctatacttccttccaaagctcctttttttagatactcattataagtattccacacggagaagttgagatgctttcttccttcgttaatatggtgttttatgctccaagatataggtgcaatgtaggcgtaactagggtatttagtttcgttggaatggcagtcgtaacaagccttttttaaaagcacttctatctctttaggcgtattttccacccttacaaaattatccttttcgtttactggagggttagtgcggtctattgggataagttgtatcagtaacagacctaatataatccacaatgctattttaaatatttttttcattagttttctttattattgttttctgttgcagtttcttgtgtgggcaattcccaatcttctaccaaatcccatagctgtctagcttctattttcttagggaaaacaaagtaatcttcggcaggagtattagtcgctaagtcggcggtatcccaaataccgttactgttattatccactaagattcttatataataagtgctaggtttcagttctgtgaatttatgttctgcttcggtagtttttctactagataatactttgttttgttggtctagaagctctatccaaaagggaacagaaggtttatttttaagccttattgttacagagccatagttttggggcgtgtctgcctcgaactcaaaaacataaggtttagcattagatttatagaaagaacttacactttcttttggaataaataggcggtattttttttctttctgaaaatcactttcaataatgatggtattgggcgaagtttcggctatttttgctttaaaaggttgttgatgagtagaatctacctttagttcccattgttgggtgttgagttcttttaactccatattagctgtaatcttaaatgggtgattgggcggaagtaaatgcccctcattatttttaagagtaaattcttccttaggattggtacgatagaatatctggacggcatcttttttaacttttgtatcgtaactgaatttgaggttagtcccttgggtggagcttaaattttccttttgggcatcaaaccaaacccttacggaatctgaaaacttctgatgagaaactttataatcttgtactagacctgtaatttcctttacatctactttttcgggtttgccttcaaaaaggagaaggagacctccgtctatggcttttatttctttatattttacttcttttttaggtggataaagcgtgagtttaagcccagaaatacctttagtaacattaagttcatctttaataaagcttaaattttctttgcttttatcatataccgagttcatattttcatcatcaaaagcgatgactttatatttgccttgagctaaatactccaactcaaaatagccgtctttatcagctttagtaatgtagtaaggtttttctctaaaattgatgctatccgaagccttataaagccccactactatattagatttagattgagcctcactgttaggcgtagatagagcgttttgtgccgttcctgcaaggtagagactatctaatttttccccagtagaaaaagcaaaattaaaatatggtagaatattaccttcgttgttatctacaatggcattaccaaaattaaagctgtaagtggtattggcttgtagagtatctccccactgtatcaacacatatttattagcaagattagaagggataatcttctttatgtttttaataggtggcgaaataatgagctgcttctgaacatcttttaaattgacatattcgtcaaaatctagtcttaattctcttataagtacaggcactttggttctagaactgtctatattagctcctaaaaaacgaggggctaaagtatccttattgccacctacaggagcacctactctggcacaagagtacattataagactaaggataagcagaaaaaaaacttttttcattttcttttatttaggcaaaagtaaggtttttaaacaagatgaatgcttaaaatatctcttcgtgaaagtcttctattttagaaacttccacaatttttatattgtgttttttctttggtatcttattttgtttagaaacaaatattttatgatagcctagtttttcggcttcggagatgcgtttttctatttgtggcacaggacgaatttctccactaagaccaatttcccctgcaaaacaataatgctccgacactgcaatatcctcgttggaagataagatagcggcaactacagctaaatctagagcggggtcgtccgttttaatacctccagtaatatttaaaaatacatctttagccccaagttgaaagccagagcgtttctccaaaactgccaaaagcatattgagccttttagcatcaaaacccgtagaacttctctgtggtgtaccatacacggctgtacttacgagggcttgtatttctagcaacatagggcggttaccttctagcgttactgccaccgcattacctgaaaactcttcggattttttggtaataagcacttccgaaggatttttaatttctttcaatcccgccgaaatcatctcataaataccaatctccgcagtagaaccaaaacgatttttatttgctcttaaaagtctaaacaaatggtttctatcaccatcaaaattaagaactacatctaccatatgttccaatacttttggtccagctatttgtccatctttagtaatatgtcccactaagaaaacaggcgtgttggtcgcttttgcaaactttataacttctgaagcacattctctaatttgagatactgtgcctggggaactctccatcacctgcgaatgtaaggtttgtatagagtccacaatcataaaatcgggctgaagttttttggcttcgtgtaagattttctctattgaagtttcagtgtataaaaaacaattcggattttggagttccgttagtctatctgctctcattttgatttgagaggcactttcttccccagaaacatagaggatttttttcttcattttaagggctaattgcaatagtagtgtagatttccctatacctggttcgcctccgataagagttaccgaacctaaaacaataccaccacccaaaactctgttaagttcttcgcttggagttttaatgcgttgctcagcttgtgtttctacttctatgatattgatgaggtgttgtcttccaaaatctcctgcataatttttagaggttgttttttctgcaatctcttccactaaagtgttccattgtccacaattttggcattgtccgtgccatttggaatgttgtgaaccacaattctgacaataatatactgtttttaatttagccacttctgaatgtctattaaaaataaaaccgcaatttacaaaataaattttcttaaattagcagagcgtagaatataaatctaaagtcaataaagaatggaagcttttgtaaattcagaaataaaaaatcatattgcacatattacttttgggacgcctaaaagcaactctttgccaaggcatattttagaacaacttgctgaaactattttatccgaaggagcgaaagaagaagtaaaggcaatattacttaaatctcacggagaaaaagcgttttgtgcaggtgcgagctttgatgaattactagagattgataatttagaagcttctaaaagattttttggaggatttgctaaggtactaaatgcaatgaaaaattgtggcaaaatagtagttgtaagagttcagggtaaggttacaggcggtggcgtaggcatcgcttgtgcggcagactattgcttcgcaacaaaagaagctgccttagcacttacagaaatcaatttaggtattggtccattcgttattggtccgtttgtggagcgaaagatagggaaatcacagttttctgcaatgtctctagatacagagtttagaagtgccgaatgggcagaaagaaatcatatctaccatcacatttcggaaaatataacttctatggacgaaaaactagatgcgtttttaaagcagttgtcagaacggagcgcagatgcattggctctcattaaaaaagtatcttgggaaggtacagagcattttgacagcattatgcctgaccgaattctaatgagtgcaagtctagtattagaggctactgcaaaagaaaatatacaaaatattaaagcacgattagctaaaaaataaaaaaagctacctgtctagggtagctttaaatttactataaaaaaggttctgtacattcgttgaactcttttatgagtcttttaaatacttcatctaccgagataatgtcatctatgagagcagaaacttgtcctatttctagttcgccttcgtctaaatcgccttcgaacatacctttcttagctcttgctcttcctaaggcttgtttcagagcttctgtatcccttccattttcataaagtttttctaggtcgtagaagaatttgttttttaatagcctaacgggagcaagttctttcaaagtaagttgagtgtctccctctttagcctccactattttttgtttaaatgcctcatgagaactcgcctctgttgtggctgcaaatctagaaccgatttgtacaccgtctgctccaagtatcatggcagcttttatctgttgtcctgtggcgatgcctcctgcagcaataaggggagtactgatatgttttctcacattagggataaggcagaaagtggtagtctcgtctctgccgttatgtcctccagcttcaaatccttcagcaacaacagcatctacaccagcttcttcacattttattgcaaattttagagaagaaaccacgtgagctacttttataccttctttttgtaaagtttcggtgtaagttttcgggtttcctgctgaggtaaatacgattttaatctgctcttccataatgatgttgatgatttcatctaagttaggataaagcataggaatattaacaccaaaaggcttgttggtggcttttttgcatttttggaggtgttctcttaaaacatcagggtacatacttccggcaccaatcagtccgagaccaccagcattagaaacagcagaagctaaccgccaaccgctatgccataccataccaccttgtatgataggatattgtatattgaaaagatttgaaattctatttttcatattttttatgtttagtcgataaagttacaaaaattgaggttatctattaaattgattttttataggagggcatataacaaaaaacgaggtactgttatcagaccccgtaataaatgttctcacaacggaataatccttattgtgaattgctttcagcgacaaatttagatataaatattataatgacaaaatatttattaactttatacacgaaaataaagattattattgtttaaaaatcaatatattaaaaatgaaaaccatacttggattagacttaggcactaactctatcggttgggcgttggttagagaagcaaaagaaaaggatgagaaatctgaaattattaagttaggcgttcgtgtaaatcctctaacagtagatgaaaaaacaaattttgaagcagggaaacccttatctaccaatgccgatagaacagctaaaagaagtgcaagaagaaatctacagcgctataaactcagaagaaaagatttaatagacttgttgattaaaaatcagttgattgataaagatacatctctaaccgaaattggtaaaaacacgacttaccaaacattagagttaagagccaaggcagcgagagaacgaatagaattagaagatttagcccgtgtgtttttagcaattaataaaaagcgaggctacaaaagcagtagaaaagtaaataatgaagaagaaggacaagcagttgatggtatggctgtagccaaaaagttgtatgatgaaagcttaacaccagggcagtacgcctatgaattgctatcaaaaggtaaaaaatatgtgcctgatttctatcgctcggatttgcaagcggaatttgacagcatttgggaatatcaaaggcagttttactctcatgttcttttaaatgaactgtataaagagttgaaaggaaaaaataaaagtcaaacctgggctatttgtaaagaaccctttgctattgaaggaattaagctctctgaaaaaggtgctgatttgaaactaaaaaaataccaactgcgtgcagaaggtttagctcgaaaattagatttggagttgttagcgattgttttacaggaaatcaatagcgacttaaataaatccagcgggtatttaggagcgatttcagatagaagcaaggaattgtattttaataaagaaaccgtaggcgaaaacctttggaaacaaatacagaaaaatccgcatacttcactaaagaaccaagttttctatcgtcaagattatttagatgaatttgagcaaatttgggaaacacaagctcaatttcacccacaattaacacttgccttgaaggagcaaattcgtgatgtggtcattttttatcaacgaaaattaaaatctcaaaaaggtttactgagtttctgccaatttgaaagttgggaaatagaacgaaaagacgaaaatggcaatgttattctcaataaatccacccaactacccaaaaggcaaacggtaggtcggcgtgtcgctcctaaatcatcacccttgtttcaagagtttaaaatatggcagaatatcaataatttagagatagtaaaaattagtgatagggattcaaaaaataaaaaggaaacagaggagactttaagtgatgatgagcgaaaattattatttgaggaattaaatctaagaggaaatctctcacaaaaagaagtattacagattttaggtttaaaagataaagaatgcaaaacgaattttctagaaggtttggaaggcaaccgaaccaatgtcgctttattcaatatctatcagcaaattgcagagaatgagggctatggatttgattggtctaaaaaatccgctcaagagattaaggaagaattaaaagccgtgttttcacaaataggtattcaggctaatattttagattttaatgcagagttagacggaaaagaatttgaaaatcaagcctcttatcaattgtggcatttgttgtattctgccgaggaagatgataaaatcaacgaagaagaccaaatcatttacgggaactctgcagtcagtttaaaaaagaaactttgtgaaaaatttggctttactcccgaatatgccaaatggatagcgaatgtgtccttgcaagatgattacggaaatttatcaaccaaagcgatgcgtaaaatcattccgtatcttatagacggaaacgattattcggaagcctgtgcattagcagggtataatcattctaatagtttgactaaagaagaaaacgataatagagaattgttggataaattagaacttttacctaaaaacagtttacgcaatcctgtggtggaaaaaatacttaaccaaatggttaatgtagttaatcaagtgattgaaacctatggcaagcctgatgaagtgcgtattgaattagccagagaactgaaaaaaagtgcagaggaacgagctgaaatgaccaaaggcatcaacgaagccacacgaagaaatgaagatattaaaaaactcattactaaagatttcggcattcccaatcctactaaaagcgatgtggttcgttatcgtttatgggaagagttagcacctttagcctataaagatgtttttactggtaaacaaattaaaaaggaagatttattttcatcaaaaatagatatagaacacattattccgaaggcattattatttgatgattctttctctaataaaactttagcttttagggaaaccaatcttaaaaaagcagaccgaacggcttatgattttatagaaagtgattataacacgacgcttgatgattatattcaacgggtagaaacgctttataataacgccaaaggaactatttccaaaggtaaaagaaataaactcttgatgactcaaaaaaatctgcccgatggatttattgaaagagatttgcgtaatagccaatacattgctaaaaaagcaaaggcgatgttacagcaagtatttaaggatgtgaatgttacctctggaagtattaccgatagactgcgtgaagattgggatttaatcaatgtgatgaaagaattgaattttcctaaatacaaagctttagggctgacagagatagaggagcgttatgatatagggcaagaaaaaccaaaaaaagtagaagttattaccgattggacaaaacgaaacgaccataggcatcatgcaatggatgcgctcacggtggcttttacaacccatagtcatgtacagtatcttaataatctaaacacgatacattcattaaagggcgatgaggtggatttggaattgagtaagttatacggacttaaaaacaccattacggaagtggtaaataaaaaacgaaaatttattccgccaatgcctagctttagagaggaagctaaaaagcatatagaaaccattttagtttcgattaaaaataaaaataaggtttacaccaaaaacatcaataaaaccaagaaaaagtcaggtcacaataccaaagaacaactaacgccacgaggacaattgcataaagaaacggtttatgggaaatccaaaagaccgatgaataagcctactaaaatcaataaaaattttagtttagaacaggctcaacttattatcaatgtacaggaaaaagaattggtgctttgtcatttagctcaatttgacaacaacccagcagttgcttttgatacaaaaacactcaaaaaaacaccattacttaaaaatggtgaactcttgaaagaagtgtcgtgttttgaggaaatttttacgatcagaaaagaaattgttggttctaatccaagctcaaaacaaattgttcctgacactaaatcaattaataaaataatcgataaaaacatacaatccatcttgaaaaaacgcctaagtgattttggaggcaataccaaagaagccttttcagatttggataaaaatccgatatggctcaacaaggaaaaaggaatttgcatcaagcgagtaaccattacaggagtaagtaacgccgaagcgctacatcaccaaaaagaccatttaggtaaagaaattttagatgataaaggaaatcctatacctgcggattttgtgagtacaggaaataatcatcatttggcggtatatcttgattcagaaggtaagttacaagacaatatagtttctttttatgaggcagtagtgagaacaagtcaagggttacctgttgttgataaaggattaaataaagatttaggatggaagtttttgttttccttaaaacaaaatgaaatgtttgttttttctaatgatgattttgatataaatgactttgatttattagatgacaataatgcagaattaatcagtaaacatttatacagagttcaagcaatatccaaggttccagtaggcaatagttttgctagagatattattttcaggcatcatatagaaacaactgttgaaagaaaaaaagaattaaaagatatttcttacattcaattaaaaagtttggaagggttaaggaatatcaaaaaagttcgtattaaccatataggcaaaatcgttcaagtgggagaatattaaaaataatggattatgctttatcgttctatctacattggcaatcctgcctaccttaagctcaaagatcagcaaatgaaaatcatttgccctgaaaccaaagtagaaaaaggaagcatccctgtagaagatttaggattattgatgcttgatcattttcaaatcactatttctcatcagctcattcaaaagttgatggggaataatgtggtggttatcagttgcgatgctcatcatctacctcacggcattatgttgcctttgtatggacactccgaatattctgaacgggtgaaatatcagcttgaagccagcgagcctttaaagaaaaacctttggaaacaagttgttgagagtaaaatcaataaccaatcagaagttttaaagcgtttagggaactactacgaacctatgctggagtataaagaacaagtgaaaagtggagatactactaatatggaggggatcgcggcacaacattattggaaatatttgattgcccctgattttttaagagaacgatttggcgattcgcctaatcaattttttaactttggttatgcggtgctgagaagcattgtggcaagagcgatagtagaaacggggctgttgcctgtattagggatttttcataagaataaatataatccttactgcttggcagacgatttaatggaaccttaccgtccgtttgtagattttttggtaatggaatggttagaaaatcaccctgaaagtgaagagttaaccaaagattttaaagcatttatgctaaatatagcgactttagatgtgagaattgaaaataagctaagacctttaatcgtagctgtaaaaacgagtgtagtttctgtttataaatgttataccggagaaaaaagacaaatagttgtacctgagttttatgaagtttaatcgttttaatgcttatagagttatgtgggttatggtgctatatgatttaccaacagaaactaaagcgatgcggaaagcagctcaactttttagaaaacgcttggaggacgatggctttagccttttccaattttccatttatataaggcattgtccaagtcgtgaaaatgcagaagtacacatcaaaagagtaaaatcaatacttcccaagcacggtaaggtggctatcatgagtattacagataaacagtttggagatatagaaattttctttgcgagagctaaagaagaacccaaaccaacctatcagcaattagaacttttttagaaacagaaaaaaaggatttactaaagtaaaaatagacaagaaatagtgaaaaatctaatcctaataaaaagcaaaacccattgaaaaacaacgggtttattttttgaggttgcgaactatcacaaagatagtaattttgaaagcaattcacaacaattaagtgatattgatattgaatcaaaatgttgcgaactatcacaaagatagtaattttgaaagcaattcacaacctgctatcaaaaatgatattgaagagtttagttgcgaactatcacaaagatagtaattttgaaagcaattcacaacccaaatattataatccaggtcagggcgtttgttgcgaactatcacaaagatagtaattttgaaagcaattcacaaccacctttatattgacaaattcacaaaatgcgttgcgaactatcacaaagatagtaattttgaaagcaattcacaactaaattccgttaataatgttaatgttaatagttgcgaactatcacaaagatagtaattttgaaagcaattcacaacctagattatggaaatgaataatacaacgccgttgcgaactatcacaaagataataaaaactgaaagcaatggtttatcatcactagaaaacagatggtttaaatagcttttacctagtaataggtctttttgtttaactctttcatctgttcctttgtccaagaggtatttatatcttctatactcataagattattttaagaagatgtatattactcctgctaaagctaaaataataaatattatttgcgctaaagataaactaaatctaacagttatatcttgctcaaatggttcttttgaaaaaatgtttttaattaattttataaactccttcatttgaaaaaaatatttctaaatttgcttttagtagtaaggaggataaagccccctttgtttcagaataacagaccgaaaagcttctgttttatctcggctttaagtttcgcaacaaacttaaagccttttttgattcttctgaaactgattttgaaatcaaaatctaacttcataaaaagcaaatttaagttgtgaactatcacaaagatagtaaaagttgaaagcaattacaccataagcaaattattgattgtttttggagttagtctaaactattatattttcctctgccttttctagtaaatatcatataaaagatatttaacagggcaatcactcctaaaattagaaacccaagaagtaaagcttttgttttcatactccaaatatataaaataatagcattgggttattacaaagataatgaaaaaagctacttcaattgaagtagctttagtttttaaaataaagtgtttaatgtattattttaaagtaatgttgtctagctgtatagttgtagttacagtagtcgttccagcatattcaaaaatgatgtaaccttttcctgtaataggaatagtaaattccccactgtttacccaatctactgcgtagccattaacatttccttttgagaaagtaaatttagaagtaatatctactaagtctgctttgtttacttctccaccaggagtgtactttgttgtgtaatatactttaagagtctccccagtgtagtagccgtctttcgtttggaaagaaagtttagaagctcctgtaaattcagcaggaacaataaaataagcagttacatttgtgttagatttaaatgaacttatttggatatagttattaccgctaaatgctttttgctcccagaaacgatttccaagtacagagtagttgacgtatttagaatctgcaattctcttgaaattggtagctgtagtaacattatcaaaagtttctgctatacttttgctatatacaggtgcatcaccgcctaaaacatttttagcacttacgaatctatcttgttcaaacttaacatcgtttaaatcacggatgtagaactgccatgtagagttatatttgctaacaactactgtaatgtctccgctcttggtaggtaaagtagttcctgcgaagcgtgcaaacccactgtttctaacgattacagagttgtctagtttatctactaaagttctatcaacggtttggttattaacagcgtccgcataggttaccttaccatcagcttcagcaaactgtacatttttaatagtaactaaagtgttaatatattcatctttcatagcatctgcgatagaatttaccactctaggagtaatagttttaatatccatggtattaccaccacaaacgccagtaatgaagtttctcatgttaccttctggtatttgcccagtagggtttacatatcctaatttaacaacacctctgtctatacctacagaaagaccattagctttaactcttacatgagatcccactggatagtctgtgtatagaaaagttttattgatagccacttggatacctgcagtagggttttctgggctgtcttgtatggttagttgtttgtagaagttaccaccttcgtcagaagaaactacatatccttcaaagattacgggagcatcatctgttccattaggaacaacatagttacttacaaagttaacaggagttggtgctaatgctttaaaatctttaatggtaatattagcttcagcaaactgattgctgcattggattgcaggtgtgtcaaatttgtcatcttgcacgcaagaagttaatgctccaaaaccagataaagctattaacgaaatttttaagtatgttgttgttttcatttttattgtattaaaattgttaaaaataaaatttagaatcttacctgtaggttgataaaatagtttctaccttgagtaaagaaatatctaggtgcaaaattaggatactctctatcgtagtctcttctaaagtctgcaaagtttacatttcttgtctgttcaaaaccaccagtagcatacttggtattgtcaagcacattgtttacggtagcactaataagcacataatatttacctaacatccaagacttaccagcgttgatattgaagaagtaagctacaggaagtttaacttgagcgcttactcttctatattcttgctcagatataccagcgtaaggcgttcctgttgcagggttgttaacaaagaaatcggaacgaattaaaggtgaagggtcaaggaagttattgccaagatagttccagttagcacctacccaccaatactttggagaactatattttatacctaaagagtaagcctcttgaggagtacctccttgtctaaagtttttaatataagaagttccgtaactagtgtataacttaccgttagggaatagtccaaccgcatctgaagcaaaatacacttcaggattgttagtgtaaatgtacttaccgtagtttgcgataccattaacagtaattgttggagtaactttaacctctatgcctaactcaccacccatgtttctacggtttacattagacattacttgggttacaaatgcacttctagcactagtagcattaccttcgctatctacaccatctagcttgattccgtcagcaaagaaacgttgtacattagtgtcattttgagtgtcaataaggaatgctgttgctctcactttaacaaaaggagatgataccatatagctaatatcattagcggctactacagcacttctaatgttaggtgcaatggcactattagctcttgcattgatgaataaattgtttaggtaaggagcctgagaatagtaagcaccgttatacactaagaaatgtctaccgtctaacttgtagattaattgaccttttagaccaaagttccaataatcgtggttttcagactttcctaatgcatttttgtaaaggtaatggttgaaatgcccctctctgctattagtaatgtgtgcagcgagtgcagatacaaaaacatcaaagttacctgcactaaactttagagctggatttattttggtttcttgtcttcggaaggtataatcgtagccaattttatctcctacttttttatgagtattttcttcaccttcgttgaataaacctgaaagtttaggctggttagtagcagcaaaaggatctccgttaagagcgtattgtgctcctaacaaatctttcacttctctgtattggtctgatgaataatttctgtaagaagcgttgatgaatagctgcgtcttatcagaaaaattatgaacaaagtgagttcctacattccaaactttgtcatcattaacatcatttactaggaagtaaacagcttgctctctgtttctattagcaagataaagtctatcccagtttatttgagtgtagttttggtcgttactttcccatctgtttttagttatatccagctgagctatatcggacgcagtaggattagctaaccctgcgaagtagctaggaagatttctgtaatatagaggtgatgggttctgagcgttgtaccagtctaatctggacaccttatctttaccaaattggtaagaaacagtagtccaaagttgagatttactgcttattttccagtaatctgtaagttgtaatataggctggaatccttgtcttactctttcacttctcttttcgccatcttgccatccccagaaagcattgtaatgtacgccattataatctattacctcttgggtattagggctagcagtacttctacggtaaggagagcctattaagtttaaggtaagtgtatgtttgtcatttacttttttctcaattcctaggtaagctccgtaagcatcatagaaagtaccttcttgtataccttcctgtgcccatcttctagctcccattatggtaaaagcccaaccttttttattcattccagaagaatatcttaaggaagttctgttacgatagtttctgttggtaagggattgggtaaattggaaccctttgcggtattcacttgctttcatatttttgtagaccacagagccaatacctccgaaagcgtattcagaaggggagtggtttactgcaatttcagggtatcttgtaatttcattaagaccgccccagttgccataatctacattaccattatcagcattttccatagagataccattcatcataacctcacttcttctaccgtctatacccctaggtctgaaccaatagaaacctaaatcaaaagcagcaatattactaaacacatctctagaagattgtaatagtcctaatgtcgcttgtgaggaagattcgtccatattgctattgtcatctagcaatactactcctaattccgaatttttaaggttagaaaaaagagtaataatccccaagtcttttcttttttcattttcaaaaacatcaaactctaggactttggtttcgtagttaggttgagttactaccatttggtaatgtccaggttttaaatctacaaattggaaatatccaattttgtctgcctttacatcgtcattggcttctcttaggtcggctactgcattttcaatgggttttccatcggcatctttcacatacgcatagactgtggtttgtgcatagtaataagatgcaggcaataaacagaacatagagactaatgataatttcttaatcataacattcttatttttagtttttgaataagttgattattcaatccacaaaattaacccatttttttggtaaattttaacagaattaagaatttttaatatgtgatttttatcacgattgaataaataagccattggataaggggtttatcgatgttggtgtcttatgcgatgttaattaaaattaattttaatctactgttcgcctcaaaatcactaactttgctttgatattaaaacttaaaaaataaatgaagatgaaaaagatattctctttattagtattgggacttttttttactggtttttctcaaactggaaagttgaaaagaatggcaactgtggggttctataatgtagaaaacctttgggacaccattcagtctgcagattatatagacggaacgctagctcctaatcaccctcgtttccatagaagtataccactagattcggtaaagtatttggagcgtgaggattatcgaggtgagtggtcggattctaaacttataggtaaaaaagtggtacgttttcaaggttcttcggacgaatttacgccgaagagtgctaaaaactataactcaagtatttacaatcaaaaattagctaatgctgctagagttatttctgagctaggagcttcggttactaagaccgctccagtagtggtggggcttcttgaggtggagaatcgccaagtagtggaagatttggtaaaacaaccagcgttaaagaaatttgattatggagtaattcattataattcctatgattacagggggatagatgtagcacttatttatcagaaaagaagattcagccctacttatagcactaaaaaagaactcaaaatatacaatgaggaaggaaagagagaatatactcgtgatttgttggtggtttccggatatttagacggagagaaagttgctttttttgtcaatcactggccgtctagaagaggaggtgaagccgtttctcttcctaaaagaaatgctgcggctcagttgctaagagtacagatggatagtgtaagggctttagatgctaataccaaattggtagctatgggagattttaatgatgatcccattagtagtagtttgaagaattacttaaaagcagtaggaagtaccaaagagctaagcccagaatatccttatctaaacttaatgtatcctttgtataagaagggagtggcgtctttagcatatcgcgatgctcctaacttgttcgaccaaattatagtttctgaaaatttggttagtccaaaagatgcttcttattctatttttagaacggaagtttatgcacctgcttatcttatcaacaaggaaggtagttttaaagggtatccattccgctcttggaatggggataaatttacaggaggatatagcgatcactttcctgtgtttacaatactttacaaggaagttaattagagtacttatcttataaataaataagaggttgtcttagtttagggcaacctctttttttgttttcataaaaactattatctttaaggactaaaaaaataggaaacctatggatttgcaattcaataaaaatgaagatttaaaccgattgaaactttcagaaatcaatcagttattagctaaaataaagaaaggagggggagaaaaacgcttagaaaaactcagaagtgaaggtaaaatgacggctagagagcgtatagattacctcttagatgataataaagatagcatagagataggggctttcgcagggtttgaaatgtatgaagaacacggggggtgtcctagtgctggtgtagtggttaagatagggtacatttctggtaagcagtgtattgtagtggctaatgatgcttcggtaaaggctggagcgtggtttccaattacgggtaagaaaaatcttagagctcaagaaattgcgatggaaaaccgtttgcctattatctatttggtagattcggcaggagtttatctgcctatgcaagacgaaattttccctgataaagagcatttcggaaggatatttagaaataatgccaaaatgagtgctatggggattatccaaatttctgcagtgatggggagctgtgttgcaggaggggcgtatttgcctattatgagcgatgaagcgatgattgtagataaaacaggttctatatttttagcgggaagttacctagtaaaagcagcgataggagaaagtatagataacgaaactttgggaggagctactacgcattgttctatttctggagttaccgactacaaagctaaagatgataaagatgccttggatagaattaaaaacataatgaaatctatcggagattttgaaaaggcaggatttgaccgaacggaaagttttttaccgaaagaaaatcctgaaaatatatttggaattatacctgcggctaggtcagagcagtacgatacttacgagattataaaatgtctagtggacaaatcggagtatgaggaatataaaccagattatggtaaatctattatatgtgctacggcaagaatagatggctggagtgtggggattgtggctaaccaaaggaaactggtaaaaagcggtaagggagaaatgcagtttgggggtgttatctattccgattcggcggacaaagcaacccgatttattgcaaactgtaaccaaaggaaaatcccgttagtgtttttacaagatgtaacgggctttatggtggggtctaaatcagagcacggtggcattataaaagatggtgctaaaatggtaaatgcggtgtctaattctgtggtgcctaagtttaccattattacaggtaattcgtatggggcaggtaactatgctatgtgcggtaaggcttacgatcctcgccttatcgtggcttggccttgggcagaccttgcggtaatgggaggtgctcaagcggctaaagtattagcacaaatacaagaagctacacttagaaagaaaggtaaggaaattactgaagaagaccgaaacgaaattttacaagaaatatctaaaaaatatcaaaaacaaactgaagctacttatgcagctgcaaggttgtggacagatgctatcattagtccgttagatactcgaaaatggatttctatggggatagaggcagctaatcattcgcctattacagagaaatttaatttaggggttattca

SEQ ID NO: 2148 - DNA, 24266 bp, synthetic construct
  misc_feature 1..24266: note = Synthetic
  source 1..24266: mol_type = other DNA
  variation 19275..19289: note = n is a, c, g, or t
tgcagccctttatctattttcagttttaatgttgttttaatagttttccgatgactccataataaaatgcgggatagggattcatcatccatgagtgtttttaaggatggtaaaatttgattttcatgggtttggtttttatatatttgcaagtattaaaacttatacaatgaggtttatagtgtttcttttattattggttaccttccatttcgtttattcgcaagaaaatacccatgaaatttttagaaaccttaagaatggagcaatattggtgcgattaccaaataatacgataactataaaagccattgaagaaaggaacttgttgttgcaaaaaaaggcagaaggaattgataaaatcaatcataacaaagaataccaaaaactattgaaaaccattgatagcaacataaaattattgaataaaattgttacagaaagggaatataaacataaaattatcatcgagtcgttttcaaacaatttttccttttgtcctgtatattatttttattcaaatgattctagagaaattaaaaacaagaatttcaaaggtcatatatttaatgcaaataaagaatttattgataccataaatttatcggataattatttgatagcggaatttggagaaactaatgaagacactacaaaaataaaacttcgtaaaacaaaaagctacgacttttatggacaccccaatgagcgtctagaaagaaatgatgaaacaggttacattgaatatgttgattattattattcttcaaccggtatggaaggtggagttgatgccttggttttattatccccagagtttattcaaattcaaagaccttatccacattatgttagaaccttcgaaaggttaccctttattaaccgaagttatgaggagacagtattgaggcttcaacacaagattgttaaatataccttagaaggtgttctgttttagcatcttgttataaatatccccctattatttaggcaattcaaatgtagccagcttaaaattcggaaggaaaatgaattgcagaaattaaccgatttgcctcatatcgctgaatgatgaaaaatgtgatttctaaattgctgatattgatcgaaataagcaatccatctctaatctcttccagttttttaaatgtaatttcgtggtctgtcatttttttaaattactgccaactcatgaatataccgatttctttaattcatcacggctttgatttaaaactagttcttgaaaaaaatggctgtcagaggttgatcgttttttacttgctatttccccaccggaatcacctgatttgctgatttccctgttttgaaaaactccgctatattggcaaaggtagtttcggcaatattgtgtaccgcttctttggtaaaaaaggcctgatgcgccgtaatcagcacgttaggaaaggtctgtagcctaacaaaagtgtcatcttgaattactttctccgataagtcttcaaaaaacagcgcctcttcctcctcatatacatcaagggctaaattacctacttttcccttttttagcccttcaatcaccgcattggaatcaattaatgggccacggctggtattcactatcatcaccccgggtttcatggcggcaatggcatattcgttaatcatgtggtaggtttcgtaagttaacggacaatgtaacgaaataatatcgcactgctggtaaagtttaggcagttccacatattcaatacccaggtttttcaattcttcattcggatatttatcgtaggccagtattcggaccccaaaacccttgatgagctggcaaaaaacctgcccaatctttccggttccaataatgccaatggttttttgatgcagatcgaaccccatcaacccatcgagggcaaaattaccatcacgcacccggtggtaggctttgtgaagtttccggttaagtgcaagaatgaggcccaaggtatgttcagccacagcatagggcgaatatgccggaacccggaccacggcgatatctagttcctgtgccttttcaatatccacattattaaatccggcacaacgcaatgcaataagttttatcccttgtgtttttaatatttcaagggttttagcatcaactttatcgttcacaaaggcacatacaacctcatgtccggcggcaagtggagccgtttttttatcgagccgggcttcaaaatatgaaggttcaaaggagtggtttttgtttacctcgtcgaatgcctgaataacccagtttttggtactaaaaaccgctattttaggtgattgattttgcatagaatagaattataatagtttattttaacatgaatgctatgaaacacctgtaaaaatagaatgtttataggaaaagctccatgcgaaaagtaaaaagttaagatgcaccctttcttcaattaattaggtggtaaaacctcaccttgtaaatatgaagggcaaacttttttcttctttcagaaatccccatctttacataaattttaaaattttgaattatgaacctttttgaaaccatcaacaacgatattaaatcggctatgttggccaaagaaaaagagaaactggaagctttacgtgccgtaaaagcagcctttttattggctaaaagtgaaaagggggccgccgatgaactttcgtcggaaaccgaaattaagatcattcaaaaattggtgaaacagaggaaggaatcggccgaggtttataaaaccaataaccggatggacttgtacgaaaaagaggtttttgaagcgtccgtgattgaaaaataccttccccagcaactttcggaagatgagattgtggctcaattaaaaactattgtggctcagattggggctaaaggccctcaggacatggggaaagtaatgggcttggctaccaaacattttgccggaaaagccgaaggaaaagtagtggctgaaaaggttaaacaggttttggcaggtttgtaacctttccaagaattatcgcatgccctttcagatatttgaaagaggaaaccatctgatgttggatttatattttcgttaaaaaccctcgcgtaatggaaaaacttacattaaccactccggcactgctgttttcggcggtttcgttgattttactggcctacaccaaccgttttttggcctatgcccagattgtacgaaacctttacgccgaatacaaaaaggggaaagattatgtattgatcgatcagattaaaaacctgcggaaacggctatatctgaccagggcaatgcaaatctttggggttcttagcttgttttttagcatgatttccatgctctttttgtacatcaattttcccatccttggtgccgatttttttgggttgggcttgctttgtatgattatttcgctggcactttcggtttgggaaatccagatttcggtaaaagccctcgaaatgcacctgaaagatatggaggaataattagttgctaaatccaataaaataacattcatgacccttacttcgtttattggctttttagcagccatccttaccaccagcgcgtttatcccccaggcatacaaaaccatccggacccggaacaccaaagggttgtcgcttttcatgtaccttattttttcagtaggggtggccttgtggctggtttatggaattagtattggtgattacccggtaatggttgccaatgcggtgacactggtttttgccttggttatcctggcttttaagctacggtacaagtaacgtccatttcctaaaaacacctatctgcatggaacctaatctttttcggattcaaaaaaaccgggcgaaatggttttgtcataaaataataaagtcataatcctacggatcgggttaagattctgtaactttacctgttttatgatgtaaatatgggtaaaagtttaaaagtcctcgtagcctattattttagccagatggatctttttgaacattatttgaaaaagattcagaagaatggcaagcgttcccagtatcaccaactgcggatttcggtaaaaaacttacgggcgatgcaccagctttttttattggccggagtacccgatgttgccataaaacccattgaaacctcgttgaaaagaatttataaatcatcggggctgctacgcgacatacagaccaaccaacagcttgttctgcaatggagtcaacatgaggctttaaaacaggattatcatcagttccttcagcaagcaaagaaaactcaaaagatcaaggtactcaggaaagcctctaaattcgacacgaatattttggccgaccatgttcacgatttaaataaaatattgctgcggcttccgaatgccgaagcatcggcagccacctccaggtttttggaagaacggtttttgctggtctcgaagctgaatcaatcattaggtagtgaccaatcggtacatctgattcgtaaatacctgaaggagatgaaaactattgttgagatgtccaaaactctggatttgaaaatgggtaaaggatttaaaacaaaattagtacaagtggataaagaaattggccagtggcacgatttagtggttttccgcgattcgctgctcgggtttcaaccttccgatgttatggctgaagctgaaaaagaggaggttttaaagcggatagttaccgtgcaacagcagtttactcaagagctaccggcaaaggttttacctgttctggaggcatccaatattaaagatactgcgaaaaaccaaggtgatcaaaactagtcatcgggtgaattcataattcatcggttaccctattgtatctgcttgtaatttcagcaaaaacatttattggacgacttcttagagtggactcagcattgaaataaaaaaccggctttaaaccggttttatcattatctctttgctttataattggtacctgtaaaggtcttttttcttggttgctgtgtgtgttgtgtaggttttttgtgttgtgtaggttttgacacaaattccctgttttctttcagtttaattccttcgggcactttcaaccggtttctggaaagcatcactaaatcgttaaaaatcaactcatcgctcaccgtttcgcggttccagttcaagaatgattttttcatcaggttcagaattacctcaatcaggtagtctttttcttctccatcgggataggtaattgctttatcaatcatatcttccaaaacccttccgtagtgtttgaaacggatatcgtcgggatgttggtattttaaacgatcgggttttttgaaaatctgttcgcgcgtgggggtgggatagggggaatccacatccaattcaaaatcggaaataatggccaggtgatcccacagtttatgcttaaagtcagccacgtcgcgcaggtgcggattcatggttcccataatctgaatgatggccttggccaaccggttgcgttcctcgcggtcctccaccgtttttacatggtttaccatccgctggatattgcggccatattccggtaaaaccaaacctcttcgtgacgtattgtaatccatttatttaaaaatttttacaaaattagtttaattattggggtaaacaaacaatcgcttattttaccgtgcgtaaccgggcaaacttgagtatcagctttttttcgcccagtttctcaaaaaaaatcagagccttccggtcaccgccttcgccttcaatcagtataacacgcccggtgccaaattgttgatgctctacctgcattcctgttttgatgctctccggcggatcgggtacaaagctttgggaactgttagtattcatctgttgcagtttgcgctgcgcggccaggttcatccccggtcgcgaaggtttgataaaggcactgccccgttctttaaacgatatttcctgagaactgtccgttacaaagtcgctcatccctttttttgaaaacagcgattttgttttaagaaattgcggatcaatttcgttaataaaccggctgggtgaggttgaggtaggcgatccgtatttgtatcggctttttgcaaaagagagggttacccgttgttcggcgcgggtgagggctacataaaacaaccggcgttcttcttccagttcgtgaggggaatacacactcatagccgatgggaacagttcctcttccattcccacaatatacacgtgagggaattccaaccctttggcagagtggatggtcattaatgtgaccttgttccggtcgtcggctttttcgttgtcctgatcggtataaagtgccacattttctaaaaagaattccagttgtaccggcctgccctcctgataattggagcttacaaagtcgcggataccgttcaacagttcttccacgttctcgtatttcgaccgttcttcaacggtggtaccgttgtgcagttctttcatcagccccgattcggtggccacctgttgggtcagcaaataggcatcgtggttgggtttcaggtcaataaatttttcaataaactcccggaatccctgaattttgttcaaagttcctttatttaattcgactccaaacttttccggggtttttactatctgccagatactcaggttgtgatacgatgcggcctcttccagtttccccagggtagtatcgccaattccccgggtcggatagttgatgatgcgttttaacgcctccgaatcgtcggggtttaccaccatcctcaggtaagcaatcaggtccttgatctctttgcgttggtaaaacgacaggcctccataaattttatacgggatgttccgtttgcgcagggcctcttcaaaaatacggctttgggcattggtgcggtaaagaatggcaaaatcatcgtagcgcagctggtgtcgggttatctggtcaaagatgctgccaaccaccaaatacccctcctcgttatcggtaaaggcatcaatgagctgaatcaattccccctcactgttttcggaatagacctctttgggtatctgccgctcgttctttttaatcaagctgttggctgcatttacaatggtctgggtcgaacggtagttttgttccagtttgaacaggttgtgccccgggtaatcgtttttaaagttcaggatgttttcaattttggctccccggaacgaatagatactttgggcatcgtcgcccaccacacagatgttaaggtgctgctgggccagctttttaataatcaggtattgcgaaaagttggtatcctgatactcgtccaccaggatgtacctgaatttttgctggtacttgtccaatatcgtaggatgatcgcggaacaggatgttggtaaacaacaacaagtcgtcaaaatccatagcccccgactgcctgcagcgggcggcataaatctcataaatccgggccaattcaggtcgtttggttccccggtcttcttccaaaaaggctgcattgcctttgtaagcggcggctgtaaacaggttgttttttgcattcgagatgcggcttaaaacccccgatggcttataaacagcatcgtcgagctttaactccttgatgatggatttaatgaggcttttggaatcggtggtatcgtagatggtaaacgaggatgggaaacccagcttctccgattcagtgcgcagtatccggctaaagatggaatggaaggttcccatccacaaggaatgggccgattcgcttcccaccagcaggccaatacgttccgtcatctcgcgggcggctttgttggtaaaggtaagcgccagaatattccagggggcaacaccggtggccatcaggtgggctatccggtaggtaagcacccgggtttttcccgagccggctccggcaatcaccaaactggggccctctttttgaagaaccgcttcccgttgtgcctcgtttaactgtgccagataattgtgcattggtttaaaaaattagcctacaaaagtaggtaaatacatgctgccataaaagataaaattgggggaagccgtgaatattttataatattgtaccctggtttttagttatcattgacacagcttatttttattgaatcgatgaagcatatttttataactcacatccttttattactgttttttccccatgtatggaaagctcaagcccagataaaggtagtaaatgcaaatacatctacccccaccaactataaaaacggcagtattttaggtaccgactccatttttgtgatttactcccccgatgccaatggaaaggaaattgaagcatctatgcaggtatattatggtcctgagggaatcaataattttacctggtaccgattcaatgccacaacggacctgttcgattctatttttaccgaaacatctgttacaatttcaaattttactaccgataaacagggagggtatcaggtgcgggtgtacaacaacgaacttactgtagataccctgttccatgcatggttatttatagaactcttccagattgagggcatcctgatcacctcttccacctgtgaaaccatgactttgaatgccgataccaacttcaactcaacttttacctattacgatttggtggattttaccccgttggtttttaccaatgcggttcaatttgcctgggccctcgatccggattataccaccctgacggcgaatgcaaaacccacttttgaggcacctgtggaaccggtatcttttaccttaaccatgtccgatgttttgaaattccagcggaaatacctgttaaatattgatgaagagaccaccaataaattcaacgacaaattgttgattgccgtaaaggccgattttaaagggcaaagcgccaacgaaaccgaacctgcagatactaccgttcatcccgaagctccacatggggtggttttttttaacgaaaccaaaaacggcgatgagtttgaatggtacttttacaaccatccccggtggatggccgacgaaggtgacaccctgctgaccacctccagcctgtttgaacccctggactcaatttattacttgcatcctgcccgcaaagaggatattaagcccgggtacgatgtcaagctttttgcctgggggccggtttataacgaagctgaggacaggtgtttagataccctgcggaaaccggattttgtgattgtggataccacccagttcccaaacacttatacctccttgcccaatgtatttacccctggtgaagatgatttcaataaaaccttttattatctcgagggctccgccgaagacaacctgcccgttaaatccattaaatacttctccattaaaatttacaaccgttggggcaacaaggtttacgactacgaggacagcgacggctcctggaccgaagatggcgttcagggctgggacgggcgcacccgttttgggggcatggcccgacccggggtgtattattacgtaatcctggccgagggctgggatggccgtaccttcaaagtcccggggtatgtacatgtgttttgataacacttggattctgcaagccacggggtgactaataaaacaccgattgtctgccttcaatgtatcaaattaagtcaccccgtgactttcaacggttcccacgatgacttgctgattcaagggaacctctgaaattctttcaattcaaacctctttattttccggtgtactgccgggagattccccttttttacaccaactgttttattacaggtttcggcagccacccggaacctttttgctaaaaaaacacctgagctaaaccgttcaacttataattaattttgtatattcgtggtaccgatgcaggcttggtacctggatatcgctgttggatagccttaatcagtttttgaagcaataaaaaagccccgtattgaaagacgaggcggcttaaatgttttcacaacggaataatccttattgtgatttgcttcaaaatgtaaaacgaaagtaagatgaataaatgaataaacaaaatatttttaaccattgacaatcggggcgtgataccaagccgcgccccgattaacaaaaaaacacaaccgatatgaaaaaaattttagggcttgatttgggacccaactccattgggtgggctttggtaaatgaagctgaaaatgaaaacgagaagtcttctattatcaaaattggctctcgtgtaattcattacggtgacaatttggttaaagttgataaatcaggaaaaatatctgcttcaatgacacccgaagaggatttttcaagtggtaaaggtttatcccccaatgcaggaagaactaagcaaagaagcgcaagaagaaatttacaacgttacaaacaacgaaggaataacctgattgaaatcctaaaagcacattcattaattgataataattttattttttcggaagaggggaatgagacaacattcaaaacctataaaaacagggcacttgcagctacaaatgaaatttcattagaggattttattaaagtcctttttatgattaacaaaaaacgaggatataaaagcagccgaaaagcaaaaggtgacgaagatggacaattaatcgacgggatggctattgcaattcaattatatgagcataatcaaactccgggacaattcgtctataaccttttaaaaaatggaaagaagaacattccggacttttatcgttccgatttacaaaccgagtttgaccgtatatggaattttcagaaagcatttcaccaagaaagcttaagtgatggcatttgtgaaaagctagttggacaaaagaaaaatgtaacatctgccattttgtttaaagaattcaaaatagaatcgttggaaataaaagggaaatgggatgagaagcgtttctttagatatgaattgcgcaataaagctgtacaacaagaactaaagcttaatgagatagccgaatgccttgttgaaattaatggcgagataagtaattccagcggatatttaggagctataagtgaccgaagcaaagaactggtctttcaaaaaatcacagtcggtcaatatttatataaacagatagcggctaatcctaataccagtttaaaaaaacagattttttaccgtcaggattatctggatgagttcaatactttatgggaaacgcaagcaaaatatcataaggagttaaccgatgaacttaaaacccaaatcagagatgtaattattttttatcaaagaaggttgaaatcgcaaaaagggttaattagtttttgtgaatttgaaagtaagcagattgaagtttttgttgatggtaaaaagtcaataaaaacaaggggtatgcgtgttatacccaaatcatccccactatttcaggaatttaaaatttggcaaatactcaacaatattgaaattaccgatttaaaaaccaaagaatccagagaactaacagacgacgaacggcaattactattcgaggaactgaatatcaggcccaaaatatcgaaaaaggaagcattaaagatattaacggaaaaacctgctcaatacgacttaaactataaagatatagaaggaaataaaaccaatgccaaattttatgaagcttacaataaaatcatccatctttcggggcacgatgaaatcgactttaccgataaaacttcggatataaatgagtacctgaaacagatattcagtttactgggaataaaaccagagatacttgactttgattcatcgttaaaagatgaagattttgaaaaacaattacattttcaattgtggcatttgctctattcatttgaaggcgataacacaaaaacaggcgatgaaaaattattacaaaagctcaatacaaaatttggctttccggttgaatatgcaaaagttatttccaatatagccctgcccgacgattatggtagtttaagtgctaaggctatacgtaaaatattgccgcatttaaaagatggcttctcgtatggtggccgaaaaagcaggcctgatgaaccaagtgcctgcgaatatgcaggataccgccattcaaaagcatcgctgactaaagacgaaaaagagaataaaacatataaagacaaattagaaatattacccaagaacagcctgaggaacccgattgtagagaaaatccttaatcaaaccataaatgtggtaaatgcagttatcggcgattatggcaaacccgacgaaatacgattggaactggcccgggaactaaaaaagagtgctgaagagcgacaggatgcaaccgattctatttctaaagccacagcaaaacatgaaaaataccgcaaagttttgcaaacagaatttgggttaaaacatatcagccgaaacgatttaattcgatataaactttaccttgagctaaagaataacggctttaaaactttatattcagatacctatattgctccatatgaaatattttccaagaaattcgatattgagcacatcttacccaaagcaaaactatttgatgattcgttttcaaataaaacattggaattaaaatcggtgaatcttaaaaagggggatatgaccgcctacgattttgtaaaagaagaatacggaacggaaggtttggccaaatatgaacaacgggtacaagacctgttcctgaataaaaaaagaaatgaagatttggatcaggaaaatgaaagccgaattacggatgaaaaaataagcaaaacaaaacgggacaaactcctgatgcctgaaaacaaaatcccaaccgggttcatcgaccgcgaactgagagattcacaatacattgcaaaaaaagccaaaaccatgatggaagacatttgcaaagatgtagttaccaccaccggcagtgtaaccgaccggttaagggaagattggcaactgattgacattatgcaggaattaaactggcctaaatatgcagcattgggtttaaccgaagaatttaccaacgaagaaggtaatgttatcagaaaaataaaagactggacaaagcgcaacgaccaccgccaccatgcaatggatgccatcactattgcatttaccaaacgcagtcacattcagtatttaaataatttaagtgcccgtagcgataaaagcagtagcatatatgggatagaacaaaaagaattataccgcgataaaaacaataaattgaggtttgcaccccctattccgataaatgaattcagggccgaggcaaaaatgcaattggaaaacacgttaatttcgattaaagcacaaaacaaagttgtcactaaaaataaaaacaaaatttcaggacaaaagaaacttcaggaaacccttacccctagaggacaactgcatcttgaaactatttatggaaaaataaatcaataccaaacagccgaaataaaagtaggtggaacgcttgactcggaattaataaataaagtggcaaacaaaaaaacaagggaagctttacttaatcgacttgccgaattcggtaatgaccctaaaaaagcttttacagtcaaaaacaccatcgataaaaatccgatttaccttgataaacaccaatcgtataaaatacctgagaaagtaaaaatagtttggcaagaacctgtttacaccatccgtaaaagcattacccccgatttgaaactagataaaatcattgacccaaagatcaaagccctattggagtcacgattaaaagaatgtaatggcgacgcaaaactggctttctctaatcttgctgaaaaccctatttggctcaataaagaaaaagggattcaaattaagagagtaaccattacaggtattagcaatgcagcatcattacacgataaaaaagacctcaacggaaaacctattcttgatgaaaaagggaataaaatttctgttgattttgtaaacaccggcaacaatcatcatgtagcaatttataaagatgaaaatggtaatctccatgataatgtggttacattttttgaagctgttgaacgggtgaaccaaaacttaccagttgtagataaactattcaaacaaaaagaagggtggcaattcttattcaccatgaaacaaaacgaatattttgtttttcccaatgaaataacagcttttaatcccaatgaatttgacttacttaatcctgacaactattatttaattagtcccaatttatttagagttcaaacaatgtcaaaagttatgtacggtaataatactttaagagactataaatttagacatcatttagaaactactcttcaagacataaaagaattacgcgatattgtcttcaagcaatttaaaagtttatcaatttttgataaaatagtaaaagttcggattaatcatttaggtaaaattgtaaaaaccggggaatattaaattattccacccataaactctaaccccccaaccccactcagggcttggcttaaagtcaagccctgagtgattacaaccatccccaattcattgttttccagaaaaaaccacccaaaagtttgcgtatattaaaataacgggctatattagttaccgttttaataaatagttaaccaaacagacgatagcccgttcattacaagcggtcccgcacacagatagatttgcagggttgatagtacatttaggaggctttgggcttcagatgttcgccacattccgacggtagtttacttatatatgccggttttttaattattaaccttaatttttattgtatgtcaaattacatttcagcatccattccggatgaaagcaaagtaaaagcccttgagctcatttcgcaacttaaggccctgttcccgttcgggataaaactgtcgaacgagcagcgcaaaaccatgaccaaaattgacgatgcccgggtgccttttaccgaaaaggcgttacagtacgggaaacaggaaccgaggattgtccccccttacaccgatctcgatgagttaacccgcgacttaaacctgtataaaggattaagccagatagaaaaggaactgcttagcctcaccgaaaccattgtagatacccgcatagccgcaggggcggatgcctatcaggcttcgttaagtatttatagctcttcaaaaggggcagcaaagatgggggtccccggtacccaatcaattgttgaggacctaaaaaaggtttttgaaagccaggggataaaaccagttaaagaggcggtcaaagggtaattcaaaggcaatctctggcaggcacccacctgcgggaacaagagcccggcaaggggggaggggggtacttccgtagtaccccctcctgctttaaaggtaacacatcggtgctttctgttggcacagtttaataccttagggcacgggtttacaaaaaaggtgcatccggtgtcccttttggcaaccccggttaccaatttaccgggtgctgttaccttttacctgaccccggttgccaatttatagagtgcggttaccttttaagaaagccagcgttccgtttccggcaccccggtttgtttttagtcacctgaaccggttattttgaatgaccagtcggagtgcgacttaaagtcgcgccccgactaataaccaacaaaaacaaaacgatgcacttcgaaaataaccacctgtaccatatctttaaccagggcaacaaccaccagcgcattttttttagcgatgaaaactatttgttttttatcgaaaagatgcgggttcaccttctcccttattgcgatattctggcctggtgcctgctacctaatcattttcacctgatgacaaaagtaaaccaggttgagctaccagttgctacggatactcacggggtgactttgagtcaccccgtgagtagaaaccggacactaaacgacagtattgcgattatgctccgctcatatacccgcgccattaataaacaggaacaacggtcaggagctctttttcgcgaatccaccaaagccgaatgtctcgattgtagtaaaggaatcacaccctcattttataattccaggatgggtactcaaatacacattcacaatcctgaaaaatcttacccccaggtgtgtttcaactacatccaccaaaacccggtaaaggcgcatttagtaaacagggatgaaaactggccctggtcatcgtaccgcgatgtaacaggattaaggaatggaacattgataaaccgggagttgataaaagaacttgatttacttacctattcatccgatgactcaaagtcatcggatgaataattgagtcatcagatgaataaactaagaaaaaccaaaccctatgattaaacgcacgctttattttgggaaccccgcttacctgcatctgaaggataagcaactggtggtaaaactgcccgaggtggaaaaaaacaatacgctgcccgatggttttaaaaaggagtccaccgccaccatccccatcgaggatattggcgtggcagtgattgaccatccgcagataacccttacccacgggctgctggaggcgctgctcgacaacaatacggcggttatcacctgtaattcgagccgcctgccggtggggctgctgttgcccctggcggggaattccatccaaaacgagcggttcagggcacagctcgatgcatcggagccgctcaaaaagcaattgtgggcgcaaaccgtatcgcaaaaaattaaaaaccaggcagccttgttacagatgcggaacctgcctgccgaataccttatccctttatataaaaatgtaaaaagcggcgataccgataactgcgaggctaccgcggcagcctggtactggcagaccatcttccccggtattgccgggttccgccgacaccgcgaagggccgccgcccaaccattacctgaattacgggtatgccattttgcgggccatcatggcccgtagcctggtaggggcggggctgttgcctaccctgggcatctttcaccacaaccggtacaatgcctattgcctggccgacgacctgatggaaccctaccgcccctatgtggataaggtggtttgccaaatcatcgataaactgggcattcaggaggaactgaccaaagaaataaaggcggaactattgatcattccggccatggatgtgaccctgggtgacgaaaagagcccactgatggtggctacccagcgcacagcggtgagcctggtgaaatgcttcgagggcggacagcgtaaattggtgtaccctgaactttaacctttaatcaccccgtgacttaaagtcacggggtgattaagacactaaaaatcaaaccaagatgaacaccgaacgattaaacgcctaccgcattatgtggaccatagtattgtacgacctgcccaccgacaccaaaaaggagcgcaaagctgcagcccgtttccgtaaagacctgttgcaggacgggttcagcatgttccagttcagcgcctatgtgcgccattgttcaagcagcgaaaatgccgaagttcataaacgccgggttaaaaagagcctgcccgagtttggcaaagtgggcattttgcagattaccgataagcagtttgggcagatggagatattctatggcgagaaacccatggaaaaagaggccatcccgcagcaactggagcttttttaatgtgataagtcagggaatgggcggggccgcagtgtgcgccccaaagctgtgcctccatgaacagggtatttgggaccaggtattaacaagtcatccgatggcttgcggatacaaggcataatctttattgtcgctaaatcatcatgataccagaacctgctaaaatagaggcattaaaatccaatcaatcctatttattttatggaggtcgatagataactgcataacacaaaatgattagaagtaacctattcccccctctggccaaaaggccatttactcgctatcgctcatgagaacactcacttcgttcatttagttccccagggggagaactgccccgttgtaattttttgtagtctttgtgccagcacccatgaatctctaaatcagagaaagttcccgcttatgcgggatgcccacaggacggaggagaagatggcgaaatagatatgcaattaactacttacctctgttattttatataagggccggatttatttgcctgtggaccggtcctcaatagagcggatgaacaatctgaacggtagattgttgaagggacttcaacttaacccggcttttatgaagagagtaaggccctgtttgttcatcaccctggttgcatttagtttcaatgcatgtaatgtaaccaacaacctatacgtaaacaaccccgtacctcacggaaaagggaatggtgatgtatatttaggtcttggaacaggcatcgagcccaaaattgattcaatttcagccgatggcggtattaactcgtcgggggggacttctatggcccctgttttatcatttggcgggcagtttggtgtttcaaaacaaatggacgtaagggctgccattcatttgccatacgtgataggtggttttggccttcgggtaggggcacaatacagtttctttgatgcttcatcgcgtttcaatgctgcatttggtaccgatatagcctttaacctggcaaaagattccatcactttgtttgggtcaacatcatcgctcgataccaaaagtaaaggagccataaccggcgacttttttctgcccctttcggtaaaaatagacggtaactttagtattatccttactccccgttatagctcgaacgtgttttttatcttaaaaaacgggaactcggacaaaatcaaccatgtacagctttactacccggcattgaccctgggaatccggatagctgatttttacatggagtcaacagccgtttattaccacaattccttttatccgcatttaggggtgttgtgggtttttccgtccggttctgaagatgaatagtacggagatcccccaatgaagtaattcaccggttggccggaattgtgatttgccttcaaaatgtatcttcggcttactgataaacgggaagaagtttgcaagtatttaaaatatttaaagttggagataatattatgggcggacttcaatttgttgtggcttgttttcaaaatgtatctttgacttactgataaacaacgtacataacgtttagtataaccgaagttgggttgtgatttgctttcaaaatgtatctttgacttactgataaacaactaaaccttcgcaatatctggtcaatagtcagttgtgatttgctttcaaaatgtatctttgacttactgataaacaactttaggtaaattacgaataaacagcagctgttgtgatttgctttcaaaatgtatctttgacttactgataaacaacttttctttttgcgcatctggtctgatttaagttgtgatttgctttcaaannnnnnnnnnnnnnnttttattatttcacgctcccgttgtgatttgctttcaaaatgtatctttgacttactgataaacaacccgcacacgttgcgccactcgtacgcaaccgttgtgatttgctttcaaaatgtatctttgacttactgataaacaacttttctttttgcgcatctggtctgatttaagttgtgatttgctttcaaaatgtatctttgacttactgataaacaacatgtgaatcaggctagtatactctatgtttgttgtgatttgctttcaaaatgtatctttgacttactgataaacaaccaataccgcctccgtaataattcccgcagtgttgtgatttgctttcaaaatgtatctttgacttactgataaacaacaaccattcaaaaatttgccgactttctttggttgtgatttgctttcaaaatgtatctttgacttactgataaacaactccttcaggctttttaattttgtaaaaaacgttgtgatttgctttcaaaatgtatctttgacttactgataaacaacgcttttaaaaatgtggctttcgtccatccggttgtgatttgctttcaaaatgtatctttgacttactgataaacaacatccacgccccactcgttttgcttgcggttgttgtgatttgctttcaaaatgtatctttgacttactgataaacaacaagtcgtctgattctaggctacagcgtgctgttgtgatttgctttcaaaatgtatctttgacttactgataaacaactcagaagaactaagttcacgtctataccacgttgtgatttgctttcaaaatgtatctttgacttactgataaacaacctaattcaaaatgaggtaaatcccaacctgttgtgatttgctttcaaaatgtatctttgacttactgataaacaaccaagtaactcatttacttttacgctatcatgttgtgatttgctttcaaaatgtatctttgacttactgataaacaaccgtttatttcggctttatacttgcaattgtgttgtgatttgctttcaaaatgtatctttgacttactgataaacaactattacctacttacccagatgcttttgattgttgtgatttgctttcaaaatgtatctttgacttactgataaacaacaacttcgaaaaaatcttcggaaccccttgtgttgtgatttgctttcaaaatgtatctttgacttactgataaacaaccctttctttttaaacaacaaacaaatatatgttgtgatttgctttcaaaatgtatctttgacttactgataaacaaccttgcaaatattctgaaggtgcagatagctgttgtgatttgctttcaaaatgtatctttgacttactgataaacaactattcttaattcgggaggaaccattgttgtgttgtgatttgctttcaaaatgtatctttgacttactgataaacaaccatccgcctaagcggatgcattcgtgtatagttgtgatttgctttcaaaatgtatctttgacttactgataaacaactaaacaaagctgatttagtagcttcggcgggttgtgatttgctttcaaaatgtatctttgacttactgataaacaacgcaatcgctggtactattgccgcttggagtgttgtgatttgctttcaaaatgtatctttgacttactgataaacaactatctatcaatcagtggtggggtggagcaatgttgtgatttgctttcaaaatgtatctttgacttactgataaacaaccttcaaaaccttttgtcaactccctctctgagttgtgatttgctttcaaaatgtatctttgacttactgataaacaacgataggttttttatatccagatgcggataggttgtgatttgctttcaaaatgtatctttgacttactgataaacaaccaattgctttgaacatttcctaaagttgctggttgtgatttgctttcaaaatgtatctttgacttactgataaacaaccatatctgggcaaggtgccagtattatcaagggtttatcggtaattttcaataaaaaaatcaggttgtttatcgaacaaaatccggtcgctggccggattttttaattctatttcatcacatatacttagcggcgcactgatacataaggtgccctggatttgatccacagtagtttgtcaaaataaattccctctgcttttgctcttaccatttccctaaaatgtattattttagttgtccatataaaaaaactgaaatggatgttgtaattatcgttattgggctgttgtactttctggggcactatctgtcccatttttttcaacgcaccatgattcccgatgtgttggtacttattctcattggtatggtgatagggccggtattccattgggctactcctgaaaatttcggaatggtagggaacgtgtttaccagcattgcccttattgtcatcctttttgaagggggattgagcctggagctttcctctatctcgcactcaatgaaaacctcgtcaatcctcaccttgctattctttgcaattactgccttaattgtagcaaccgtgctgtattccgtgttacatttcccagttatggtctcgcttattaccgggtttattttgggagggacctcctcggcggtggtgcttcccctggtaagtgctttaaaaatgggggacaaaccttcaaccattcttattttggaatcagctttaacggatgttttgtgtattgtttttgtcattgggtttttaaacgggtatcaaaccggggaagtagaacccggtaaaattgttggagggttgatttcttcactggttctggcatccgtaataggaattatcagtgcatacgtgtggttgcgattactcaaatgggtgcgtcagtttcccaatacccagtttaccacttttgcgtttatgtttgtggtatatggtttggccgaatattttggatttagcggtgctattgcctctctggcttttggaattatattgggaaattacgacaaaataagtattcccatggtgaattctacccggttgccgtttggcatcattaccgaggtggagaaaagcctgtaccgtgagattgttttccttctaaagctttactttttcatctatctgggactttccattccttttcacaattggaacagcatttgggtggcagctctcgtggttggtttgatttatttagcccgtttggtgactacccggttcttaatccgggaaaattttccgtggaacgataaagccatgatttccgtgatggtccccaaaggccttgctgctgctgtattggccggactccctttgcaatatggtattgagcagggggagcaaatcagggctataacctattatgtggtacttatcagcatattggccacctcggttctgatacctttgattaagaatacttttgtgggtaaagtgtatcaagtaattttcagggagaaaagaggatcagaacatgtaaatgcagccaatccaattaaggaataaaataggtgcaacttatagatttccaggtcgaaaataccctgtgtttcgttcgggtatcaggtatcttgatactgacagcttgatacttttagccatcatctagcctacaatcttcccgtcctgcatggtaacggtgcggtcgctcattttggccagggccatgtcgtgggttacaatcacaaaggtttgctggaatttatcgcgcagggcaaaaaatagctggtgcagctcttctttgttttgggtatcgaggttgcccgaaggttcgtcggcaaggatgacttcggggctgttgattaacgcccgtgccacggctacccgctgctgctcacctcccgacagttctttgggtttgtggcccaggcggtgccccaggcttaaaaagtcgaggatttccctggccttttgttcggtagccttccggttctggctggcaatcaaagccgggatcatcacattttccatggctgtaaattcgggcagcagttggtggttctgaaagacaaaccccaggttttggttccggaatttcgacagtgctttttcgcgcaggcggctcacttcggttccgttgatggtaatggttccccggtcggcattgagcagggtcccgatgatttgcagcagggtggttttacctgcaccgctttttcctacaatggctacaatttcagctttcgtaatggtcaggtcgatacctttcaatacttcaaccgtaccgtaatttttatggatgttttcaatttgtatcattgtaggtctgttttgagagcaaatatagaaaattaaccgtattgccacctataggtgtaagcatcaatacatcgaaacgggaataaaaaaacagcccggttttttgccgggctgcctgtcagattacgaactaagtctattgatttttttgtgcctttttaagcgtatcaaacattaccgtagaagcaaccgctactgatgagtaggtacccacaaagataccaatcaacatggcaaagataaatccccggataacctcaccaccaaaaataaacattaccaaaagaaccaataaagtagtaccggcagtaatcatggtacggcttaaggtgctgttcatggcggcattgatggtttggaaacttgtccatttagggtgcaacccaaagaattcgcggatacggtcataaacaaccaccgtgtcgttgattgaataaccaactactgttagtatggatgctataaatgcctggtcgattgacatggagaaaggcatgacatctttaaacagggaatatacaccaagaataaagatgacgtcgtgggctaatgaagcaatagcccctagtccaaactgccatgtacggaacctgataacaatgtagaggaagatgaccatcaaggcaaagatgaccgacaggactgctgaagttttaatgtcgctggcaatggttggccccactttttcagaactcatccggtaattttcaga

SEQ ID NO: 2149 - DNA, 24266 bp, synthetic construct
  source 1..24266: mol_type = other DNA
  misc_feature 1..24266: note = Synthetic
tcttcacttctgtgagcttgcgcttgtcggcttttgtgaagtaagagcggtcgaaatcgccctccatggtctttgtcttgcccaagaatttcttttccagaatcttgtgttctttcagctccttgttgcttccgcaaacatagtagcagatgttgagttcgtcggtgaccttgtcggcacgctgtgtctctgcgttgcgctcctctgtcacggtcgacacttgtgtgttcaaatcttccacattcttgttcaaatctgagattttcacattcgcatctgccaatgctgcctcaagctgctgaattttttgcgactgctcatcaatgagttgcttctgcgactctatggttttctgcaattttgcagaatatccgtttgagcttttcaacttgctctcaagttcctccagcgcctgcttgcgtgcgtcaagctcctgacggagggcgttgatgttggctatgatttcctgacgcttgtcgggagtgtccttgaaatcgccgctcacaaggatgttttccatacggttcacctcgagaaggttctggctgatgtcgccaataaggttcatcaagctgtcgcgctgtccctcaactttcgagatgtcgggttgcgtagtgtcggcaatagcgtctttttgctctttgttgccgttgcatgccacgagcgcacctgtaagcgcaagggcgagaatcatcatcttcttcatagtaaattctgttttttttcggttttaaaatgtgcgtacttatctcttttgccggcgcttttttcttctttcttgcccgacactactataacaatctctcctcgcggttcgttcacggaaaaatgttcacaaagttcagaaagggtgccgcggcaggtctcttcgtgcagttttgagatttcgcggctgacgcttgcctctcggtcctggccaaaagcttctgccaactgtgtcagggttttaaccaagcggagcggcgattcgtagaacacgattgtgcgaggctctacgctcagttcggcaaggcgtgtggaacggccttttttttgtggcaaaaatccctcaaagcagaatttgtcgcatggcaggccgctgtcgacaagcgcgggaacaaaggccgtggcgccgggaaggcactccactttaacgcccacacgacggcattcgcgcacaagcataaaaccggggtcggagatggccggagtaccggcatccgacacaagggctatgcgctctccgcctttcaaacgctgggctatgcctgccgccgtctcatgctcgttgaatttatgatggctctgcatacgcgtctcgatgccgaaatgcttcatcagcactccgctggtgcgtgtgtcctcggcaagaataacgtctacttccttgagcacgttcaccgctctgacggtcatatcgtcaaggttgcctaccggcgtcggcaccacatagagtatgccggcttccgctgtgggtttctgtgccatcgctatagaaaatgattttttattatcgccataaattctttcacgtcgtccgactcgcgatcccatccaagatcgccatagaaataatcttccgcctcgtcaaacgaatgcattgcctccaccatatggagagcgtcggtcatctctgcggcactgttgccgaaaagttcgcgacggaaacggaatgtgtcgttgagcgagaacgctgatttaaggtctttcgaacggctgcgctgcagtttttcgtcaagacgcagaggctcgctgtcgccggatgccttttcattcgcttccggctcttcttctatattatcctcattatcctctgcctcgacgtcttctgtttcatccgcaacgttcgatgtctccgcgtcgggttctgcggtgggttcatcgtcaagcacgagctcgaccataggctcctgctcattgtcatattcgccgtcggcaacttgctcggccgtcacttccgccacgtcttcctccggctctggttccggctcttcgctttcaggcgcgtccgccaccggctcttcgcttccggcatcggcctcgtcgttctccaccatacaggtgtcttcctgcgtttcttcgccctcatcgccttctctttctccaagcagcatctgcaacctgtcgagcttctctcctattgccgtaaacacatattccggagtgtcggcgccacgattgtcggcgaggagcagaagtccctcgagttcgtaagcctcggcaatcatttttcttatgtcggttttcataattgaggagtattttgtcgtttgtcaatagtgtcctgatacgattcaaacattcccaccatcaaccgttctatcgatgatttcagttgttcgtaggcgcagtggaaattgtttgtaagcagcactacggagtagcgcggacgctcggcggggtaatagcctgcatagcatctcacgccggtcatgctgcccgacttcaatgcgatgtttcccgacaggcacgtgccttttagcaggttgcgcaccgttccgtcaacgccgcatcgtggcagcaatgtcgggaaaaggtcgccggtctgccagtcgagtgcggccgagcgcagcacgcttgccagaaacagaggtgtcatccggtttgtgcggctcaatccgctgccgtcatagagagtcaccttgtccatgttgatgccccattgttctactatcttggtcactgccttctcgccatactcacgctgcggatcgccgtagatgctctcgcccaatttgcgctgcaccgactcggcatacatgttgtcgctgcggaaaagcaacgatttcagaatctctggcagcaccggcgactcgtacgacaggatttgcatggcatcgctgtcgcttgcactcaccttctttccttcaacagggatgccctcgctctcgagtgtctctctcacatcggcacacaaacctacggctggatgcggcatcgtggtgaccacttctataggctcctgcatgcggcgcatagctccgctaagcgtgattcggctgttgtttttcttgcgttgcacgatagggctgaatctgccgcgattcaccactgtcatccggttgtctatctgtatcgaacgtagatgcggcacggtgtcgaccacaagggcgcggccgctcgatgtgtcgataatcagcgagaacagattgtcgttgtagtttatcgaatgcactcccgcaccatagtcttccgtcacgtcggcgtcgagccaatctttgggcacggcgttgtgcggctgtatcttttcctccgagcggacgttgcctttgatagcttttatgccccacagtttgatgttttcaacagcggcggagacaaaggtttcgcggtcggggaaatgcttggagtcaagcgtcgggtcaatgccgccctcgatgacaatgtcgccgttgagcgttccgtttttgtcgatagtgcctgtatatttcagacgcgtgcggaaatggaagttctgggtgagctgcttcaacgctgccgacgatgtgacaattttcatcaccgacgccggtatcatttgccgctcaagattatatgatgccacaggggtgcctgtacgcaaatccatgacacaaatacccaccgttgctcccgacatggcacggctcgacacaaactgcctgatggctgaatccattttcacagaaagcgagtcgacggtggtgtcgacaacgctgtctgacgccgtcacggctttcatcggttgtctgtcggcaaatccgacagacagcagtaagattatcagaatgatatgcttaatccgcttcatttttattttcttttcccattattttaacattcaaagttaaacataaatcccatgaattggcggtgtgtgctgacttcttttaccgaattaacattgtttaaccagtcactgttgtcgtgtaactattcagcgatggcactgcacccttaatccacgattgaaatatacagcaaaaaaactataaaaagacaaaataaagagtctgtatttcttgcgtatgtgagatatttttcgcacctttatgcctatgaaagagcaagttgcggatatatcaaaagtgctgcaagacataacagcagagatgaggttgatgcgtgaaaccatcgatcagcaatatgctgagattgccaaactgaaccgtaacatagaagctcttaatcgtcaaatacgcaagaaggacgagacaatcgccaaaagaaatgcacagcctgccattgagaaaatcaaggaatatatcatgtcgtcaagcgttgtcggtttcgacgagagcggatgctattgcaacaagcgtcttgactgggcatggatagcgcagactgtttattacaccttgctctttcgggctgatggcagaagttcaaaagtgttggcggacaagtttggcgacagtctggaacgaatgacagccgtaacagaccgccatagcgcatactttgcgcttcatttcctgaaccatcaagtttgccttgcgcatttgctgcgagagttgcagtatctgtcagaactgaacgacaagcagggttggtccgacaagatagcaagcttgttccgtgaagccatacatgagaggaactcgaacccatctgcgataatacccaaggcatcgtggctggaacgcttagacaacctgctcaaactgaatatctgcaattttggcaagaagtttgaaacattcaaaaagggtctgataaaatgccgtgactacatcttcaatttccttaaagatccaatgataccatctgacaacaatggaagtgagcgtggaatacgtaagttgaaaatcaagttgaagaactcctgtacattccgctccgacttaggaacagacgcatttctctaattacattcaatcgttgaaactgccaagaaacacaacaaaactccgttcaatgcaattcaagccttattcggggcttgacggcttgtcatgccctatcgctgaatagttacatttgatttgagacagcttaatcttcctcaattatgaaaaaagtgatttaattttgcgaaaacgacatgatttgacgtttttaagtgccaactttgcaatatgaatcaaaatatggggcggctaatccgctatatactcataattaacaagctctcaggcaagggaagatacattccggctgacgaactgatacaatatcttaacatacagatggaagtccgtggttatgatattggcataagcctacgcacactccagcgagacttcaaggatattgaggaaatgtttgatattgtaatcaagaaaaagagggatattggttactacatagtagatacctacgaatcacccacttgcgactacaatagcttactgatgaatttcgatcttcttacatccgtcagttacgaatcccggtcggcaggatatattctgccagagcatcaccgccctaagggaagcgacaatatgccgcttcttattgcgtcgattaaaaattgcagtgttgtctcattcgactattgtcttgtaagaaaaggctgccgattaattcataagaaagtaaagccacattttcttaaagagtcattgggcttgtggtatctactcgcactcgatgagaatgggaagctgaaatgttatggcattgaccggatcagcaatcttgaagaatcagaagagaaatttgaacgtgattccaatattgaaatcggaacactgttcaatcatagctatggaatttgggatgacccctcaattcctgtcgaatatgtcgagctgtcatactcaccactggacgggagttttctgaaagcaatgccactgcatacttctcagcaaatccttatagacaatgaggatgagttcagaataagcctgaacataaagataactaacgattttgtaatggctttgctttcccgaagcacatcactgacggttatcaagcccgaaagcctgcgcaatcgggtggcggaaatttaccataacgcgttaaaacgaaactcataaatcatatcaacatgaatgaaatcaatgaatataccgaaatcggcttcgatggcttcgtaaaagtaagcgaccttagaaataccaattcagcaataccgtctgccgaaggcgtgtatatcgtggtacgccgtgacgaaaaaggtccggagtttcttgccgttggcaccggaggacatttcaagggcaagaatccgaatgtggcaatcgagattcttaaagacaaagttgtcaaagggagtcaggtcatgtatataggcaaggctaccgaccttcggaaacgtatcagtcaacttctaagattcggtgccggggcgaatgtgggccattggggcggcaggtatttgtggcaactgtctgatgccgataatcttctagtggcctggaaagaaacaccgggcgaaaatcctgaacaagtggaaaagattatgctcgccgagtatcataaccgtcatggtgcattgccattcgcaaacctcaaaatataagtccctatgagaagtttctcgtcacttgttcatgatgcccttttcccatcgacaagggtctatcatgatgaaaacggtaattatcgtggtacaagtacggatatcacaccttggatgttgctccttggtcgtatatgggggatactcctttggctctatataatcctgatgcctcttctcgctccggtgtattttgttttcgcccattggttctgtagaaaatacgatgcggaatttacaaaagaagaccccaaaggatggcccagtgagaagaaagaaatattgaaaaatcaccgtaatatactgattggctggattatatttatggtatggggatatttctctgactggggaggtgatgatttgccatacaaatacactcaaccaagtgaaacatggaaagaatcaacatggaatccggaacatccggaattatatgaagacccatataaagaatacaaaaattacaagtaaataattatcaatatgacagaacgcaattcaaagacagtttttaccggtgaggaactaaggaaaataatatccttagtctccgaacttgaaaattccgagcgtaacaaacagaagggcatcagacaacgaatccgcaacatcggcctttattggaaggaggttggtcgtggaatgtcctatacagtttccaatttacaacgattatttgaagatggcactctttcccttgacgataaaacaatggatgagttgtccaagataaaggcagactcttccgacaatcagtcgaaagcatcggagaacgcgtcactgcgattccctgtggaaatgaaagggaggaaaaagtctgatgaatactatattatcgatttatgcgacgagattcttgggctgacagctttacgtcaatatcggtttgactttttacgtggtgaccgtggtactccacttccggtggatgcgtattatccagacctgaaactggtaattgaatataacgagagccagcatacggtttccactccattttttgacaacagacttactgtgagtggagtgtcgcgaggtgaacaacgacgtatctatgacatgcgccgtagagaggtgttgccaaaacatggaatcaaattggtaacaatatcatattctgactttggagccacaaagaggttggctcgtgaaaaaatagacgatatgactgttatcagaaatatactctatgatgctggtatcataaataaatagagaacaatttgcaacctcaataatccgtaactattcagcgatggcactgcacccttaatctacgattgaaatatacagcagaaagacctataaaaagacaaaataaagtgtctatatttcttgcgtatgtgagatatttttagtacctttatacctatgaaagagcaagttgcggatatatcaaaaaatccgcccacacaagcgaaagacgccgaccccattgtggagccggcgtctttcgcttgtctttcttcgcgttgtactacctattcgagcaccaaagtggcgcgtgcggggaacgacatgtgcggagcgacggtcacggtctcgccggtaatcacgtcgcggaaggtgtcaccagtacgcatgatttcggcatatcgactcatgtcaacatcggtgagaggctcatcggtgccgttcatcagcacgatgaagcggcggtcaccgctggtgcgctcatagacgtagagctggttggacggcatgaaatggcgcaaagtgcctgccgacacggctttgttgccttgtcgccaatggagcagacggctcatgaagttgaacgcttcgcgctgaagatgggtacgcccgtcggcggtaaacaccgatacgctgtcgccggggaatccgcctggcatgtcgaggcgcacatagccgtcggtcaccgccttgctgccgtgcatcagcacttctgtgccatagtatatctgagggatgccgcgggtggtcagaagaaacgcctgtgcctgtttccaacgggcgaggtccgacggctcctcaacgaggaatcggtcggtgtcgtgattgtcatagaacgtaagcaatcggctgcagtcggcataaagcatgtcaagcgcaaggtggttaaacaggcggttgagtccgtcgcttcctgattttgtctgttctccaaacgcttgctgcgccatcaagcacaacgggaaatccattaccgttggcaattctgtattgactgggttcaacttgttgccgcgttgcatatacgcaatgctcgcctcgttttcaagccagctttcgccaacgatgttgaaccgcggatactcgcgtgccacggcgcggttccaacgcgccatagcctccatgtcggcatacggataggtgtccatgcggatgccgttgattccggcatactcaatccaccagatagagttttggataagatatgtcatcaagtgggggttgcgctgattgaggtcgggcatacccgacacaaaccatccgtcgacggtgtgcttgaagtcgtattggctcacatacggatcatgcaccgcgttaagccggaagttggtgagcagcaacgagtcgacggcggcatttctcttgcctgtcaaatttgcctgctgcacgcttctgatgccgtcggctgtcggctgggcattgagccagtcgtggctgggaaggtcgtagagccacggatggtagagtccgcagtggttgaaaatcatgtccatcaccaccttgatgccgcggctgtggcattctgaaatcaagcggcggtagtcgtcgttgcttccgaagcgcggatccacacggtaatagtcggtggtggcataaccgtgatagcagccaccgggcatatcgttctcaagcacaggagtgagccacactgccgtgacgcccagttcctcaagatagtcgagatggtcggagatgcccttcagcgtgccgccgtggcgcgcgcccgggttcgtccggtctatgcggtagtcgaaattggtagactgatgcttcacgtcgccgccgtcggcaaagcggtcgggcatcatcaggtaaagcacgtcggaagagtcgaaaccctcgtgacttgccccgtcgccctgacgggcaagcagttcatattgcttcttgattttgcgcttgccgctggcaaacgtgatgtcgacagttccaggtttggcgtcgctgccgatggtgagatacagaaactgataattcgggctgtcgagacgcgccacggagtcaagtttcacgccaggacagtcgaccgacggcacagcgtcgcgtatgccctcgcccgtaaccattatctgcagctgctggttttccatccctgtccaccacatcggtgggtccatacggtcgacagttgtttttgcgccggccgtcattgcgccggccaaaagaagtccggctacaagaaagatttttttcatcataggtaattgagtttttgtttttccgccataaatttacgacttatttgccatgtaaatcacatttttgtgcatttttatgccctatttgcaactttttggctttacccctatcccttttcaattaataaaaaaacgcctgcagcatttaccgcaggcgcatccaccgttttaaggctgatggaaattcctaatgttttcacaacggagccaggctccttattgtgatttgcttaaaattctaccgcaaatttggcacttttcaacgacttttccaactttttttcaaaaaaaattactaccttgcaaacaaaaaaacaataacattgaaaacacccgattagttatgaaacttatatttggttttgaccttggctccacaagcattggatgggccgttgtccaagaaaaagaaaacgatacagaagcgtcaagaatcttaaaacttggcgtccgcgtaaatcctttaacaaccgatgaaaaaacaaacttcgaaaaaggaaaaccaatcacgaccaatgcaaacaggagattggcccacggcatgaggctgaacctttccagatacaagcagagaaggaaagagcttataaaaagtttaatacgattcaaattcatatctcctgacaccgttctctgcgagaatggctcaaacaccacgtttgaaacacttcgcctgcgcgcaaaagccgcaaccgaagaaatcactcttgaagaattgtcacgtgtactattgatgataaacaaaaagcgtggatataaaagcaacaggaaagctcaaccaaacgacaatggggctattgacaacatagacattgcaaagaaattgtatcaaagtcacttaaccccaggagagtatgtattcaacaatctaaaacaagggattcaatacattcctcctttttatcgttccgacctaatcaacgaattcaataaaatagttgactgccagacgcaattctaccctcacctaaagaatatcgacacaggctctcttctaaaagccaaaaactgcgacatcattttagacggacaagatgtgcaacgcatcaagcaaaaaggcagcccttcagagaaaaagagagaactgtattgtttaagagcgcaagctgcaacgcaacaaatcaggcttgaagaattggctttagtcctggaaaaaatcagctctgaaatcagaaattcaagtggatacctcggggacatcagcgaccggagcaaggagctgtttatcaacaatcaaacaatcggtcagtacctgatgtctcaattggacagaaatccgaacaacaaactgaaaggacaagtcttctaccgtcaggactatgaggatgaattcaaccgtatttgggaaacccaggcaagatttcataaagaactgactccagaaaggctacacataatcagagacatcattatatttttccaacgcgacctgaaatctcaaaaaagcaacattgccatttgtgaatttgagaaacagaagaaggaaataactgtcgacggcaaaaagaaaattattgaattcggcccaaaagtatgcccaaaatcatcgccaattttccaagaattcaaaatttggcaaactatcaacaaccttaagatttcaaatatttacggtgaagagctcagtctctcctccgatgagcggcaaatccttttcgaagagctgtcaattcggaagaaactaacctgcgctgagattctaaaattattacacaaagattccaaatgctccttgaattacaaagagattcaaggcaacgccacaatttctgccatttttgacgcattcaaggaaataattctgcaaagcggacacgacaacaacaacttcaataaggcatcttttaaagacacaatgcttataatcgagcctattttcaagatgttggggataaatactgacatcctgtctttagattgtcctaccgacagtcattccttaaagacatgccctatttatcaactgtggcatctgctttattcttacgccggcgacaattccaaaaccggagactcttctttgatcaagaaattgcaaagaagatacggattcagcaaggaatacgcatcaattatgtcgaaaatatctttcgacaacgactacggtaatctaagtgcaaaagccataatgcgcatacttccacacttgcgaaatggattgcaatacagcgacgcctgcaatgctgccggatacaaccactcaaaacggtcgcttacaaaacaggacattctcaacaaagtcttagtcagccagattgacttgctgccacgcaattctctgcgccagcctgtcgttgaaaaaatcctcaaccaattaatcaacataacgaatgccttgatatcaacatacggcaaccctgatgaaatccgcatagaactggctcgtgaattaaaaaagagcgctgacgagcgggcaaaattaaactctgccaacaatgccaatgaaaaagaaaacaattcaatccggaaattattgcaagagcgattcggcatccagaatccgagcagaaatgacattgtcagatacaagctgtacaaggaacttgagcacactggcttcaagactctatattcccaatctctcataacagatgacattctatttagcaaagagattgagattgagcatatcatcccgcaagccagactgtttgatgattctttgtcaaacaagacattggaatttcacaacattaatcaaaacaaaagcaatcaaacggcatacgattatatcttatctgaattcggtgaagactatgccgtccagtataaaaaacgtatcgacgatttgctgaaaaatggcaaaataagccgaaccaaacacaaatatcttttaatgtcggagactgagattcccaccgacttcataaacagggacatccgcgaaactcaatacatttcccggaaagctatggaaattctcgaaccagccacacgcaaagtggttgcgtcgtcaggagcaatcactgctcgtctgcgcgaagattggcaattggtcgacgtgatgaaggaacttaattgggaaaaatacaaggctctgaatctgactgaaacaatacaagacaaagacggacgaagaatctacaaaatcaaagattggacaaaacgcaacgaccatcgacaccacgcgatggacgccctcactgtcgcttttacaaaaccttctttcattcagtttctgaacaatcttaatgccagaagcgataagggcaacgccatttatgcaattcaacaaaaagagttgcaccgcaacaaagacggaaaattgtgtttcaatccgcctttgcctttagacgaattccgagcggaggctaaaaggcaactgaatgacattttcgtttcgcacaaagccaaaaataaagttgcgacacgcaactcctatatgaccaaaaacggcaaagggacaaagattgtagaactcactccacgcggacaattgtttaatgaaacgacttacggctgtgtaaagcaatatgaaacaaaacttgaatctgtaaattcttcttttgacaccgacaaaatcatgacggttgccgacaagtcatatcgccaagctctgatgaaacggattgaagaatttgacggcaatgcctctctggctttctctcaaaagaactcaatcacaaagaatccgatatacgttgacgattcccattccgacactgtccctgtcaaagtgaaaaccgttgttcctaagcctgttttcactcaaagaatcgctgtcgacataaaactcgacaagactaaaatcgcacagatattggatgctaaaatcagacgcatcttaaccgacaggttctacgaatttggagaagaccctcaaaaagcattctccaacatagatgaaaatccaatttggctgaataaagaaaaaggcattgccataaagaaagtcaccatcaaaaccggtatctctggagtcccaattcgccacaagcgcaacaacatgggtcgacctatcctcaactccgacggaaataaaattccttccgattttgttgtcccaggcaacaaccatcacattgcgatatacaaagacgctgacggcaatataaaagagcaggcagttcctttctatatcgcgacaaatagagttatacataagcaacctgccgtagaccggaatttcaacgccgacaaaggatggaaattcttattctccattaagaaaaatgaatacttcgtttttcctaatgagaagacggggttcaatcctgcagaaatcgacctgctcaaccccgacaacaacaaaatcataagcccgaatcttttccgtgtacaaaagatttcatcaagcaactactatttccgtcatcatttagaaaccaccgttgataccaacaacgccctaaatggaactacgtggaaacatgtgcagtcattaaaagcgcttgaaaatatcatcaaagtccgcgtaaacaacatcgggcaaattgtcgctgtcggagaatactgacgtcacagcttatgattaaaaaaactctatatttcagcaatccggcctatctgtccctaaaacagggacagatagttataaaattgccggaaattgagaaggccggcaatgttgccgacattatcaaacaacagtcaattatgacaaagcctatcgaggacatcggaatcctcatcctcgacaatcgccaaataacgctgacgcacgcgctgctgaacgctttgctcgacaacaacagcgcggtggtcacttgcaacgacaagaatatgcccacaggattgctgcttccactggctggaaactccattcagacagagcgtttcacgagccaaatagaagcctccgcgcctctgaaaaaacaactttggcaacaaacggttaaggctaaaattgagaatcaagcgaaagtgctgtcggtatgctccaacgttgaaatccgcggaatgatgaaatgggccgccgacgtaaaaagcggagatgccgacaatcttgaagctcgcgcggcggtcttttattggaaaaacattttctcaccacttaacggctacaaattcacccgcgaccgtaacggaatcccgccaaacaaccttctgaattacggatacgctattctacgggctgtcattgctcgggccattgtgggcagcggactcttgccaacatttgggattcatcaccacaatagatacaatgcctattgtcttgccgacgacataatggaaccatatcggccttatgtcgacgagctggttttttctattatgaaaaaatacggaatggagaatctgtctcttaccaaagatataaagatagaattgttaaacattccgacaattgatgtaaccataggcggaaagaaaagacctctgatggtagccgcaagccaaacttcctcttctttggcaaaatgtttcaacggtgagattagaaaaatctcataccctgcaagataacagaatttatggatgaacgcatcagtcaatatagagttatgtggataatggtatttttcgacttacccaccgaaaccaagaaggacaggaaggcatatgctgcgtttcgcaagaatctaatacaggatgggttctcaatgtttcaattttcaatctacatcaggcactgcgcaagcatagaaaatgccgaaacccatatcaaaagagtgacatcaagacttcctgaatatgggaaggtgggaataatgtgcatcactgataaacaatttggcaatattagcattttttatggaaagaaaacagcaccaagttactctcctggcactcaattggaacttttctaatccgaaacgcacttcaacagaaaatgaaatccactaatagtaatcacttccgcctacaaaaaagtccttctttttttatttctacaactacacataacagcctatacaacaccacattacacacatcctgttgtatctatagtaacaaagataagaattttaaagcaaatcacaacaagtatgcttctgatgttcattacgtttgtgttgtatctatagtaacaaagataagaattttaaagcaaatcacaacatttgaaagatattgttgatactcttaatgttgtatctatagtaacaaagataagaattttaaagcaaatcacaacatagataagtgcggtgattatcaactcactgttgtatctatagtaacaaagataagaattttaaagcaaatcacaactggcgtaacttctgaaataggtttcagattgttgtatctatagtaacaaagataagaattttaaagcaaatcacaactgaaacaacgaaatactgaattttttcatgttgtatctatagtaacaaagataagaattttaaagcaaatcacaacataagcctgttgctttagcaactgagactgttgtatctatagtaacaaagataagaattttaaagcaaatcacaactcaacgatagcacgagcgagcaaagcgagtgttgtatctatagtaacaaagataagaattttaaagcaaatcacaacttcataaatgacattagcaacaggttcgcaggttgtatctgcggcaacaaagataagaattttaaagcaaatcacaacgagcaggtcgttaaacactgcaaaaagaaagttgcgtctgtagcaaccgagcgaggtggtctacaactctgggaacagcgaaggctcggcgagcaggcggaaggtgtggcggtggtagggggtggcgccgaaacgcgcaatggcttcgcgatgggctttcgtgggataacctttgttcacgttccaaccgtattgcggaaattcctcgtggatgcgtttcataaactcatcgcggtgggtctttgcaagaatcgacgcggcggcgatgctcatcatcttgccatcgcctttcacaatgcattggtgcctgatgccgtcgtagggacggaaacggttgccgtcgataagcagaaagtctggacgcaccgacaagccgtccacggcgcggtgcatagcgagaaacgaagcctgaaggatgttgatgtggtcaatctcatcgttgtcaacgatgcccactgcccaagccagggcatcgcgctctatcacgggacgcagtgcgtcgcgggcatgctcggaaagcttctttgagtcgttgagaaggtcgttggtgtagccgtcgggcagaatcaccgccgcggcaaacaccggtccggcaaggcatccgcgcccagcctcgtcgcatcctgcctcgaggcgtcccggttcaagatacggcaacaacatcagtggtggcgtttgattatgtagtcgaacagcgacaggaatgcccgcttggcttcgttgtcgggatatggctcaaggatgctgcgtgcctcggcgcgcagacgctccatcgtggcataggcatattcgattccgccctctgccttggcaaagtctatcagcgtctctatctgttcggtggtaagcgagtcggagtcggcaagacggcgcatctctccgtggcgcggagcgtcggtgtgcgacaatgcgtaaatcagcggcagtgtcacctttccctcgcgcaaatcgttgcccgtgggcttgcctatggcatcatccttgaaatagtcgaagatgtcgtccttgatttggaacgacagtcccagcagctccacaaacttcgacaggttggcgatgtcgatgtcggaggcacctacagagtatccacccaccttcacacaactctggaacagcgatgccgtcttcttgtttatgatgctgaaataagtctgctcgtcgatggaatgatgcttggcaacgtcgatttggtcaatctcgccggtcgacagttccttgccgagctcggagatggtgcttatcacacggaaatcgttggtgcggatggcacaggcaagggcgttgctgacaaagaaatcgccgacaagcacggcgatatggttgtcccacgtgttgttgatggtgtcgtggccgcgacgctgcttggtctcgtcgataacgtcatcgtgtatcagagaggcattgtggagcaattccaccgacgccgcgccacagagcacaccgtccgacacctcggcgccgaaaaacttggcactgagcacaacgattatcgggcgtatctgcttgccttttgtttccaaatacttgtctacaatcttattgagcagcggactattgcttgagagcgactgctttattatcttctgcagccgctccaaatcggatgatatcaggtctcttatttcatcaaaattcgtcataaaacgatttttaagacacaaaagtaatcatttattctgcgaaaattgtaatttcacggtgaattaatgccgaatcattgatttttttatattaattagtactattcaccttcaatatatggaacagaaaaaattatttttgctcgatgcctatgccttgattttccgggcataccacgcaatgaaatactctcctcgattcacgtcggggggaatgaacacttccgccatcttcggctttgtaaacacgctcgaggaggtgctgcgcaaggagaacccaacgcatatcgccgtgtgtttcgaccctgcgggaaaaacgttccgccacgagatgtttgccgactacaaggctggacgggaggctacgccggaggatatcaaggtggctgttccatacatcaaagacattatacgggcttacggaatccctgtggtggaaaaagagggatacgaggccgacgacgtgattggcacgcttgccacgatgagccgcagccgcggattctcaacgtttatcatgtcgcccgacaaggatctcagtcaacttgtcgacccgcctgtgaaaatctaccgtccgggctacaagggacagccggcggaggtgcgcggcgagaaggaggtgtgtgacgtgttcggcatcaaccgcccgatacaggtgatcgacattctggcgctcatgggcgacaaggtggacaacattgtcggatgcccgggcgtcggtgagaaaacggcgtcgaaactgattctggagttcgacagcgtggagaatcttatcgccaacaccgataagctgaaaggcgcgctgaaaaccaaagtcgaatcaaacgtggacaacattctgttctcaaaaaaactcgccacgatatgcaccgaagtgccgattgaattcgacgaggaggcttacagccgccaccctgtcgacgaagccgccatccgcgacatcttcggcaaactggagttccgttcgttgctgtcgcgcgtgctcggcgacaaggcggaggcaaagcctgcgtcgaagcccaagcccgctttcggcgaactttcgctcttcggcgacgacatgactgacgcggcagccgcagaggcggagcctgcgccaaccgagcatacctgcaaaacgattatcgcaaccgatgccaacatcgacgagcttgtcgacaaggcgttgtcgcagaaaacaataggaatccacatggtctgcaccgcgccaaacgccatggaggctgttcctgccggcatcgctgtggcactgagccccgacgaggctttctatcttgaagccaccgaggagtcggctttcgacattttgcgcatccttaaatcggaaactgtggagaaagtgggcataaacctgaaattcgatatggtggtggcgctcaacattgctgagaaattagcggcgccctactatgatgtcgccatcgcgcactatctgctgcaaccggagatgagccattcaataaaccggttggcggagatatatctgaaaaaaattctgcccgactatcagctgcccgccacggaaaaggccaacaagttcaacccggcgctctcgcttgaaatcgaggatatagccaaggtggcttgcgcacgtgccgcggcatgcctcgagctgaagcctgtgtttgacaagaaactcgaggaggagaaaatggcgcatctgctccacgacatcgagctgccgctcgtcgaggtgctcgccgacatggagcacactggcgtgcgcatcgacacagacgcccttgccgcctactccaaagccctgactcagcgtcttgccgacatcgagcgggcatgcatcgaccttgcgggaatacagttcaacgtgggttcgccggcacaggtgggcgaagtgctgttcgacaaactgaaaatcgacgagaaagcgaaaaaaactaaaactgggcaatactccaccacggaggaggtgcttgagaagctgtcgggaaaacaccccatcgtgggcaagatcctggagttccgaaagataaagaagcttctgtcaacctacgtcaatgctctccccgaacttataaaccctcacacgggaaaaatccacaccacctacaatcagactgtcacggccaccggacgcctgtcgtcgacaaacccgaacctgcagaacatccctatcagaaacgacgacggacgggaaatccgcaaagcgttcatccctgacgacgggcactcgttcttctctgccgactattcgcagattgagctgcgcatcgtggcaaacatcagcaaggacgaggcgctcgtggaggctttccttgccggcgaggacatccaccgtgccactgccgccaaaattttccacgaacgcaccgaagacgtgaccgacgaccagcgacggaaagcaaaaaccgcaaacttcggtatgatttacggcatttcggcattcggactgtcggagcgactgcaaatacctcgcagcgaggccaagcaactgattgaaggctacttcaagacattccccggcgtgcgtcggtttatggaccagagcatcgagatggcgaaagagaaaggctttgtgacaaccctgttcggacggcgccgcatgcttcccgacataacatcgcgaaacgccgtggtgcgcggatatgccgagcgaaacgcaatcaacgctccaatacagggaactgctgccgacatcatcaaaatcgcgatgaaccgcatttaccgtcggtttgaccgcgatggaatacggtcgaatatgctgctgcaggtgcacgatgagttgaacttcgacgtcgttcctggcgaagaggattctgtgtcccgcattgtaaaagaagagatggaggctgccttcagcggaactgtacctctcgttgccgactgcggctcgggcgcaaactggcttgaagcgcattgacaagcaccgacgcaaacgcgtatttaaataaaaattttgccctgcaataaaaaaatatccgcaaaaacattgcaatattcagaaaagtgagtacctttgcattcgattttcggactcggggtgtagcacagttggttagcgcgccacgttcgggacgtggaggtcggaagttcgagtcttctcaccccgactatcaagggcttaaatgattggcattcaatcgtttaagccttattttttcaacaatatccgggacaaattcgggacaaaatagcgaaaaagcacccccgacaacgtttgcctgtcaaggtgtggaggtggctctttacacctgattcacccggcaaaccgccgaattcccaagaaaaaacactacctttgcagaaagaaagcggcatgtatatgctttagcagcgttttttcaacaaccacaagaaacatttatgattacagttgatggactgaccgtcgaatttggtggcaccaccctattcaaggatatttcctttcagataaacgagaaagaccgtatagcccttatgggcaagaacggcgcaggaaagagcactttgctgaagattatcgccggcgtgcggacagccacacgcggctctgtctccgcgcctaaagattgcgtaatcgcctatcttccccaacatttgatgaccgaggacggccgcaccgtgtttgaggagacatgccaggctttcgctcatctgcaccaaatccaggcggagatagaccgcatcaacaacgagctcttgacacgcaccgactatgacagcgatgaatacatgcagctcatcgagaatgtgtcaacgctttctgagaagttctacgcaatcgacatgactcatttcgaggaggatgttgagaaaacgcttctcgggctgggcttcgagcgcgaggacttcaaccgcccaaccagcgagttttcgggcggctggcgcatgcgcatcgagcttgcgaaactgctgctcaagtcgcccgacgtgctgcttcttgacgagcctacaaaccacctcgacatcgagtcgattggatggcttgaggactttatctgcaacagttcaaaagccgtggtggtgatcagccacgaccgcaagtttgtcgacgacataaccactcgcaccatcgaggtgacaatgggacggatatacgactacaaggcaacttacagccaatatctggagttgcgcaaggagcgtcgcgaacagcagatgaaacaatatgaggagcagcagaagatgattgccgacacaaaggaattcatcgagcgtttcaaaggcacgtattccaagactctgcaggtgcagagccgcgtaaagatgcttgagaaactccaactcatagaggtggacgaggaagacacaagccgactccggctgaagtttcctccgagtccgcgcagcggtgcctaccctgtgcaaatgagcgatgtggcaatgtcgttcgacggcaagaatgttttcagcggtgtcaatcttaccgtcgaacgcggcgacaagattgccttcgtggggcgaaacggcgaaggaaagtcgactctcgtgaaatgcattatggggcaactgcaaaacgaaggaaaactcgaactcggacacaacgtgcagattggctacttcgcacaaaatcaagcttcgctgctcgacggcgagctaacggtgttccagaccatcgatgacgtggctaaaggcgatgtgcgcaacaagattcgcgaccttctcggcgcatttatgttcggaggagaggagtcgacaaagaaagtgaaggtgctgtctggtggcgaacgcactcgccttgccatactcaaactcctgctggaacccgtcaacctgcttatccttgacgagccgaccaaccaccttgacctcaagacaaaggacgtgctcaagcaagccctgctggacttcgatggcacgctcatcgtggtgagtcacgaccgcgacttcctcgacggacttgtcagcaaggtatacgaattcggccacggccgcgtacgcgagcacttgtgcggcatctacgagtttcttgagtcaaagaagatggaaagccttcaggagctcgaaagaaaccgcgtgaagccgggaaaagcttaacacaaaaacaactcgttctttttcctatcacggcagagcggctcaaggcgggctgccagcactttcagagactcgccgatgcccctcgcttgcgacgggcagaccgacacgcaccgcatacagccgatgcagagctggttgttgttgtcttttggattgtcggcagatattgcacctgtcgggcattggctcgcgcagacaccgcattccgtacagtcttggtttgccacaggaaaaggtccgctgcagccttgcttgtacgggcggttgcctggcaatgcgagacggccgaacggtttgccgccttgcaccctttcaagaatggctctgccaaaggatgccagctctccggcatcggctgcgtcaggcctgccggcgccgtacatacggcaaatgctgtgctctgcgttggcggcaacggctgctacgacgttgaatccttgcgctgtcgccacatcctgcatttcaaccaaagcatcctcgtaggctctgttgccgtaaacggcgacaatcacacaggtggcaccgtttgactcaacggcattcagcctttccacagccaatgccggcacgcgcccggcatataccggcatcgagacaaccaccaagtcgccggctgctatatttggcaagcacagctcttcttcttttacacaaagttctgtaagtatgctttttgcctcaatgccgctgcacagcagctcgctgacgcggcgtgtgcctccagtggggctgaacgcaatctgatgtatggtcataatatcttcgttttgttttctatttcaagcaacattctttttgcctccaatcctccggcaaagccggtcagggaatggttgctgcccacgacgcgatggcatggaataaaaattgctatgccgtttgccccgacggcttgcgccacggctctgacgccttcaggattgccaacgctcagggcaatatctttgtagctcacagtctctccgtatggtatgctgagcaatgcttcccacacttgctgttggaaatccgttcccacaagacgcagcgggatgtcgaaagtcttgcggcggcatgcgaagtagtcttcaagttgtttcttcgcttgctcgagcacggcggatgtctcaaccagaaattccgcattcagccggcgcgcaagccggcgcttgttgcggcaagcgcatggcatcccgttccagtcgcacagacacaaagcctctcccaccgacgccaagaccatctctccgcacggcgagtcgtaatattgtacacgtaccggttgcctgcctctcatcttcgccacatcacctg

SEQ ID NO: 2150 - DNA, 24263 bp, synthetic construct
  misc_feature 1..24263: note = Synthetic
  source 1..24263: mol_type = other DNA
tgatatggctaattttattttttttttgtcaggaaaatttgcatgaacataagagagcaacgtacgttcagcgcaaaccccaacaggataagatgcgttttcctgattattgcctagaatgatttttccgtcatctaataaaaccgcggctcctacatgaaaattggaatagggaacataggctttaagcgcgatttttttggaagcctcaactaatttttttctttcagaatctaattcagaaagattttcgtatttcaagtattcaaattggtaattaatttttttcattcgaaaaatttaaaaagggaaagcaatttaaaaataattcttaacttttgattccaaaaccaatttaaatgctgataaaagtttttggaagcgcaatttatggtgtttccgccaaaaccatcactgtagaagttaatgtagataccggagtcggatattttttagtcggactgcctgatagtgcgattaaggaaagcaatttcaggatcggaaccgctttgctgaatattggatataagattcccgggaaaaagattacaatcaatatggcgccggctgatttacaaaaagaaggttcggcttacgacttgacgattgccatggggattctggcggcttcggaacaaatcaaatccgatggtatttctgattatctgattatgggtgaattggctttggacggaatgctgcgacccataaaaggtgtcttgccgattgccgttcaggcgcgagatgaaggttttaaaggaatcattctaccaaagcaaaatgtaaaagaagccgcaattgtcaatgatttagaagtaattggagtggaaaatatttcagaagtaattgatttttttaatgaagaaaaaataattgaaccggccaaaattgacattcacaaagaattctatgaacaattgaattcgtttccatttgatttcgccgacgtaaaagggcaggaaaatgtaaaacgcgcgctggaaatagccgctgccggcggacacaacatcattcttatcgggccaccgggaagtggaaaaacaatgctggccaaaagaattccctctatacttccccctttaagtcttgaggaagcgcttgaaacaaccaaaatccacagtgtagcaggtaaattgggtgaagtttcttccttgatgacggttcgtccttttctaagtccccatcatacaatctccaatgtgggtctggtgggtggcggttcttatccgcaaccgggagaaatctcattggcacacaacggtgttttgtttttagatgagttgcctgaatttcagagaaccgttttggaagtcatgcgtcaaccactcgaagaccgtgaagtcacaatttcacgggcgaaatttacagtgacttatccctcaagctttatgttggttgcttccatgaatccaagcccaagcggctattttcccgatgaccctaaaaatacttcttcgcaaatggaaatgcagcgctatatgaacaaaatttcaggaccgttgctggataggattgatttgcatattgaagtcagttcggtaccatttgatgatttgtcggcagagagaaatggtgagaaaagtattgaaatccgtaaacgggtggaaaaggcaagagcaattcaaacagaaagatacaaggatttaagaaaagtacactacaatgcacaggctggccccaaacaactggatgaattttgtaagcttgatgaaacaggaaaaaaattggtcaaaactgccatggaaagattgaatctttctgcaagggcttatgaccggattttgcgtgtagcaagaacgattgccgatttggaagggagtaatgatttgctaagttcacatattgcagaagcgattcaataccggagcttggatagagaagggtgggggatttgagtgggagagttggagagtgggagagtgggagagttggagagtttgagagtgggagagtgggagagttggagagtttgagagtttgagagtgggagagttggagagtgggagagtggagtgatttgtttattattttttatggcgataattaagattcatacggaattgcttgtttaccaaaagtcatttgattcttctatggaaattttccgattgtcagggggtttccctaaagaagaaatttattcgcttacagatcagattcggcgttcgtctcgttcggtttgtgccaatatcagtgaagcatggggcaaaagaaaatacaccaaatctttcattgctaaattaacagatgccgaagcggaagcaagagaaactcaaacttggttggaattttcagaaagttgtcattatattttgtccgaagattttgaaagacttaattctaatttatgacaaaatcatcggtatgttagtttcaatgatgaacaattcagaaaaatggacttcttttaaaagatttgaaaaataaatttcatagctaaatctgccctccaacccacccacccaccaactctccaacccaccaacccaccaacccacccattctcccacaaaaaatcccacctgaaaactcaaacgggatttatattttttcggattggacatccatcatccatcatccatcacttctttttatacatttcttccgctatctgaacggctttgtaagcgtcaattacgccaccggtaacagaaatatcggttaactgcgggtcaacatttacagattttaaaatgatttcttttacctgtaaagcattcagtttcgggtaatgtgaccaaaccaaagcagcgactccggccgtaatcggcgaagccatgctggttccttgttcttctttgaattcgtcatgtggaacggttgaaagaatttgagtaccgggtgcgaatacgtctaccgcttttttaccgtaattggaaaaactcgcttttagattagacgtgtcaggagtagaggcgcctacagtaatgattgcttctacaactttgtttcctttctcgtcaaaattagtcggatagtgaacatccgtatcgatgtctaccccgtcatttccggcagcttttaccatcaaaacaccttttttttctgcatatttcattgcgtcccaaaccaattccttttcaggagaataggcttttccaaaagacatattgaatatttttgcgccgttgtcagccgcgtaacggatggcattggcaacgtctttgtcacgttcatccccatttggaacggtacggacgcccatgattttcacatggttaccggcgatcccgtcaatgcctttgttgttgtcacgaacggcggaaatcaatcctgcaacatgagtcccgtggccggcatcggggccctcgacattattgtttccgtatttactttcttttttgtctttatagttgtcacctacaattccacgtggttcaaaatcaagattataattgtagttgatttgtccttcaaagtagtcaataccaccttggaattcatcacttaaagaatcataaatctgttgcattgtttttcctacccaataatcttgtggaataaaagcaaatatttgcatggcgggcatagactcatcggtaggagtatatttccctaaactttcttcggtaaccggttctgattcgaaatcttttataagagcagggaagcctttgtctatcatttctttcatcgtttggtattgcggaagtgaggcctgggcttcttttattttctcagcaatttctgattttatcttttcataatccgcaaactgtgcagggtatttggttttattttcttcatctttggaagtgtctccgctttcaaaaagaggaatgtattcgtatttataaacccttactttctccaacgtatcgccatctacattcttaccatcggcaccacctatgaaattccagccattgatatcgtcaatgtatccgtttttgtcatcatcttttccgtttcccggtttttctttcgggttcacccacatattgtcttttaaatctatgtgatctgcctgaacacctccgtcaatcactgcgacaaccaattcagtaggtttcctgttatgttctttgaggaactggtgtgctttctctgtattgacaccaaagattcctgtgtcttctttgctatcattgtaccaggctttttctgtcctgagaaggatggaatcctgcgcgaaaatagctgtggacagcgtaagtgctaatcccaatgtgatccaaaatttattcatttatttaatttttgagtgttattgtttgacaaattgcgtaccgaaattactgtaattcagttaatctttggagataagtcgtgcttttcggcccttcgttacacaacaaatccaaaatacttaagtcgggcataaaatcaaatttttcatcaaatacctgaaagtatttggggaaatcgttttcaggttccgacttggcattgaaacggttccggtaatcggatgattcatctatcatatcgtatttttcggtcaaatcaaatttcaaatccagctttaatttggaactaatgaattccaatgttttcagattcaaatccagtaggaatttttctttttggtcaaaaataggagccaaatcatcttcataaaattcaaaataaggtgaacttttataagccgaaaccagtgatttgaaatgttctttctgccagttgtaatcatttgcaacctgaatgtcttttaactttctcgcgccattgtgttttatgggaatcgctaaacgcaattttccgtttgcaccttgtatataacaacggttgcgataggtttgtttagggaaattctcatgggcttccaattgataattttctgcctgaatcaactccgaaaaataagaaacagggccaaaataaaaagcggggaaaatcattgttcagctgtttttctttggagaaaaccttgataaggttcctgcaagcattatttattttctttctcttttttcttttttacacggtaatagtcccaaacgaaaaatccgaccaaagcaatcagtacataaattccgtaagattttttgtcaggattgtcattgttgatggaagtcatgaaacggctccagatgaattttttcggagcgggctcaaacattccgttcatattggcccagaccaaaatgggtcgcccgatgatattttcttccggcaccggtccgaaaaatcttgaatccagcgactgattccggttgtcaccgctcatgaagaagtaatcctgtcctatggtatattggttagtctcttttccgtcaattaatattttatcaccctgtatactcaatttatggtgttcataatcacggataattcttctgtacaattctatattggatttatccaatttgacaacatccccttttttcggaacataataaggtccgtaaaaatcctggttccagtcacggtctataggaaaagagttcaaagagtctttgatatttcccattccgtattctttatgtcctttcggcgaaataattctttcaatttccactacgcttgaattggatttaaaagctttctgcatatcttctgttaaagctttgaaagtgtaaacatagttttcacccatttttccttcaatattgtaatcagtagattggagcaaaccatattcctgatacaataattcggggctgaacatatttttggttgtgatcctgtatctgtgttgtaccaaggcatcttttttcgggacgaataattttccgttgacatacaattcaccttctttgtattgaatggaatcacccggcataccaaccaaacgttttacataagcatctttccggtcaatcgcatcgaaaacggaatcggcgggataattaaaaaccacgatgtcattggattttagtttgctccaacccggcaaacgcatataaggtaatcttgctttgtcaacatacgcgtttcggttaatgaattccgaaaacggaatcccgatgggcgtaaacggaacacgcacaccataacttactttttccacaaaaagcgcatcaccgatttttatggtattttccatggaacccgtcggaacgaccattggttgtatcaaccaagtatgtaccaaggttgccagcacgattgcgaacaacaaagctgcaatgaaagtcccttttcgttcttccggcccttcatagtcgggtttttcaatgtaatttaggtaaaacgcatataatccgatggttacaatcatcaaaatagcatctgtccaggttcttttcccaaaacatcttccaaaatccacccagtaaactacccacataatcggggcgacaatcggggtaaagaaaagaatgatccaccattttggacgtttgatgagttctaatccaatccagaaattataaaaaggaatgaaagcttcccaagcctttctcccggcttttttgtacaattgccaagtagatgcgccataaattatattataaaggataaatgcaacgagccagttgagtaataattccattcaaatttaattttaagtgtgctaatttaacattttcactgaaagcggattgttaatttaaccctaaaacatctttcatcgtaaaaaaaccttgtttttcgcatatccattcggcggctaatacagcccccaaagcgaatcccttccgggtatgggccgtgtgtttgatttctatggaatcaatttcagaattataagaaaccgtgtgtgtgcccggaacattatctgttcgtaaagctttgatgggaataattttatcggaattcattttctccaaattccaatttgttttatctgaattttcaatgattccatttgcaagtgaaatagcagttccactgggcgtatctaacttttggatgtgatgaatttcttctaattcaactttgtattcagggtatttggccatcagtttagcaagatgttcattcagttcaaaaaataaattcacacctaaactgaaattggaaccgtacagaaatgcacagttattttcctggttgatttttttgatttcagataatttatcaagccaccctgtggtgccggaaaccgtagggattttgtgttccaaaagaattttaatattttcaaaagcagcttcgggacttgaaaattcaattgctacctccgcttctttcaaatcatcagcctcaggttttttgttgagttttgcaacaatatgatggccgcggtcaattaagatttcttcaatggcttttcccatttttccgtatccgacaattgctatattcataatggttattttgaaatgatctaaggttgaggttcaaaatttatattgaatgttgattggtaagattcaaaacttgaatttgaaattaaaatttatattttacgccaaatcccatggccaattctgccgattgaaggttttgcatcataatgggttggaacgacaagtcagggtctttttttattccgtataaatgtgcatcaactgttgcgtctaaaatgttcaacatataccccacagcagtcagtgcaatggcataatcgcgtgaacgttttcggtcgtcctgtatgttggcgagctgctcaacaggaagattggcaatgccgggttgagagatagggtttccataaagtttatcaagatagtagccacggtattctttgtattcattgttgtaataaacaataaatccgacacctgtccccaaaatcccccaaaccaatggtgctttccaccattttttgttgtaaatctgacccagacccggtataatcgctgagtacaacgaagcacgcatcgggtttctgtaagtcagataatcaattccgattgaatccaatccttttctggtagaagtgtcgacaatttccgggatttggactgaatcgccggtttcttcctgagcaaaggcaaaacaagacataagaagcaatatgtacgaaatgaggtttttcatcctaatatttttctcaacctttcaaattcagtatcggaattaaagtcgatgataatttttccttttccgtttgaagtacgtttaacctctactttggactgtagcgaatcggtaaattctttttgtgcttttttgaactcattcggcaattctttttttgaaattttcgccttggacggatttttcaatgatttaatcaattgttccgtatcgcgtacagaaagattttccgcaatgactttttcatatatttccaattgcaaatccacattgtcaatggcaatgatggctcggccgtgtcccatggaaatcattccgtcgcggatgccggtttgaataatagggtcaagctttagtaatcgtaaataattggaaatggaagttcggtctttgcctaccctgtggcttaattgttcctgtgtcaacttgatttcgtcaagtaagcgctgataggaaagtgcaatttcaatcgcgtccaaatcctggcgctggatgttttcgaccaaagccatttccagcatttcctggtcattggccaatcggatgtatgccggaatggtttccagtcctacaacttgcgaagcacgaaaacgtctttcaccggaaattagttcatattcggtaccgattttgcgaaccgtaatcggctgaatgacgcccaaaaccgcgatggattttaccagatcttcaagcgcatttttatcaaaattggttcttggctgataagggttggttttgattttcttcaaatcaatttccactatactccccactaatttttctgctcccttatcagaagccgaaaccacactgggttcgtcttttaataaagctgaaagtcctcttcctaaacgattattgtttgtttttgccataaattttttattattctaaatgttgaattttaaattttaaatgtcaatttctgatttttaattcatttataattcaaaattttaaatttaaaatagtttaaaccgtgtcgttattttttactaaaaattcccgggctaaatttaaataattttccgcacccttgcttcctgcgtcataggcaatgatggcttcaccaaaactcggtgcttcagatagccttacgttgcgttgaatcacagtttcaaaaaccatctgggggaaatggctgtttacctcatccactacctggttggaaagccgtaaccgggagtcgtgcatagtcaaaagcaatccttcaatatccaaattcttattatggtgctgctggactccttttatggtatttaataatttgcccaaaccttccaaagcgaaatattcacattgtataggaataatgacggaatcagcggccgtcaaggcattcagtgttataagtcccagagaaggtgcacagtcaatgataatgtaatcatattcatcctttatttcctgcagagcttcttttaagagatattcgcggttttcatggtctacgatttcgatttcggctgctaccaagtccacatgtgcgggaatgatatcgagattgggtgattgggttttttgaatggcttcattggccgtgatttcatgctccaggacttcataggttcccttttcaacttcttctacaaccaagcctaaccccgatgtcgcattggcttgcggatcggcatcgatcaaaagcgttttcttttccaaaaccccaagtgaagcggctaaattgaccgctgttgtggtttttcctactcctcctttctgattggcaattgcaactattttacccatgtttatctaaaaatcgagcgtaaaattacggatttaaagccggatggcggaattggaaaaaggaattttttgaacaattggagaatgagaaataaaaaagccccgaagatagtcgaggcgctaaatgttttagctcattaaatttttattcacgggcattcgctgaaacattcaaaagtaaaggaataaaaaaaggcgagttgccccgccttgaatgttttcacaacggaataatccttattgtgaattgctttcaaaatttgtattgcaaatataaagaataaatttttcaatcgcattacgggaatccgtaaggaaataaaaaatcttgtttgtaatatgcgagcatataaattttttgttaaattttgagaaatttaaacttatgaaaagaaatatactaggacttgatttaggcacaacctcaatcggattcgcacacattatagaaggcgattctcccgaacaatcttcaattaaaaaaatcggagttcgtgtgaatccacttaccactgatgaacaaacaaatttcgaaaaaggaaaacctgtttctgtaaatgcggatagaaccttaaaacggggagcaagacgaaatctggatcgctatcaattacgaagagaaaatttgattgatgctttattgcaagccaatatcattacaaaagaaaccattcttgccgaagatggaaaaaacaccacacacgagacatggcttttgagagcaaaatctgtctatgaaaaaattgaaaaagaagaattggctcgtgtatttttggcaatcaataaaaaacgaggttataaaagcagtcgaaaagccaaaaatgaggacgaaggacaattgattgatggaatggaaattgccaaaagattgtatgaggaaagtttgactccgggacaattagcctatcacttgttacaagaaggaaagaaatttattccggatttttatcgttctgatttgcaggctgaacttgataaagtttggaatttccaaaaacaattttatcctgaaatattgacggatgaattttataaagaactacaaggcaaaggacaacgggctacttctgcttcattttggggtaaataccaattcaacactgctgaaaataaaggcaatcgggaagaaaaaaagttacaagcttataaatggagaaatgaagcaatttccaaacaattggaaaaagaagaggtagcgtatgttattactgaaattaataataatctcaacaattcaagcggttaccttggagcaatttcagataggagcaaagagttgtattttaatcatgaaaccgttggtcaaaatttgtacaaacaattacaagagaatcctcatacaaaattaaaaaatcaggttttctatcgtcaggactatttggacgagtttgaagcaatttggaaagaacaatcgaaacaccataaagaattaaccgataatttaaaggctgaaattcgggatattactattttttatcaacgaaaactaaaatctcaaaaaggcttggtcagtttttgtgaatttgaaagtaaagaaatagaaatcaataataacggacaaattgccaaaagaagaattggtctgaaagccgctccaaaatcttcgcctttgttccaagaatttaagatttggcaagtattgaacaatgttttggttcgcaaaaaaggaagtaaaaaaagagttttaaaagagtcagaccaaacaaaattattcgataaagaaaaagaaatctttgattttgatttagaaacgaaacaaaaattatttgatgaattaaatatcaaaggcaacctcaaagctaataaaatcatagaattattagggcataaatcttctgaatgggaaatcaattattcagaattagaaggaaacagaaccaataaagtgttgtatgatgcctatttgaaaatattggaattagaaggttatgacgaggatttattgaaattacaaggtaaggatgatatcaatgtttcggaactaaaagcatctgcttttgaagtaaaagatatggtcagacgtatttttgaagtactaaacattaacacagaaatcttagaatttaatgccgagttggatgggaaagcattcgagcaacaagcatcctaccaattatggcatttgttgtattcatacgaaggtgacgattcaccaagtggaaatgaaaaattgtatgaattattagaaaagaaattcggatttaaaaaagaacacggacagattttagccaacgttactttatccgacgattacgggaatttaagttcgaaagccatgaggaaaatttatccatacattaaagaacaaacgtatgataaagcggctgctctagcagggtacagacattctgcctcttccctgaccaaagaagaaatttcaactcggccattgaaagacaaattggaattgctgaaaaagaatagtttgcgaaatcctgttgttgaaaagattttgaatcaattggtcaatgttgtgaatgctttaattgagaaaaatagatcaattaatccaaatttcagatttgatgaaattcgtatcgaactggctcgtgaactaaagaaaaatgcgaaagaacgtgctgaaatgacgacgaatattaatgcagctaaaacagaaaatgataaaattagagatattattaaaagagatttttcaaatgtgaaaaaccccacaaaaaatgatctagtaaggtataaattatatcaagaattgtcttttaatgcttacaaaaatctttacactaacgagaagattgattattataaattatttggaaaggaatatgatattgaccacatcatccctcaatcaaaaatgtttgatgatagtttttctaataaagttttagtcccgagacaagcgaatttgaataaagggaatcaaacggcttatgattatatgtcaaacaaatcaaaagaagagtttgataaatatattgctacgattgaaacactttataaagaaagaaaaataaccaaagccaaatatcaaaaattgttaaaacaagaaacagaaattggcgatggatttattgatagagatttgcgggacagtcaatacattgccaaaaaagcgagaaatcttttgtatgaaatttgtcgtatcgtaacaccaacttcgggaagtgtaacgggtagattgcgtgaagattggggattggtaaatattatgcaggaacttaatatggaaaagttcaggtcattagggctaaccgaaatggtggagaaaaaagacggaacctttaaggaacgaatcgtagattggagtaaacgaaacgaccatagacatcacgcaatggatgctttaaccattgcctttaccaaacataattatatccaatatctgaattatctaaacgcaaggaaaaatgagtatcacaaattgcacagcaatattattggaattgaaacattggaaaccgaaatcattattgacgatgatgggaataaaaaaagagttttcaaattaccgattccaaatttcagagaaaaagctaaagaacatttagaaaatgtattggtttcgcacaaagccaagaataaggttgtaactaaaaataagaacaaaaccaaatctaaaaacggtgaaaaaaccaaagtagagcttacgccgagaggtcaattacacaaagaaaccgtttacggaaagtatcaatattacgttaacaaagaagaaaaagtcggaacaaaattcgatgagaaaaccatcaataaagtaagtaatccactttataaaaagctactgttaaaacgcttatccgaaaacgggaacgatccaaaaaaggcctttggaggaaaaaatgcgttaagcaaaagcccaatttatctcaatgaagaaaaaacggaaacattgcccgaaaccgttaaactgacttggttggaagaagattattctatccgaaaagacgtaactcctgagaatttcaaaggcgaaaaatccattgaaaaaatattagataaaaaggtaaaagacattttgaaggaaagattgaatacttttggaaatgatgctaaaaaagccttttccgatttggagaaaaacccaatttggcttaatgaagcaaaaggaattgcaatcaagagagttaccatttcaggcgtgaagaatgctcagttcttacattacaaaaaagaccatttaggaaattatattttagacaaaaacggagataaaattcctgttgattttgtcagcacaggaaataatcatcacgttgccatttacagagatgaaaaagaaaatttacaggaaagagtggtttcactttttgatgcagtacaattagtcaatgcaggagaatctgtaattgataaaaattataatcaaggtataggctgggagtttttatttacaatgaaacaaaatgaatacttcattttccctaatgaaaaaacaggatttaacccaggagaaatagatttattagaccctaaaaataaaaaactgattagtccgaatttgtttagggtgcagaaaattgcgactaaaaactatatgtttagacatcatttggaaacaacagtagatgataaaaaagaaatgaaaaatattgcatttattcatattcagagctgtaatttattgaaagaaattataaaagtccgcctaaatcatttgggtgatattgtaagtgttggcgaatattaataatgaaaattgtaaaatgaatcgttccgattttctgaaaacattaggtttaggcgcaggtggactgattttgccggctaattcgtttataaatacgaaaaccattaagatctacgacaattatgtaaaagggctttctcattaccactttcataaattgaaaagtgaggttaaagtaggcgatgaagttcagctaaaaagagatgctgaaaacatttatgacagttttgctatccaagtcaatttcgctgagagtagacttggttatatatcggcttttgagaatatagttttggctaatatgatggattacggagttaatcttaaagcttatatcagtcaaaaagatttatctcgcaaatattatgagtggttggcagtagaaatctatgcagaattagttatcccttctcaaaaattaattgacaacgtattgttagagcaaagagcttctgatgctatagatatttataggaaaggttatgatatataattgttatttatgataaaacgaacgctctacatcggcaatccggcctatctgaaattcaaagacaatcagctgcaggtaacggatcccgaaaccaaagcagtcaagggttctgcgactgttgaagacatggcctttctggttttagaccattatcagattacattgagccatcagctaattgttgctttacagggaaataatgtggcgattgtgagttgtgacgcacatcatttgccattcgggctgatgcttcccatgagtggtcatgtagagcattccgaacggttgaaacatcagctgaatgtttcggaaccgcttcgcaaacagctttggaaacaaactgtagaagccaaaatcagccaacaaatgttattgctcaaaaaattaaaaaagaattatgagccgatggcggattatctcaataatgtaaaatcaggtgacaccaccaatatggaaggaatcgctgctcaattttattggaaaaatttatttgaagatttttcgagagaaagggaaggagaagcacccaacaattttctgaatttcggatatgccattttgaggagtatagttgcgagagctttggtgagcagtggtttgaatccaactattggaatttttcatcgcaataaatacaatccttattgtctggcagacgacatcatggaaccttatcgcccttatgtggatgaattggtttataaactgatgctttcgcctgtccgtccgcaggatttgacaagggaaataaaagccgaaatattaaaaataaccacttccgatgtttccatcatgcagaaacaacgtccgttgatggtggcagtgagcagtacaacttcttcgctgtacaaatgctatttgggcaaacaacggataattaactatcccttattaaattaaggatataccgtcacttcgagtgccgagcaaagaggggtatcgagaaggaagacgatagaagaaataaagtcaatgctaaaccaaaatcgcttcaacgcctatcggattatgtgggtactcgtattttttgatttaccaaccgaaaccaagcgggatcgtcatgcagccaccaaatttcgcaaaaacctgattgatgacggattttccatgtttcaattttcaatttatttacgacattgcccaagccgagaaaatgccgaagtccatatcaaccgaaccaaacgaaatttgccgaagttcgggaaagtaggaatcatgtgtgtgacggacaaacaatttggtcaaatggaaatctttttcggacaaaaagaagctgaattacctgcgccttcgcaacaactcgaattgttctaacaggaatgaaaaaatttatcttgggacaaatcaaaagtggaaatcatccgatttttagataaaaaaatcctcatttaaaacccttaaaataaggattttaaatgaggttgtaaacctaagctaaaattagccaaaaattttgaaagcaattcacaacgatttgctcaatagctttattagccttgttgttgtaaacctaagctaaaattagccaaaaattttgaaagcaattcacaactggggactttattttcagagggttgtttttgttgtaaacctaagctaaaattagccaaaaattttgaaagcaattcacaactctggtgtagttgaccttgttttttggtttgttgtaaacctaagctaaaattagccaaaaattttgaaagcaattcacaactaccgtttctttcaatacagaattcacggggttgtaaacctaagctaaaattagccaaaaattttgaaagcaattcacaacgatgagctactttgaaagtatgcaaactgagttgtaaacctaagctaaaattagccaaaaattttgaaagcaattcacaactttttttgtattgttcagcttgaattatgtgttgtaaacctaagctaaaattagccaaaaattttgaaagcaattcacaactttaatgcttcttttaccgttgtttgacccgttgtaaacctaagctaaaattagccaaaaattttgaaagcaattcacaacttgagttgtgtgccatatttacgacactcagttgtaaacctaagctaaaattagccaaaaattttgaaagcaattcacaaccatcgcttcaccacagttatcaatcatagcgttgtaaacctaagctaaaattagccaaaaattttgaaagcaattcacaactcaaagaaggtttaaaaataatatcgggtggttgtaaacctaagctaaaattagccaaaaattttgaaagcaattcacaacacttttggagctgggttgttctctttctttgttgtaaacctaagctaaaattagccaaaaattttgaaagcaattcacaacaaacggctcgcaactacattgtaccattttgttgtaaacctaagctaaaattagccaaaaattttgaaagcaattcacaacgcgtcacatttgcccccgtcgaatctaaaagttgtaaacctaagctaaaattagccaaaaattttgaaagcaattcacaactaatgcactcattcctctgttcaattcgtagttgtaaacctaagctaaaattagccaaaaattttgaaagcaattcacaacagttgtagagattgaaatgtaacctggattgttgtaaacctaagctaaaattagccaaaaattttgaaagcaattcacaactcttgtgccatcttcactcccatcatctccgttgtaaacctaagctaaaattagccaaaaattttgaaagcaattcacaactctaaacctaaagttacagaagaaaattcagttgtaaacctaagctaaaattagccaaaaattttgaaagcaattcacaacccgacagacctatatttttagcaggcaaccgttgtaaacctaagctaaaattagccaaaaattttgaaagcaattcacaaccttcctgtctcttcgaaattgttttttcctgttgtaaacctaagctaaaattagccaaaaattttgaaagcaattcacaacgtgccacttactgtattggcgtccagtccagttgtaaacctaagctaaaattagccaaaaattttgaaagcaattcacaacgttgattgtggttgttgaattggatccgccgttgtaaacctaagctaaaattagccaaaaattttgaaagcaattcacaaccaacaaccattggtggttatggaattaccagttgtaaacctaagctaaaattagccaaaaattttgaaagcaattcacaacttgctgttatacgcaggttttctaattggtgttgtaaacctaagctaaaattagccaaaaattttgaaagcaattcacaacgggcgaaaatagattgccttgcccgtcttggttgtaaacctaagctaaaattagccaaaaattttgaaagcaattcacaacaccttgttcttcgatttgcattcctgtaatgttgtaaacctaagctaaaattagccaaaaattttgaaagcaattcacaactggggggaaaaacaaccaacggaaggcgaagttgtaaacctaagctaaaattagccaaaaattttgaaagcaattcacaacgaaacactgaaacattgggcgtgaacaggagttgtaaacctaagctaaaattagccaaaaattttgaaagcaattcacaacggaggcgcagtccatagagaaagacccaacgttgtaaacctaagctaaaattagccaaaaattttgaaagcaattcacaacaagaatgcccaagtcaagtattacaacatagttgtaaacctaagctaaaattagccaaaaattttgaaagcaattcacaacaacttgctctgattcgctcaaagactgccagttgtaaacctaagctaaaattagccaaaaattttgaaagcaattcacaaccttaattctaatgtttgtctatatttttcggttgtaaacctaagctaaaattagccaaaaattttgaaagcaattcacaactaatacaatcttaccttttttaccgctttcgttgtaaacctaagctaaaattagccaaaaattttgaaagcaattcacaacaatccgtttatgcccgttttaattggcgttgttgtaaacctaagctaaaattagccaaaaattttgaaagcaattcacaactctatgataatatttgccatcaatttcaacgttgtaaacctaagctaaaattagccaaaaattttgaaagcaattgcctccttatccttcagttttattttcatcgaaaaaaaatctctacctgatctttgtgggattatattggttaaatttcttaaagtcaatttttatttcatcaatagaaaatttaactttacgaaattaagtttcttacaatgagttattacaaaattgaaaatttagaacaatactttaaggcctataaaaaatcagttaaatcacctgaagagttttggggtgaaatcgccgaagaaaatttcacttggattcaaaagtgggacaaaatccttgaatatgatttaacaaaggccgatgtgagatggtttgtcaatgcaaaattgaatatcgtgaaaaattgtattgaccgtcatttaaataaaagaggaaataaaactgccatcatttttgaacccaacgaccccaaagaaaatgcgcagcatataacatataacgaacttcatgaaagagtttgtaaaatggccaacgtgctcaaagaccaaggcgttgggaaaggggacagagtttgtatttacctgcccatgattcctgaacttcccgtagcccttttggcgtgcgcgcggattggtgcaatccactccgtggtttttgcagggttttcatctgcagctttggcttcgcgtatcaatgacagcgactgtaagattttaataacttcggacggaggtttcagaggaaataaatccattgatttaaagtcgattgtagatgaagcgcttgataaaacatccaacatagaaagtgtattggttgtaaagagaaccggcgcagatattcccatgaaagagggaagggatatttggctgcagccacttttggataaagccgccaaagaccatgtagctgaagtaatggatgctgaagatccattatttattttgtacacgtcgggctccaccggtaaaccaaaaggaatggttcatacgacagccggctatatggtgtacatagcctatacctttcagaacattttccaataccaggaaaatgacgtgtattggtgtacggctgatattggttggattacaggacattcttatattgtttacggtccgcttctgaatggcgcaacaacggttctttttgaaggaattccttcatatcccgaccatggccggttttgggatgtgattgacaaacacaaagtaacacaattttatactgccccgactgccatacgcgcattggcaaaggagaatctaagttttgtggaaaaccatgatttgacttctattaaaatattgggatctgtaggagaacccatcaatgaagaggcttggcactggtacaacaaccatgtagggaaaaagcagtcacccattaccgatacttggtggcaaaccgaaaacggcggaattatgattgcacccattccgtttgtaactccaacaaaacctacttatgcaacgtttcctcttccgggcgtacagcctgttttgatggacgaaagaagaaatgaaattgaagacaaccaggtggtgggaagtttatgtatcaaatttccatggccgggaatggcacgtaccatttggggagaccatcaaaggtttgtggaaacttactttacagcatttcccggtaaatattttacaggagacggcgcactgcgtgacgaagttgggtattacagaattacgggcagggtagacgacgtggtaatcgtttccggacataatctgggaacagcccctattgaagatgccatcaatgagcatccggctgttgcggaatctgccattgtcgggtatccgcatgaagtcaaaggaaatgcgctttacggatacataacgcttaaagaaaccggcgaagtacgtgatcgtgataacctgagaaaggaaatcaaccagcatatcgcaagccacattggcccgattgccaaactggacaaaatccagtttgtgtcagggttgcccaaaacccgttcggggaaaatcatgcgcaggattttacgtaaaattgcagaaggtgatttttccaacttcggcgatacttcaaccttgcttaatcccgaaattgtggaggaaatcaagaatgacaggattggttaactaaaattattatggaaaaggacgagtactaagtcttctaagtctccgttatttatttttgtttcccatatgaaattgaatattgttccaatcggatttttaattatttttagtgttttgataagtggatttggatttgcccaaacggaaacctatacttttcccaaaatcaaatcgagcatatcattgcccatttctgtttcggtagccaacatcaattcgctgatcaataattctgttacgggcgttttgtatgaagacaattcctataccgacaacaacaacgaccagttcaaagtcaaagtcgagaaaaacggaaatttacaacttacggctttaaaggaaaaccgtttcctcattgaggttccattaaaaatttgggcagaacaagggtatggcggtttaggatattatatgtaccaggacaccaatttcaacgtagtaatgaaattcattacttcggtaaaatttaatactgactggacactggacaccaaaaccaaaacttacggatttgaatggagggttcaacctgttctggattatggcaaagtcaaaatcccaatttcctctttgatagaagaaacgctgacggagcaacaaacaaaatttaccaccgttatagatgagaaaataaaagaaagttttgatttgaagccttatcttttgacgatttggaatcaatttaatcctcccatcaatatatctgaagaatacaacacctggttgaagctgactcctcaaacagtttacatgacgcctgttgtcatttactctgattatatcaaagcaactgtggggttggatttgtatgcagagacctatattggcagcattccgcaaacttcgccgctattgatgaatttccccaattaccagcagaaagacaaaattccatctgattttaatatcaaaacaacggcaaacatttcatttattgatgcgactaatctggcaaaagctcaattccttaatcaggaatttgtattgacaagtgaaaagaacaaggtcaaaattacagacgttaaagtttatgcagaagatttgtatgtagtgattgaagcccaaacgaccggggaagttacgggaacgtctatcatcaaagggtttcctgtttatgacaggacacagcagaaaattatactgaccgacattgattttaaattgaaaacgaaaaatatttttaagaaagcgattgcggctttatttgaagggaaaattaaaagaatgattggaaatgaatacggaatcccattgaccgatctcatttcagcatcaaggaaaagtttgcaagaaagttttaacaaagagtactacccgggaatacatctgaaaggcaacgtaatagacttaagtccggttcagatactcctttttcccaacaatatgaccgttgtgattgataccaaagccaatctccaaatagacgtatcggggcttaatttttaaataattaaggattattttaaatttttttaggaaatttaaagtaaaatcagatttcatacgtcttataaagtatggaacgattggaatccgtcataatgtcccagttagaaaaagaaaatatcatttcaggaaccgtagaaaaatacgggacaaagttgatggctttcatccgcccaaaagtgaggaatccggaagatgccgaagatatattgcaggaagtatggtaccagttcagcaatttatccaacatttcagatatcgtaaatataagcagttggcttttttctgttacccggaataaaattaccgacagttaccgtaagaaaagtacagaaaacctcgaggattttacctacgaagatgaagaaggcagcttgatgattcgggagtttttgctggaagataaccagggaaatccggaattaaagatgtttcaggacgaaatatggaatgagattttcaaggcattagacgaattacccgaaaaacaaaaatccgtttacatagaaaatgaaatggaaggaaaaacgttgcagcagattgctgacgaacaaaatgaaaatttaaaaaccatcatcagccgtaaacagtatgcagtgaaatatttgcgacaacggttgaaccagctttacaacgatttaaacaacaattaaaacaaacaaaatgaaaaataaatttagaaataaaagaaaatgtttcttcatcataccctttatcatactttttggattaaccgctattgtcatgtggctatggaattcaattttgcctaatgtgattggagtccaaactgtcacatattggcaggcaatgggaattttaatactgagcaagattttattcggtgggtttggtgggttccgtaagcaccgggatcatgcccacaaaagagaatttttcaataaagtaaaaaacatgacgcccgaagaaagagaaaatttcaagcagcaatggcgcgaaaggttcaatagaaaaggattttgtaaagaataatcatttaattttctaaccccaaaaaaacttgatattaatcatttgtttaattaattccaaggttataaatttgcattgacaaaaatgtcaaacaataatgttaaataaatttattaaataaaaatgtcaaagcaatcaaaagatatagaaacagaagaacttattcgcaagacggcgaaaagacttttttttggcgaaggaaagttcaatgctacgacacaggaaatagcagacgcagccggtgtcaaccgcacattgatcaattattattttcgttcacgggacaatctgttcaacttaatttttgaagatgccgtgaagcgggaagaacaattgcgggaaaaggttttgttttcagaccttcctttcaaagagaaaattgaaatgtacattgacgattcccttcttcaggcaaaggaatacccttacttggaaacctatattgtttcacgtatcaacgaagggtgtttttacaaagaagaagaggaatgggaaaaatttatgcagcggttttataaagaatttgaaacagaaatgaaaagaggaaccattgagaaaatggaaccgatccagtttatcctgaacatcgcctcactggtttccttcccggtcgctatccgtcctttgtttcaatctaccatgcggatttcagatgcggaatatgatcgcattttaagcgaacgaaaagaaattataatgaatatgttattcaaaaattaattatatgaattttaaaattaagaattatatactgatcctttttctgcttccggccctgagcattgcgcaggaaac

SEQ ID NO: 2151 - DNA, 24263 bp, synthetic construct
  source 1..24263: mol_type = other DNA
  misc_feature 1..24263: note = Synthetic
ttcaccaccaccacttgcatgccagccatagcagctgatgcagggttggtgccgtgggccgaagcggggatcaagcagatgttgcggtgaccctgaccattggcctcttggtagcgacggatggtgagaagaccggcatattcgccgctagcacccgagttaggcatgaagctcatgcccttgaagcccgtgatctcgcagaggtctttctccatctcggcgatgagttcgaggtagccttccacttggtcggcagggacgaaggggtggatgttgccgaactcaggccagctgagggcatacatcgaggtggcggggttcagcttcatggtgcaggagcccagcgggatcatgcagcggttgaggctgaggtcgcggttctcgagtttcttcatgtaacgcatcatgtcggtctcgctgcggtacttgaagaacatcggggcctgcatgaacttggaggtacgctgcatctcggcagggataccgctgaacttctggcagttcgggtcgcagacgagctcctcgtgctgcttgccgagggcttccgcgacgacctggccgatctcgttgatgtcttcgcgagcggtggtctcgtcgaggctgatgccgaagtgttgcttgtcgatgatgcggaagttcatgccgtgtttctcggcggcttccttcaccttgcaggtgcaagcgccttcgggcagttcgaacaacagcgtgtcgaagaagtatttgttgagctgcttcacgccgagcttggccaactcggaggtcagcttaccggcgaggcagttgatgtgatgtgcgatttcgatcaagccctccggaccatgatacaaggcgtagaagcccgacatgatggcgagtaaagcttgagccgtgcagatgttggacgtggctttttcgcgcttgatgtgctgctcacgggtctgcagggccagacggaaagcgggattgccaagagcatccacgctgatgccgatgatacggccgggcatctcacgcttgtaggcctcggtagtggcgaagtaaccggcgtgcgggccaccgaatcccatcggcagaccgaaacgctggttggagcccaagacgacgtcggcaccccattcgccaggaggcgtgatgagggtgaggctgagcaagtcggcggcgacggccacttgcatgcctttctctttccatgcggcgaccttggcgcggttgtcgacaatctcaccaaattggttggggcactggatcagcacgccaaagtattcttcgctgcagtcgaacttgttgatgtcgtcgatcacgacctcgatgccttggaaatgggcgcgggtcttgatgacttcgatgctctgcgggaacacatcgttggcgacgaagaacttctttacgccggccttcacctgggcacggctgcgggagtgccagaacatcagcatggcttcggcggcggcggtgccttcatcgagcaaactggcgttggccaacggcagggcggtgaggtcgctgatgacggtctggtagttcacgagggcttcgagacgaccttgcgaaatctcagcttggtagggggtataagaggtgtaccagcccgggttttcaaggatgttgcgcatgatgacgccaggggtgatggtgttgtagtagcccaagccgatgtagctacggaactgcttgtttttggcacccaaggccttgaggtggctgatgacttcgtattcgctcatgccctcgccgatgttgaggtctttcggcagacggatctcgggagcgatgatttcgtcgacaagttgttcttgcgaggcaacgccgatgaccttgagcatcttttcagcatccgatgcggtggggccgttgtggcgtttgatgaagttgtttctaatcattgttgaattgtttattgttgaaatgtttaattgttgtatttcttttttttgctatcagctatcagccttcagcagtcagcattgtgctgatagctgacggcttacagctgacggctcattctatctcacgtagtttgttcttcaagtcgttgacggtgttgatgctttccagttcgctggccggtatcttgcgcagtttggtagaccattccttgaaatgcggggtgtctttcaagacttcgaaccttagatagtcgtattcttcgcctgaagccgtggctttgttctctttgtaaagcaggtcataaggatccatctggatggtccgctggtggacgaggttccagaagtctttcttgaattgtgcgctcgggtcgtcagcggcgggctgcggctcttctggctgtgtcgtctcctctggctttacaacgggttgtttttcctcctctacttctttttctttaggttgtacggcggagatagtgtcgttttgagccacggtatccgtggtgaccacttccgtcttcgggtcgttggtgggttttggtttggggtccttgaaaacgctcaaggccaaaaacacgacaacggctacgacggcgacgatgcctacggccaacaaaaccttccaaaggtttgacttaagcatgtcgttgaaaggctccttttcgtattcggcaatcagcatgccgtcatagatctggttgctggcgtcggggtcgaagcggaatcctttgaaaatatagcccttgggagggatgatgtactctttgacgtcgcgcccgtcctcatagatggagtaggggcaaccgtccattttcttgccctttccagggtcgatgctgaaacgcctttccttgaaaaaatccatttccgtttgctttcagaaggttagttcagcactttgttcatcgagatgtagtcgggataggcaagctgttggttgttgacgctaatgtatggcttcaccttgagtcccacgttgacaggctcgctgctggcaccggccaatttgaaggccaagttgacgatggcatcggccgattcgccgctgaatagctggaacaagtcggtggtgatgggaatcgtcacgacactgcttgagttggcaggcacgctgacgctgttgttcatcgtcgtgctgaccacctgcttgccgttgagactcagtatgtaatccatcttgctcatcgaagcggcaatgctgttggggttcttcacattgaggttgacattgaaggtcaccggcagctgcctgttggaaatggcgttggccaacgagaggagctgcatggcgttgaggtcgttcttcgacatgcctttgctcaggttgactcccagcatctggatctggttgacgctgttgaagtcaaaggtgcagttggcaaaattggccatttgggcgatttgggtcaggacatcacaagaggccaatcccatcgtgacgaaaaggataatgagggttttcttaaactttgacatattctaaatattttattatcaattaattaaaaagaaaaataccatgtaaggcaaggcaatagcctttactcgttttcaaagttgcaataatacaaaaaaagtcggacataatgcccgacttttaggaattatttttcaagggtcattcctcgccacggcgtgaggcgcgtttgcgctccaactcgtcgaggatgatcttgcgcagacgcaagctcttgggcgtcacttcgaggtactcgtcatcccggatgtattccatgtattcctccagcgagaaacgcacaggcgggatgaggcggatggcctcgtcgctacccgatgcacgcacattggtgaggtgtttggtcttgcacacgttgatgacgatgtcgttgctgcgtgtgttctcgccgatgacctcgccggcatagacgtcctcgttcgggttgacgaagaaggtgccacggtcctgcagcttccagatggcgtaggggatggcttgtcccgtctccatcgagatcaaggcgccgacgttgcgtgacggcatctcgcccttccaaggctcgtagtccttgaagcggtgcgagacgatggcttcgccctcggtgacggtcagcaagatgttcctcaatccgatgagaccgcgcgacgggatgtcgaagtcgaggcacatgcggtcgcccttgggttccatctgggtcatctcacccttacgggcgctgacctgctcgatgacacggccggcaaagtcctcgggtaccaggacggtgagggcctcgataggctcgcacttcacatcgtcgatgtatttgatgatgactttcggctgtccgagttgcagctcatagccctcgcggcgcatggtctcgatgaggatgctgaggtgcaggatgccacggccatagaccatcagcgcgtcgggcgaatcggtgtcttccaccttcaaggcgaggttcttctcggtctccttgtaaaggcgttcgcgcaggtggcgcgaggtgacgtatttgccttccttgccgaagaaaggtgagttgttgatggtgaacagcatgctcatcgtcggctcgtccacgtggatgggcggcagcggctcgggattctcgtagtcggccacagtgtcgccaatctcgaagtcgtcgatacccatcagcgcgatgatgtcgccagcctcgacgggcttcttggtgcgttccttgcccagaccttcaaaggtgtagagctccttgatggtcgacttggtcacggagccgtcacgtttcaccagcgagacgttctgtccggcctgcaaggtgccgcgtttcagacggcccacggcgatacggcccacgtaggagctgtagtccagcgaggtaatcagcatttgcggtgtgccttcctcgtatttcgcgggcgggatggtgtcgatgatgacatccaagaggtaggagacgttgtcggtgacgttgttccagtcgtccgacatccagccttgctttgacgaaccgtagacggtggggaagtccagctggtcctcggtggcgccgaggttgaacatcaggtcgaagacggcctcttgcacctcgtcgggacggcagttgggtttatcgactttgttgatgaccacgatgggcttcagacccagctcgatggccttctgcagcacgaaacgggtctgtggcatggggccttcaaaggcatcgacgagcagcagtacgccgtcggccatgttgagcacgcgctccacctcgccgccgaagtcggcgtggccaggggtgtcgatgatattgattttcacatctttatagcggacggacacattcttcgaaaggatggtgatgccgcgttcgcgttcgagatcgttgttgtccaaaatgagttggccaggggcttcgtccgattccttgaagagttgggattggtaaagaatacggtccacaagggtggtcttgccgtggtcaacgtgagcgataattgctatatttctgatattctgcattttagtagatattatcttgaaaatcaaggcgcaaaaatacaaaatttcagattttattattaactttgccacaaagaattctttagtacacacaattatgaataaaaaacgtacactggcaggcgtggtgaccgttatcatccttgccacaattccgatgaatatgagtgctcaagaagaaatgaaaatttggtgggcaggattccactacgaacgcgaaaatctcgctctcatgaagcagcgtatgcagaccctgatggatgcgcgaaaggaaaatcttcgcacgttgcccgtcagcgaactcattgaagatacacaattttggtggagcggtcagcaagtctatgtcttgggatatggtgaaactgatgacatccgtccatttctccctttctcgacacatcgcgacccacagccactctacaccctcatctgtaaaaaagacaagaacggcacaactgtgacagttaaagattatgctggttggaaagtagccatgcagcaggtaggaccatggcgcgtgctggtgttccgagatggaacaggcgcggtcaaggactgctatattggcaccacttgggacgatgtaacgaactacaggaatgtgcagaacctgtcgatgcacgacctctacgacggtgtatatgaaatgaaagacggaacaaaagtcgtgtttggtccagtcatggaacactacaaagacctcggttattcgtgcgacccaggcttcttctatttccattccgacaaatactttgcagtcacagacacccttgaatacggtggtggacgcgtgagccggggcaatccttcttcatccaagtggggcaagatgcctggcggaggcggtgccggtgcgattatgggaccgatgcagtggagagtgactccctgtccaatgggtcttaaagtcaaagtcattcacgatgaacctttcgtagagcatagtccgagcatcgaggggggcgaggctgaacttacgtgggttgaaggtccctacgaaggcattaagggacgcttacccatcgcatcggtgcgtccgttgcccacggaaatgttacgtctgctaccgaaaggcgacctgcatgtcgtcatgaatgagattctcgatcgtcacgccgatggcagcaaactgacggccatcgaagaacttaaccttggagtcatccgtgttgtcctcaacgaataacgacgaacatattagaagtgttttcctaaaataatgttcttggttcttctccctagtttttcatccagaaaaactcttccttagcgacgattggcttgaaataatcgtcgataatcccttgttcgacaagcgctttcggcgtgccttgacgcaatggctgctggggtgcgacgacccacatcacgtcggcgtggcggagcaaaaggtcgaggtcgtggctgctgaagaggatggtcttgtgcttctcgcgcgagagcttgtgcatgatgttgaccagctcgattttgctcggatagtcgaggaaggcagcaggctcgtccatgaaaatgaggggcgtgtcctgcaccaatgccttggcaatcatcactttctgttgctcgccgtcgctcaaggagacgaagtttcggttgaccaaatggctgatgccgacggtttcaaggctgtcgtagataatttgttcgtcttcggctttcagtttggccaggaggccgagatggggatagcgtcctgcggccacgatgtcgaagaccttcaggaaaaggtcgtcgggcttttcggtgagcacgaggctgaacaacgaactgcgctcggtgggcgagtagtcgcgcaagtccttgccgaacagcttgacttcgccgccgacgggcttgaggctggccgacagcgtcttgaatagcgttgtcttgcccgagccgttgggacccgccaaggccacgatgtcgccttcgttgaggctcacgtcgatggcgggcatcaaggcttggcctttgtagccgatggacagttgatatgtatgaaggacttcgctcatggacaggaattgtttttaactacagatttgacagattaaaccgatttgagtccggaaattggtgggatgcaagcatccgatgattacagatggccaggacgcttgcgtccttataattatgtagcgtcattctgtacaatctgtataatctgtagtttaatatcattggagagggagagaatctgtgtcatttggtcgcttgcgtccttgaaattatgtggcgacattctgtacaatctgtataatctgtagtttattatcatcattgtatatgactgactttttgccggtggaaaatcacccaaagcacgataggcgcgccaatcagtgccgtgaccgagttgatgggcaggttgccttcgaaggagggcagccgtgcgatgaggttgcagaacagggccaggtccatgccgaggaaggccgtggcggggatgagcagcttgtggtcgctgctgcggaagaggaagcgtgcaatatgcggcacggccaaacccaagaaggcgatgggaccgcaaaacgccgtgatgagggcagtgaggaagcccgaggccaggatgatgagcatgctgcttcgacggatgttgacgccgaggttctcagcataacgctcgccgagcagcaataggttcaaggtcttgaagagcaggaacgagcctatggtgccaactaccactgcgatggcgaagaacggcagttgtgctttgctcacgttggagaaactacccatgccccagatgacaaaagagtgcagcccttccttctggctgaagaacttcaggatgtcggtgaccgagcccgcgatgtaggcgatcatgatgcccactaaaacaaggctgaccatgctgcggagccttgaactcagtgcgaggatgagcagcaataccgcgaaggcgcccagaaaagccgctatggtgacaccgaaggtcgaccacagcgacaatgtgctgaccgacaggcctgtggccgtgcccagcaagaccacgaaggccacgccgaggctcgcgccgctgctgatgcccagcagggaagggtcggcgaggggattacggaagagggtctgcatcagaaggcccgacaccgatagaccgatgccagccagcagcgccgtgatggcttgtggcaggcggtagtcgaggatgatggcgcggtaggtcgaagtgtcgccatgcagcagcgcatcccagaattcattccacgggatcgacaccgagccgtagcgcaggttcaggacgaacagcacgatgccgacggccaggatcgcgatggaaaccagcgcgatgggtggcgttttgcggcggagggtatggtcggtgtcggatgtcattatgggattgttttgcgttgcaaagatagggtttaatttgattgggataggatatgggaaacaaataatccgcaaatcttgcggttagttatccgcagattttgcggattattggccgcaaaggttatgtgtttccagaaagcaaactatttcctatatcgttttagtgcctttgtcaactcgtcatgaatggttttgcgcaacgattttggctctatgacctccaattcgttgccttctttgaggatggtttggatgaaatcatgggtgggggccacatggtactcaaagagagcgctttgtttttcggtggctatctctttttgggagtggtgcaagggcaaggtgcgcaggtagttgtccatgggtgagtaggcgcgtagcacgatgcgttctgctttgacgttttggtcagggatgactccgaaataatcatggaaaaaggtctctgcgtcaaatgtcggatccattttgaagcagtggtcggtttcggtgagtttcgtcatgcggtcgagggcgaagactccgaggttgcccttttttctttcggttttgccgagcaggtaccagcgttggtggaagagtttcaggcagtagggttcgatgagggtggagtagggctctgaatcgctgaatttcttgtatcccattcgtaaggtgtgatggtctttgatggcgttgataacggtttgtaggtgttccaacccggcggggatgtcctccaacaggagttggtccttgatggagaggccgtcgaggaggatattgttgacggtgagggtgcggagcatccagttttgtgtggagttgtcgcggagtgcttcggggttggctatatagtattggtgttggttgtcgcattcgatgcagatgccgaacatgtcgtcgatggcttggcggatgcggtagaaggtggtgcgggagaggggacggctttcgtttaggtcgttggagagccaaagttggcagatgtgttcgaaatcgatcttttcggcacgtagtatggtgttcactagccaggtgaattgtctaaatgtgttcgagcttttcattaggaaaatgatttttgtgcaaaaatagtaaaaaaacatcaccgtttcatgttttgaaacagatgtgctgtatttttggcgcgattatagaatttaagaaatgaacagcgataagatttgggcaaaaaaagacgaggcgaccgaaatcgccccgaacttgatgttttcacaacggaataatccttattgtgaattgctgcatatcttgtgctgcaaaaatagatattttttcaataccgcaagacttttttgaaaaaaatagtaattttgacgaaatttttttggattttgaatattgttaacaaaacgaacttgaaaagatgaagaaaatactaggactagatttaggaacaaacagcattggctgggctgtggtgaatgaagccgaaaatcagactgagaattcttctattattaaactaggtgttagggttaatcctttgactgttgacgaattgttgaattttgagaaaggaaagagcattacgactaatgcagatagaaccctaaagcgtagtatgcgtcgaaatcttcaacgctataaacttcgtcgttcccatctgattgaagtgttgaaagaacggggctttattgatgacagtactttgttgtcggaaaacggcaattggacgacctttgaaacctgccgtcttcgtgctaaagccgcgacggaagaaatctcattaacggagttggcacgcgttcttttgatgataaacaagaaaagaggatacaaaagtagtcgtaaggccaagtcgactgaagaaggcaagttgatagacggtatggaaattgccaaaaagttgtacgatgagatcctaactccaggccaactatcattacaacttcttcaagatggaaagcgccatttgccagatttctatcggtctgatttgcaaatagaatttgatagaatatggcaacagcagaagatttattatcctgagttgctcacagatcaattaaaagaagaattaaaaggtaggaacaaaacacaaacatgggcgatatgcgctaaaccattccaaattgttggtgtaaaaagttcaaagaaaggccaagaactccgaaaagagaattatcgtttgagggtggaagcccttacaaaaaagctgggtttggaggaattggccattgttcttcaagaagtcaatggacagatcagtaacgccagcggttatctaggagatatcagtgatcgaagcaaagctttgtattttaatcatcaaactgttggccaataccaaatggcccaattggagaataacccacattatagcttgaagaaccaagtgttctatcggcaagattatctcaatgaatttgagacaatttgggagacgcaagcaaaattccatacggaattgaccactgaactgaaaaaagaaatacgtgatattgtcatcttctatcagaggccattgaagtctcagaaaggattgatttcgttttgtgagtttgagagtcgtcaaattgaagtggagattgatggcaaaaagaaggccaagaccataggtttgcgtgtgtgccctaaatcttcaccattgttccaagaattcaagatttggcaggttttgaataatgttcaagtgtggggaaaaacaacaccaaagcgtttcttattccaagaagagaaagaaaaactatttgccgaactcaattattgcgagaggctctcaaaggctgaagctttgaagttattatttggtagtccaaaggagtacgaccttaattataaagatttggaaggcaatcagacacaagcaggtctattggaagcctacaagactatcattgaaatgatcggtcatgatgagtttgatttttcaaaactgtcatcggcaaaaaccattgaaaaggttgacgaagtgttttctggattgggaatcaatacaggaatattatattttgattctagtcttgaaggacatgctttagagcagcagcctatgttcaaattatggcatttgttgtactcatttgaaggggacaagtcagaactaggtaatgcaaatctcattcaaaaacttcatgagcagtttggatttgataaagagtcagctactgttctggctggagtggttttctctgacgattatggcagtttaagcagtaaggctatccgtaagattttacctcatttgaaggatgggttggaatatagtgtggcctgtgaatatgctggttatcgccattcaaagagttcgctaactaaagaggagatagaaaacaaggtattgaaagacaaattggaattgttgcctcgcaatagcctgagaaatccagttgtggagaagattttgaaccaaatggtcaatgtggtgaacgccatcattgatgaatatggtaaacctgatgaaatacgcattgaattagctcgtgaattgaaaaagtcggccaaggaacgcgaagaaatgacgaggtcgattaatgaaacaaccaggctgcacgaaggatatgtaaagattttgcagggcgatcctttcaaattggagcatgtgagtcgcaatgacattataagatacaaactctatgaggaacttgaaatgaatggatataagaccttgtattccaacacttacattcctcgtgagaaactgttcagcaaggaatttgacattgaacatattatcccgcaagccaagttgtttgatgattcgttttcaaacaagacactcgaggtgcgccaggtcaatctcgataaaggtaatgccacggcaatggattttgtaaatgaaaaatacggagcacaagttgcggaggagtatgtggctagaatagagaacctatatagcaaaaaggtcataagcaagacgaaacatgacaaactcttgatgaaagaagcagatattccgagtggtttcatcaatcgtgacttgcgcgattcacaatatattgcgaagaaagcccgcgagatattggaggagatagtgcgttttgttgtgcccaccacaggcagcattaccgatcgtttgcgtgaggattggcaattagttgatgtaatgcaggaactcaattgggacaaatacaaccaattgggacttacagaaatcattgaaggtcgtgacggccaacgaattcgccgaatcaaggattggacaaaacgtaatgaccatcgccatcatgccatggatgcactgacgattgcctttacaaaacgtagttttatccaatatctgaataatttgaatgcacgagtccaaaaaggagtagatgattatattgatttggatatggttgaattgtctttgttggacaaagaccagcgttcagcagcggtgtatggtattgaacgaaaagaattgcatcgtgatagccatggcaggcttcgattcaatgcacctatgcctttggaagagtttagggccgaagcgaaaagacaattggaagctattttggtttcaattaaagcgaaaaacaaggtggtgacacaaaatataaatgtttccaagaccaagaacggaagaaacaagaaagtacaactcacgccacgagggcagttgcatttggaaactgttttcggtagttgcaagagatatgttaccaaagaagaaaaggtgaatgcttcgtttgatgttgaaaaaatcaataccgtagcaaacaagcggtatcgagatgcacttctcgcgcgcttgcagcagtttgacggtgatgccaaaaaggcttttacaggaaagaattcattggataagaatcctatttggttggatgatttgcatacgattcaagttcccgaaaaggtgaggattgtgacttttgaaactatttatacgattcgtaaagacataacgccggatttgaagattgagaaagtggtcgatgttcatatccgtcggattcttcaagaacgactggccacttttggtggagatgccaagaaagctttctctaatctggatgaaaatcccatttggcttaataaagaaaaaggcattgccattaagcgtgtgaccattacgggcattagcaatgcggaatcgcttcacgacaagcgagacaaggaaggtcaattggtcttggatgaaaaaggcagcacgcaacccgttgactttgtgaatacgggcaataaccatcatgtagccgtttaccgtaaacctaaattggataagaatggacagcatttgttggatgaaaatggtgaactgcaatatgaattggatgaaagaatcgtgtcgttttatgaggcaacatcacgggccatgttgggattgcctattgttgataaggaatacaagaaagaggaaggctggcaattcatgtttaccatgaagcagaatgagtattttgtatttcctcgttatgacgcgcagggcattatggtcttcaatccattagattatgatgaggcttggtataagaatgctgataattatgcaacaataagtccgaatttgtttagagtgcagaagttctcgtttaagaattatgtgtttagacatcatttggaaaccacgattgataacagcgggtatagtcttagaggaatcacatggattgattttagaagttcaaaaggacttgacttgattatgaaagttagggttaatcacattggccaaattgtttcggtcggagagtattgaacaaagaattgcgtttatgctaacataaaaatgatctaatgcaaagatggtctgttcgtttgtaataaaggtgattatagtttgtatttgacaatgataaagcgcaccctcttcttcggaaatcccgcctgcctctccatgcgcaatgcacaattggtcatcaaactgaacgatgcccaaacgcaagaagaggtaacgaagaccgttcctatcgaagacattggcgtggtggtgcttgaagaccgtcaaatcaccatcaccaacggggcgatggatgccttgctgcaaaacaattgtgccgtcgtcacctgtgatgagaagcatatgcctgctggtttgttgttgccgcttgaaggtcatacggtgcagagtgagcgtttccgctggcagattgaagcttctctgccgttgaagaaacaactatggcaacagactgtccaagccaagatccgtaaccaagcctctgtgctgaagcggttgagtggggtagaggtgggttgtatgatggcttgggctaacgatgtgaagagtggcgatagcgaaaacttggaaggtcgggcggcagcctattattggaagtccgtttttccggaaatggagcggtttgtacgcgaccgcgaaggtgaggcacccaacaaccttttgaactatggttacgccatcgttagggctgtgattgcccgatcgttggtggccagtggtttgttgcctacctttggcatccatcatcacaatcgctacaacgcctattgcttggcggatgacgtgatggagccctatcggccgtatgttgacgagttagtgatagatattttgcgtagtggcgttgattgtagcgaactgactacagacttgaagcgacaattgttggggctacctgtaaaagaagttgtcattgacggtcgccgtagtccgttgatggtggcggcatcgcaaaccacagcctctttagcgaaatgttttggcggtgaattacggaaagtggtatatccgatgatggaattgtaatggaccgatttagcgaatatcgtattatgtgggtgctggtgctttttgatttgcctaccgagacaaaaaaggagcgcaaggcttatgccacctttcgaaagcgcatcatggccgacggctttacgatgttccagttctccatttatctgcggcattgtcccagctatgagaacgcagaagtgcatatcaagcgggtaaaatcattcatgcctgagtttggcgatattggcatcttgtgtattaccgacaaacaatttggtgacatggagattttcagcaactgcaagccgaagacggtagacacgccttgccagcaattggaactattttgaatcgggaaaaatagtcataacaaagaaaaatccaactcaaatgagctggatttttcttttctgaaacaacttctaaattgttgtggctctttgctttacacatatcgtgttgtttcaaagagcaaagatacaagataaatgcaagcaattcacaacgagggtgatcgttatttccctatttccagggttgtttcaaagagcaaagatacaagataaatgcaagcaattcacaacttagtgcaagcgcggccgttattgttccatgttgtttcaaagagcaaagatacaagataaatgcaagcaattcacaactgataacaattgcaatcatcaatgaaaaaggttgtttcaaagagcaaagatacaagataaatgcaagcaattcacaacaaccaactacgtttaaccaactacgtagagttgtttcaaagagcaaagatacaagataaatgcaagcaattcacaactcgtgctaccgccttgcaacgttttcttgagttgtttcaaagagcaaagatacaagataaatgcaagcaattcacaacaagttaatgatggatgcgaatgtatctaaagttgtttcaaagagcaaagatacaagataaatgcaagcaattcacaactctagacttaaagcatatatgaatccctcagttgtttcaaagagcaaagatacaagataaatgcaagcaattcacaacgaaatatctcttcctataaagtcggccatagttgtttcaaagagcaaagatacaagataaatgcaagcaattcacaacgtgccgtaggggatgctcgtctcgaacatgagttgtttcaaagagcaaagatacaagataaatgcaagcaattcacaactccacgcctgcagctcctgaaattcggtcagttgtttcaaagagcaaagatacaagataaatgcaagcaattcacaactctcttacaacggctgcgtcaacgtaggtagttgtttcaaagagcaaagatacaagataaatgcaagcaattcacaactatcatagaaagatctatgtagaaaatgtagttgtttcaaagagcaaagatacaagataaatgcaagcaattcacaaccgttcgatccttggtcttggtaaatctgcgttgtttcaaagagcaaagatacaagataaatgcaagcaattcacaactcaagaggagcaatacccatgcaatcatggttgtttcaaagagcaaagatacaagataaatgcaagcaattcacaacacttttactcgatttgttaccctggattatgttgtttcaaagagcaaagatacaagataaatgcaagcaattcacaactaaaggctttgctggtattcgtaagtatgagttgtttcaaagagcaaagatacaagataaatgcaagcaattcacaacgacgaggcagtaggggtagatgtgtctctggttgtttcaaagagcaaagatacaagataaatgcaagcaattcacaacaagcgcagcgggatgcattggtaggcgtagttgtttcaaagagcaaagatacaagataaatgcaagcaattcacaacttttcttggcttggtaacagaaatgaatagttgtttcaaagagcaaagatacaagataaatgcaagcaattcacgaccaagatttgccggtgtgttttttcagccatgttgtttcaaagagcaaagatacaagttttggactcctctgcgtgtgggtccctatgtttttttctaaattcatcacaaaaaccaaataatatatatctttgtccccactaaacaccctaaaaatgacccccatgaccagaaaaatacacctccaagaagaagccgtacgctgtctgctctgcgccgatgcgccgtgcagtaaggcctgcaagaatggcgacccggcacgcgccatacgcgccatacgattcgacaacgaagccgtcgccggactgtggctcgacccgtgcagcgacgccgagctgcaagccgccgaggcagcctgcatccactacgataggccgatccgcatcagggaactggcggaagccgtcaaaggcacgaagccacacaaagaccttcccagcctcgccatcgacttctgtggcatcccttgcgagaatcccttcttcctcgcctcgtcggccatctgcaccaactacgagatggtggcgcgggccttcgaagcaggatgggcgggcgtgttctacaagaccatctgcatggaggacatccgcgaggtgtcgccgcgcttcgatgccgtcaacgaaccaggccgctccgatttcttcggtttccgtaacatggagcaattgagcgagaaccccgttgaggtggacttcgacatcctgcgcaggctgaaaaaggactatccctcgaaagtcgtcgtggcctccatcatgggcaacgccgagacggagtggatcacgctggcgaaaatggccgaagaggctggcgtcgacgcggtggagctgaatttctcctgcccgcagatgaagttggctggcatgggcagcgacgtggggcagaactcggaactggtgctgttctatacggcctatgtgaaacataatgtcaagataccagtcatccccaagatgacgcccaacatcacccaaattaaccaacccgccatggcggcccacttcgccagcgccgatgcggtgtcggccatcaacaccatcaagagcgtgacgatgaacagtcgcggtgccgtggccgataagaagaccgtctccggactctcaggccgcgccgtgaagcccatcgccttgcgtcatatcctcgagatggcgaaaaatcccattttcaccgccaccaacgatggcaaacgcatcgagctgagtggcatcggtggcatcgagacctggcgcgatgcgctggagttcatccagctgggctgcagcaacgtgcaggtgtgcaccgccgtgatgcagtatggctaccgcatcatcgacgacctcgtgctgggactgcaaaactatatggcagaacgcggcatcgagcacctgtcggatctggtaggagaggagctgcccaatttcgacacgcccaccaacctcgaccgcgacaccatcgtgtatcccaccttcgaccgtgagcaatgcatcggctgcggccgttgctacacctcgtgtcaagatggcggccatcaagccatcacctttgatgccgacttgcgtcagccgcatctcgatggaaagcgttgcgtgggctgccatctctgccgacttgtctgtcccacaggcgccatcggcgtggcgagacgcattgcgaaaacgaaataaacggaattaagattcccctgcggggaatggcgtaaagtactcgtataataagcggcggcaagtaatgtttacccgttgtaaacgctacaagccgccgcattttagttggacgaattctccattaacttcgttgaatcttcgatttcccgaagggaatctcttccagctttagaaccttaacgttagattgcccatgacatggaaaccagccatcgggatgaaaccgatttggtagtagcggttgtcgttggggtgaccgtagctgtcgcagatggctgagtagacccagccactggcggcgtagcgcttgttgaagatgttgttgaagttcaccttcacgatggcttccttgacgactttcttgggtttcagcgtgtagccgaggctgacattggaggtgctgtaggccggcaacgaacggtcgaggctctgggtattgtcgagatacatgcgtgagacataattcgtgtgccaggtggcctcaaatcccttgtggtggaaggtgacgaaaccgttcaggatggccgaaggcgagaaggctaaggtggagttgtcgtagtggatgacatcgtagccgtcaccgtcgtaggcctggccgttggcatcggtgttgccttcccagtcgtcccagttctccacgacttcgtcgaagtccttgatcttgttttggctcaaggcggcgttggcctcgatggtcaaccacttggtggggctcacgccggcctgcagctcgacgcccatgcggtacgagtccttgatattggtggtcagggcctcgccgatgtcgctgacggcaccggtctgcacgaactggttgttgtagtccatgtaatagaggttggcgccggcttggaagatgcgtccgttgtagttgtaacccaactcatagtcgaggagttgctcgggcttagggaagggataggaaccgttgtcggtgaagttgttacgctctggctcgcggtggctcatggccacggaggcgtaggcgtggtggctgtccgtgtcgaaggagatgccgcccttggggttgaagaatgggtacttctcgtggatgttgagttcctggttgtagtattggctgtcttcttcgtagaacttgtcgttgatgccgttggtcttgtagtccacatagcggaactgcatgtcgccgaagacggtccagtggtcggcgaaggtgtaggctgccttgacgaagacgttgccgtcgagcttctgtgcgtcggagtcgtagtatttgtagtcgccatcagcgaggtatttgtctgcgacgtcttggttggcgatataattcacataaccgaagtggttgccttggaaattctgggccgagataccgccgatgacgttccaatgtgcgtccttgtaacgtgtgaaccacacgaggccgtaggtgtcctgacgcagtcctttcttgcggacgaagtcggtctttttcacctggttgccttcagcgtcgtaataggtcatgccgaacttcgagagcttgttgttaggacggaactcttcgtagtagccgtagccgtaggtgtagtgcagtgtggccgtagtcgaccagtgctcgttgatctcccatgcggcggagaggaggttgtggtcttgccagaagttgtcagtggtgcgctcccagaaggtgccgtcgttcatctggtagcgttgggtcatgtagtggccgttctcgtccttgacgaagttgccgtcctcgtcggtgacgaggtattcgtagagtgagttgaactgtcccaagcccaccttatacatatcggcgtaggtcttgatgcccgtgtgctcaccataggtgccgtccataaggctgaggtcgttgttgcctgccgtcacgccattccaggcctggccggtcatctcgaagttaccgatgttcttgtagcggaggatgaagttcttgcccatccaggtgaggccgccatagtagctgccgctgcggcccttggtgccgtggatgaagccgtcggtgtgggtctcgtggtaggctccgtcgacgatgaggtggttccaaagcaagccagtggaggccttggcgccgaagttgagcgtgttgaatgaaccgtaggagcccgtgatctcggcactcggcacgaaggaaggtttggccgatgtcagcgatatcgtgccgccgaaggcgccgtcgccgttagtggagctacccactccgcgttggatctgcactgagccgagcagcgagccatagctgttcatgttggcccaaaacacgcactgatcctcgggcgagttgagcgacacgccgtcgagggtgacgttgatgcgcgagtcgccagcgccacggatgcgcatgtaagaggtgccggagcctatgccattctcaccccatgcgatgatgccgggcgtcttggcgaacaggaaggggagctcttggccggtcttcgaaaagtcgttgagctccaccttctcgatgttggtgacggagaagggggcgttcttttggacacgcaaaccgccaaccaccacctcgttaagtacttcgtacttcgtggtgtcatacaccacttcattgttttgagcattcacatttgccgcgaataacaatgcggcgacaacaaaagaaaatcttttcatctcttgagcttttagtttaataaaatgtgaaggggaatgcttgaatctatccaatccctacgccggcattacccggatcaggttagagggtatgttctcagccttttcaccctgccgaagcagggaaggcacccctttgtaattctgcggcaaaaatacagcttttttcggaacgctgataaaaaagtgttatttttgctgacaaaacaaaggcacatgagatgcagattaataggtttggatattattggctggatacatgggtgatggccaatgtcatacaattggctacgcaagacttttgcgcccgcaatctcaaccacatcaacgacccttgcgggcggcagtacgaccaaatgacacaggcggcacggtctgttcccgccaatattgctgaaggcaattcgcgtcattcaacttcaaaagaaactgaaatgcgtctcacggatgtggctcgtgcaagtttggcagaactagccaacgactatgtgaattggctcatgcgacatgaggagattccatggtcggtgaagtcagaagaacaccaaaatgtaagcaatatccccctcgaccgacccacttataaagacgacgtgcaacacctcagcagcattcacatcctgaagcagaagcacaagtttgatgcatggctttgctccaaaaactcaatgacagaagccaactgtttgcttgtcctttgcaatcgcctcattatgatgctgggcaaacaaattgagaaccaacttgaggcattcaaagaagaagggggctttgctgaagcattgtcagctgaaaggctagcccgcagggcggagcaaagtgctcaaaacgatgctcccatttgtccaaaatgcggtaagccgatgataaagcgtatggcaaaaaagggtaaaaacgctggtaatgccttttggagttgctcaagctatccagaatgtgatggaacaaggagcatttgacaattccggtagattctttcgtaatatcgtaatgacggaataacgacattacgataatcacaaggagatgatcaaaaacctattagataacacaaaaacccgcaaactgccgccaccaaggcattaactatctttgctttcaagaaacttcttttgctctcggcgagcaaaggcaacgaggcatggccgtcctgtgagatggagctggccaacagcaccgagaaaggtactgtgcccgtggcaaacaaggtgacaaacagcaaatgcggtcccgactcggggatgatgcccaccaagacggccaacaggatcatccacgggatgttgttgctgataagggtttcaatgtcaaagtaatgcagcccgacctggatgataaacaaggcaccgaaggtccagaggaagatgctcaagaaatgcttgcggatgatgtgttcccagaggtgctccttgacgacatgctcgggtgccgtggcgatgaaccacactacgaagaggctcactacggcgaagatgaggttcatccagtattcgtcgaagatattcagctgggtgtggacggcttcctcgtgttcatgttcgtgctccagcatgccgaaggcgagggcagcgatgaacaggatgacgccaagcagcagggcgatacgctctgcgctggcgtggcgcatgttgcggaacgatgctttctcaggttggtgcgtctcgtcatggtggtcttcgtcatggatctggtagccgtcctcgcagccttcgtggtgggcttcgttgttcgacttggagaacctgtccaccagccatcccacgaggatggcgatggcgaacaagattgccatcagtagcagggcctccttgggaatcatggcaagcatgacgaaagcttcgtcgcccgatgaggcaatcatcatggcgatcaaggcgccgaagctcaacagcttgtgcgaatacatcgacacggcggcaaaaccgcccatacagccggggatgatgcccaaacccgcgcccaaaaccacttgtccgaagcggttttgacgtagccgcgagaaccatttcccgtgagaatggatgttgacatactcgatcatcagcatcataataatcaccagaccagtgattaagacgctgtttctcagcacatccaaaaacaaatgcaaaaactcgtgcatgggtcgaaaaatgagccgcaaaaataataattattatctttgcaccgaaaaagaaataggatcgggataacgaaacctatcctttaagcgtcattgcggacctgatccgcaatctcctgaacattgggctgtccttcttgtgcaggagatggcggatgtccctccgccatgacgaaagggaaggagtagttcttctcggtcagttatcggtgaaatatgaaaaaagaagattgtttttacctcggcaagatcgccaagacccatggcctgaaaggggaggtgaccattaaactggatgccgacgacccttcagcatacctcgaaatgaagcatttcttcctcgaaatcaacaaggtgctgacgcctttctttgtggagaagataaccccgaatggcgacaagttctttgtccaagtgcaggacatcaagactgtcgaacaggcacagaatctggtgggaaagtccgtgtacttacctttggaaatgctgcccaagttaagtggcaagcagttctattatcatgagatcgtgggcttcacggtggtcgacacggagaagggagagctgggccccgtcaccgaggtgctggaatatcccacacaggccattctacaggtgatgaaggacaagaaggaggttctcatcccgattttggaacaagtgatccagaatgt

SEQ ID NO: 2152 - DNA, 24260 bp, synthetic construct
  misc_feature 1..24260: note = Synthetic
  source 1..24260: mol_type = other DNA
tttgctcttggaaataacggctgctctcgaaatacagggcgtagtcagaggtgcggccgtaggtgttacggttgtagaccgagctagagagcgggttgatggagcttgaaggagtggatgaatacttgttcttcaccatgctataacggatgttgaacttgtccttgtcggtgatgttccagtccaaacgggcgagcaacttgtagtcaggagtgctggcgctgtagttctggtaacgaccggggttgtaaccataggtcttttggagatagtcgctgatttcttccatcttttcgaccgtaggacggttgtattgcgtggcaccgccaaattcgtcgtcttcgctgttgcgggcaaagtgggtttggccggggtcaacgtcgctctggtattcgaagttcacgaagaagaacaatttgtccttcacgatgggaccgccaacgctgacgccaacggtgttgtccaaagacttggcgatggccagacggtcgggatagttgccgaattcgtcctttttgccgaacttggagccagtgagaccgttgttggtgaagtagtcatacacgctgacgtgccagttgttggtaccgctcttggtgacggcgttgatggcaccgccagtgaagccgctatgacggacatcgaaaggcgtgacattgatggtcatggcctcaagagcgtccaaggagatggggctaccgccagcaggcaggttgccgccaataccgaaggcgttgttgaaagcagcaccgtcgacagtgacgtaggactgacgatagttaccaccaccgatggccaggccgttggaagtggcagcagcctgaggcgtcagggacaacacatcgttcaagctacgtgagatggtgggcagggtattgatctgctcgttgctgatggccgtggtggcaccagcgcggtcgctgtccatgccattggagatggcatcggccacaacggagacttcgcccaagccaatggcttcttcgttcaggcgaacgtttaagatcttggtctcaccaaggttggcaacgacgccttcttgtttcaccgtctggaaaccgaccatacgatactcaatcgtgtaggggccaccgggacggatgttgagcaaacggtagttaccgttggcatcggccacagcataatactgcgaacccgaaggggtgtgcgtggcaacaaccgtggcgcccggaagcgtacccttgttgttgtccgtgatttttccactgatgctcgaagtggtcacctgggccatcaagctaatggaggcaatcatagccacgaaaaaagtaagtaactttttcatagataataatttaatgttaataattgagttgattgtatttgttttagttgtgctcattttcgttttctgcagtctataagaccctgcaaatataaggcattactttgaattgccgagccattttttgcaaacatttttttgtttttcaccaaaagaaatcaacatgttttgtttataacttataaagatttgatttttaaattattgtgagtagattctaacctcgtttcatcctgcatttttcaccttattgaaaatgaaaatggacccaaacgaatttcttcatctgttttgggcctagtctcgatttttttgcgtacttttgaagcctgaacgaatacatccatactcatgaaaagactatctatcatcatggcgttgacggctttggcactgtacttctgctcttgcggaaaccatgtctccaaacagttcaaggacatggaacaagaagtgctaaccattgaaaatgagatcaatgccacctctgattgcgacgacttgcagatgctgaacttcggcatcctgggcttgcgctccgacttggacaacctgatgcaatcggccgctatccccgacggtgaaatcagccaactcgacgagatgctcacccggctcgaagccacttggaacggcaagtggtccacactcgaatgcgacaaaaacctcagcgacgacgagatggacacctcaggtgaagaggatggcgaatacccagaatgataggtatctataaatactaaaaaaacgaaagaccatgggattcttttatcggcataaccccaagaaattcaactatagaccccgctatttcgaccccgaaatgcaagagtgggaagagaagaaggccgctgcaggcctcgactcgaaactgacacacgaagagcaactccgcatcaagatgcgcaagagttggagcgtacaaaaagacgaggagagcaaggaggaacaacggaccaaactgattcgcagaatcgtgctgggcgtgtttgtggccttcctgttttatttcatcttctgtacgccgctgatgaccaatgtggttcgtggattgatggggaaataagctatgcttgacatcatcaaacttttgcccgacagcgtcgccaaccagattgcggcaggcgaggtgatccaacgccctgcctcagccgtcaaagagctgatggagaatgccttggacgccggcgccacgcaaatcgacctcgtcgtgaaagacgcaggcaagacgatgatcatggtcgtcgacaacggctgtggcatgtcggagactgacgcccgcctttgcttcgagcgtcatgccacctccaagattagcaaggctgaggacctgtttaatatccgcaccatgggtttccgtggcgaggccttggccagcatcgccgccatagcgcaggtggagctgaagacgcgccgcaaagaagacgaagtgggcgtgaagattgtcaacgaagggtcggtggtgaaggagcaaaccctcgtgcccatgcagcctggcaccacgttcacggtgaagaacctgttctataacgtcccggcacgccgcaacttcctcaagtcgccccaagccgagatgcggcacattgtggaggagttcacccgcgtcacgctgatgaaccccgagattggctttacactcatcagcgacggcaaggaaatctatcatctttatcccggcaacctcaagcaacgtatcatgggcttgtttggcagcaactatgaggaacgcctgctgcccgtcaaacaggagtcggaacgcgtgcgcatcgacggctatattgtcaagccggaatatgccaagaagacccgtggcgagcagtatttctttgtcaacaagcgatttatcaaacacgcctacctgcatcatgccattgagaacgcctacatggagatgattcccaaggacagcttcccgggctatttcttaaatatagaggtggatcctgccgacattgatatcaacatccatcccactaagaccgaagtcaacttcttggatgtcaagctggtgtatgctatcatgcacgcagcggtgcgcaaggctattggtcaacataacctctcgccgatgatcgacttcgacgagtcggctgacctgaacaacgactttggcttggcgatgagtatgggcaatcctttgtcgatgcctaatgtgcccatcgacccgaatttcaatcctttcaggaaagagtcgtcgccacgtgagacgcattgggacacgtcgatgcccaaagagagctatcacacgcctggcgactggcgtgtactctatggcgatcgtaccgacatggaggaagagcctgccgagccgaagcaggaaacgaaatcgcagtatctgcaagtgaaccagtcgtatatcgtcacggcggtgaagtcggggttgttggtcgtcgaccaaaacctggcacatttcagggtgctgttcgagaaatacctgaaagagatggagaataacaacggcatctcgcagcaggagctgtttccgcaggccttgacgctcaacctgaacgacgcctcgctgttgaaagagatgctgcctgagttggaaaacctgggtttcgtgttggaacaagtcaatcctacgacctttatgattaacggcacgcccgccgacgcagaaggtagcgatgccgtggcgctgttggagaaggttttggacaactataagatcaaccgcaccgacttgcagctggataggaaactcaacctggccaagacgatggcgtcgcagctttgcatcaaggcacagaccaaactctctgagttggagatgcaaaaccttgtcgaccagctgtttgcatgtagcgttgccgaagtcgcacccaatggaaaaaagatttatgttgtaatgaatatggaggaacaattcaaatgaacgaacaatacagtcctactggtttcaaggtgttgcccaccatagtgaaacacctgctgattatcaacgtgttgatgtattttgcttattatgtgttgctgaagcaaggcatcatcaatctgaattattacttaggaatttggagcttatcgacaggcttattccgtatttggcagccgctgacctatatgttcatgcacggcagtttcgaccatctgtttttcaacatgttctcgttgtggatgtttggctcggcgcttgaaaacttttggggatccaaacgattccttttctattatcttgtttgcggtattggtgctggattgctcaatatgttggtaccaggggcgcatgtttcagtgggtgcgtcaggtgctgtctacgcacttctgttagccttcggcatgatgtggccaaacaactatatttatttgtatttccttgttcctataagaaccaagtggttcatcatcggtatgattgttatcgagcttttcgaaggcatcttccgctctacggatggtatagcgcattttgcgcatttaggaggcatgttgataggtttccttatcatcctttattggaaaaggcatggaggtatgacgggcgatttcagcataaaaaactggtttaattcattgaaaaaccgcaagaaatatacgcgttacgaggaggtctacgacaaggtgccgcgttcggatgaggagtacaactaccaaaaggcacagaaagagcgcgacatcgacgccatcctcgacaaggtcgccaagagcggttacgaaagcttgtcgaaagaagagaaggattttctttttaaaaacagcaagtgacatggaaaggcgagagagaggttttttcgggaaactaattgtgtttatcttgtcgctcttggctctaatcggcttggtggccatggcactcagcgtcctcaacgcatatgtcaacccgaatcgcttcatctggaccacgttttttggcttggcgttttggggaattcttttttataacatattgatactcattctgttgctattgatgaaatcacgcaaggcatggatagcggtgcttgccttgatgatcgccattccgggtttcagcaagtcgtattcaagaggtaagaaggtggaggcagatagtagcatccgcatcatgagttataacgtgcacaacttcaagcatgtcgatggtggggtgaaacaggaggacttcgccaatcaggtcatggacatggtgcgcgaacagaatcctgacctcttgtgttgccaagagtttgcggggtttaaaagtggtgtgacgagacagaaatgtatcgatatctttgcggaagaggctggatttcaatatgtttattacaatagacacaacaactatgccggcaatgtcgtcttctccaagtatcccatcgaaaaggtgtcggatgtgtcggacttcgccaaggaaaacacatacggcgtgatggtctcggtagatgcgggcgacaagggcaagttccacgtcgccaacgtccacctgctttcgtatatgattaccgacagcgagattgagagcctgacgacgccacaagagcggcaagaacttgaggcgttggggaagaccttagtgcataagctgaatttcgcctttcaatgtcgcagtgaggaactgcaaaaagtgcttgaggggctgaccccgattgaaggccccgtcatcgtctgcggcgacttcaacgaaccgccgctgtcgtacaactaccgccagatgcaaaaagcgggcttcgtcgacaccttcaccaaggtgggacacggcatcaagcccacctacgccggcaagttgccgctgctgcgcatcgactacgtctgggccaacgacggcgtgacaccacttgatttcaaacgacaccgctggaaggcctcagaccattatccaatcattttggattttgcgataaacgaataataaaatgtggagacgcgataaatcggcgtctctacaactgaataactgaacaactgaacaactaacaactgataaatatgaccctaatcaaatccatatccggcatccgtggtaccattggcggccagccgggcgacaacctcacgccaatcgacatggtgaaattcaccgctgctttcgtcaaattcgtgcaacatcataaaggggtgaagcgcccgcgtatcgtcgtcggccgcgacgcccgcctgtcgggattcctcgtcaatcaggtggtctgtggcaccctgcaagctatgggcgccgacgtgctcgacatcggcctgagcaccaccccgacgaccgaaatcgccgtgacgggcttgaaagccgacgccggcatcatcctgacggccagccataaccctgcccagtggaacgccctgaagctcctcaacgagaagggcgagttcatctccgccgccgaaggtgcctggctgctcgacgtggccgccaaagacgacttcgacttcgtcccgatcgaggaaatcggcagctatcaacaggtggatggctggatggacaaacacgtggagatggtgtgccagctgccgctggtcaacaaggaggtgattgcgaaagccaacttcaaggtggccgtggatgcggtcaactcgacgggcggcatcgccatccccaagatgctgcgtgccctcggcgtgaaagaggtgctcgaactcaactgcgagcctacgggcaagttcgcccatacgcctgagccgttggcgcagaacctcaccgacatctgccgctacgtcaaggagcagggctgcgacttcggcgtggtcgtcgaccccgacgtcgaccgtctggtcttcgtcaaggaagacggcgagctgtttggcgaggaatacaccttggtgtcggtggccgacttcatcctgaagcacacccccggcccgacggtgagcaacctgtcgtcgacgcgtgccttgcgtgacgtcacccaaaagcatggacagcagtactttgccgctgccgtgggcgaggtcaacgtggtggagaagatgaaggaagtgggtgccgtcatcggcggcgaaggcaatggcggcgtcatctatcccgagctgcactatggccgcgacgccctcgtcggcacggctttgttcctcacccagctggccgagaagaaggtgaagtgctccgaactgaagaagacgtatcccgcctatttcatgtcgaagaacaagatccaactgacgcctaccaccgatgtggacggcatcctggccaagtttgccgagaagttcaagaacgagcaggtgaccaccatcgacggcgtgaagatcgacttcgaggaaggctgggtgcatctgcgtaagtcgaacactgagcctatcatccgcatttatagcgaaggcaagaccgaggccgaagccgaacgctttgccaatatgatactggaagaagcaaaaaagatggtttaattgactatgagactctgtgataatagaaaacgatactttctatgaccgtcatggcggagggacatccgccatctcctgagcaagaaggatacccttttcgttcaggagattgcggatcaagtccgcaatgacggtataggctatgggtcgtgtcaactgaacaactcccaactgaacaactgattatgaaacgaggattcggaagcgacaaccattcgggcgtatgtcccgaggtgttggaagccatcgcccgagtgaaccaagaacacgccttggcctacggcgatgatgaatattgtgctgcaacggaacggaagttcaagcagctgtttggcgagcaggcgagggtgtttttcgccttcaacggcacggggtgcaacaccctttgcatcgatgccatggtccattcgcatgaggccgtggtgtgtgccgagaccgcccatatcaacgtcgacgaatgtggcgcgccacagcgcgtcgtgggctgccgcctgctgacggtagacacgcccgacggcaagctgacgcccgagctgatcaagacgcgcttgcatggcttcggcttcgagcaccactcgcagcccaagttgattagcatcacgcagccgacggagctcggcaccttgtacaccttggacgagatcaaggccatcgtggggctggcgagggaatacaacatgtacgtccatatcgacggcgcccgtctgggcaacgccgccgtggccttgggttgcaccttcaaggagatgaccaccgaccttggcgtggatgccgtgtcgtttggtggcaccaagaacggcctgatgatgggggaggcggtggtgctgctcaaccccgacatctgccccgacttcaaataccgccgcaagcaggccatgcagctctgctcgaagatgcgtttcatcgcggcgcagttcgacgcctatttcgacaacgacctatggaagcgcaacgccgagcactccaacaagatggcgcagctgctctataaggcggtgaaggacatccccggcgtgaaggtcgtctatcccgtgcaggccaacggtgtgtttgcccagctgcctcgcaaggtgtggaaggaactgcaaaaccattacttcttctacgactgggacgaagacgccgacgtggtccgctggatgtgtgcgttcgacaccaccgaggacgacatcgcgcagtttgtggggctgttgcgggagatgatgaagaggcaatagctattcatattttttcaatgcctcaaccaactcatcatgaatcatatttcttaacgaaagtggttcgaccacttccaattcattgccttcttttaaaatggcttgtcggaaatcgaaggttgggacgagatggtattcaaaatctgtgtatgtgtcggtcttgcttatttctttttgtgagtgatgcaagggaagagtgtgcagcaggttgggcatcttgcaataggctcgtaagacaatgcgttggacagtggtttcttcaccgatgaacacgccgaaataattcttgaaaaaggtctcggcgtcgaaatcgacggctaattcgtatggtgcatttgtttcggttaattccgtcatacggtcgagggcatagatggccatggcaccgcctttcctttcgcttttgccgagcaggtaccagcgttggtggaaaagtttcaagcaataaggctcaattagagtggtgtatggctctgagtcgctgaatttctggtaacccatttgcagggtgtggtggcatttgatggctgtgatgatggtttcgaggtgttcgaggcctgcggggatgtcttccagtaaaatttggtttctgatggagaggctatctaataagatgccattaaccgtaagtgtgcggagcatccagttttgggtggtgttgtcacaaagtgtttctgggttgctgatgtagtattggttcagattatcacattcgatatggatgccaaacatatctccgatggactgccgaagtcggtagaaagtggtgcgagataaaggcttcccgtcgtttaaatcgctgatgatccattgttgacagatacgttcgaggctgattcgtttggctcgttgtatggtgttgacaagccacgtgtactgtctgaaagtgtcggtgtttctcataatccattgtattttggggacaaaattagaaaaaaatcgtaagtgtttcatgttttgaaacagatgggttgtatttttggcgcggattaagaaaaaaggaatgaaaagcgacgagatttgggcaaaaaaagacgaggcgaccgaaatcgccccgaacttgatgttttcacaacggaataatccttattgtgaattgctgcatatcttgtgctgcaaaaataggtatttttccaatactgcaagagttttttgaaaaaaatactaattttgacaaaaatttgaattgataaatagttgacttatgaagaaaatactaggacttgacttaggcaccaacagcattggctgggctgtggtgaatgaggctgaaagtgaagccgaaaaatcatcaatcataaaattgggagttagggttaaccccttgacggtagatgagcaaaccaattttgagaaaggaaaaccaattactactaatgcaactcgcacattaaaacgcagtatgcgacgaaatcttcaaaggtacaaattgcgtcgtgagaatttgatagaagttttaaaagagagtggttttattgatgatgagactgtgttgtcggaaaatggaaacaaaaccacttttgaaatctatcgtttgagggctaaagctgcttccaaagagatttccttggaagaatttgctcgagtattattgatgattaataagaaaagaggatacaaaagcagccgcaaagcaaagtctacagaagaaggacaactaattgatggaatggagatagccaaaaagttgtatgaagaaaacctaacgccaggacagctttcattgcaattgctaaaaagtggtaaacgttatttgcctgagttttatcgttctgatttgcaaaacgagtttgagagaatttgggcgagtcaaaaacaatattatccgacattgctcacggacaaattgtttaatgaattgattgggaagaataagaaacagacttggtctctttgcattggattgttcaaaatagaaggggtaaaacgttctacaaaaggtcaagatttgaagatagaaaactaccaatggcgggttgatgcgcttacgcaaaaattgggtttggaagaattgatggttgtacttcaagaagtcaatggtcaaattagcaatgccagcggttatcttggcgacattagcgatagaagtaaagcattgtatttcaatcatcaaactattggccaatatcaaatggcacagctggagaagaacccaaattatagtttgaagaaccaagtgttctatcggcaagattatcttaatgagtttgagacaatttggaaaacacaagccaaatttcataaggaattgaatcctgaactgaagaaagaaatacgtgacatcgtcattttttatcagaggccacttaaatcccaaaaaggtttaatctctttttgtgagtttgagagccgtcaaattgaagtggagattgatggcaaaaagaagaccaagacaataggtttgcgcgtgtgccctaaatcttcacccttgttccaagaattcaagatttggcaggttttgaacaacatgcaggtgtggggaaaaacaacgccaaaacgtttcttgttccaagaagagaaggaaaaactatttgcagaactcaattatcgcgagaaaatttctaaggcagaagcactgaaattgttatttggcaatcaaaaagattacgaccttaattataaagacttggaaggcaatcaaacacaagcagagttgctggaagcttataagaccatcatcgaaatgagtggtcatgatgacctggattttacaaaaatgtcatcgagtaagattattgagagtgtcgttgaggtgtttgctggattgggaatcaatacagaaatattgtattttgattcaagtcttgaaggccatgccttggaacagcagcctatgttcaaattatggcatttgttgtactcgtatgagggcgacaagtcggagttgggtaatgcaaacctcatccaaaaattgcatgaccagtttggctttgacaaagattttgctacaattttggcaggagtggttttcccggatgattatggcaacttaagtagtaaagccatccgtaagattcttccccatttgaaagatggacttgaatatagtgtagcctgtgaatatgctggttatcgacattcgaagaactcgttcactaaagaggagattgaaaacaaagtgttgaaagacaaattggatttattgcctcgtaatagcttgcgaaatccagtggtggagaagattttgaaccagatggtaaatgtggtgaacgctatcattgatgaatatggaaaacctgatgaaatacgtatcgaattagctcgtgaattgaaaaagtcggccaaggaacgcgaggaaatgactaagtcaatcaatgaaacaactaggctgcacgaagggtatgtaaaagtattgcaaggagaacctttcaatttggaacacgttagccgcaatgacatcataaggtataagctctatgaggaacttgaaatgaatggatataagacattgtattccaatacctacattcctcgtgagaagttgttcagtaaggaatttgacattgaacatatcatccctcaagctaagttgtttgacgattcgttttcaaacaagacgctcgaagttcgtcaggttaatctcgacaaaggcaatgccacggcaatggattttgtgaatgaaaaatacggagcacaaggcgcagaagagtacgttaataggattgagaacttatataacaaaaaggttataagcaagaccaaaagagataaactcttaatgaaagaggctgatattccaagtggttttattaatcgagacttgcgtgattcacaatacattgccaagaaagcgcgtgagatattggaggagatagtgcgttttgttgttccgaccacaggtagcattaccgatcgtttacgtgaggattggcaactggttgatgtgatgcaggagcttaattgggataaatacaaccaattaggacttacagaaatcatcgaaggccgtgatggacagcgtattcgccgaatcaaggattggaccaagcgtaatgaccatcgtcatcatgccatggatgccttgacgattgcctttacaaaacgtagtttcattcaatatttgaacaatttgaatgcaagggttcaaaaaggtgtagatgattatattgatttggatatggttgaactttctttgcttgacaaagaccagcgttcagctgcggtgtatgctattgaaagaaaagaattgcatcgtgatagtcacggtaagcttcgattcaatgctcctatgcctttggaagagtttagggctgaggcgaaacggcaactggaagctatcttggtatcaattaaagcgaaaaacaaggtggttacacaaaacgtgaacgtgtccaaaaccaagaatggaagaaacaagaagatacaacttacacctcgagggcagttgcatttggaaactgttttcggtagttgcaagagatatgttaccaaagaagaaaaggtgaatgcttcttttaatgtcgaaaagatcaataccgtaacaaataagcggtatcgtgaagcacttcttgcccgtttgcagcagtgtgatggtgatgctaaaaaggcttttacagggaaaaattcattggagaagaatccggtctggttgaatgatttgcatacgattcaagttcccgagaagattaagactgtgacttttgaaactatctatactattaggaaagaaataacacctgatttgaaggttgaaaaagtagtcgatgctcatacccgtcaaattcttcaagagcgtttggatacttttggaggcgatgctaagaaagcattctccaatctggatgacaatcccatttggctcaataaagaaaagggtattgccataaagcgggttactattacgggcattagtaatgctgaatcacttcacgacaaacgcgacaaagacggtcaattgattttggatgaaaaaggaaaaactcaacccgttgactttgtgaatacgggcaataaccatcatgtggctatttaccgtaagcctaaattggataagaatggacagcaattgttggacggcaagggcgaaccgcaatatgagttggatgaagtaatcgtgtcgttctatgaagcaacatcgcgagctatacaaggtttcccaattgtcgacaaggaatacaagaaagaggaaggctggcgattcatgtttaccatgaagcaaaatgagtatttcgtgtttcctcgttatgacgagcaaggcaatttagttttcaatcctttgtactatgatgaggtttggtataaaaatcccgagaattatgctttgattagccctaatttgtttagggttcagaaaatggcgacaaaagactattattttaggcatcatcttgaaacaattgtggacgaaaatacttttttaagggatatcacttggaaaagggttagaaatgctgaagggcttcgtggaattgtaaaagttcgaattaatcatattggtcaaattgtttctattggagagtattaaacaaagaattatgcatatgaccaacatcaaactaatccaaggctagaaatatcgtttcttaaggaccaaagcgactatagtatctacaatgattaaacgtactctctttttcggcaatcccgcatatctctccatgcgcaatgcgcagctggtcatcaaactgactgatgcacaaacacaagaagagactgttaagactgttcccatagaagacattggcgtggtagtacttgaagaccgtcaaatcactattaccaatggggcaatggatgccttgcttcaaaacaattgtgctgtcatcacttgtgatgaaaggcacatgcccgccggcttgttgttgccgcttgaaggacacacggtgcagagcgaacgcttccgttggcagattgaggcttctttgccgttgaagaaacaactgtggcaacagaccgtacaagccaagatccgaaatcaggcgtcggttttgaggcggttgagtggggcagaggtgggctgtatgatggcttgggccggcgatgtgaagagtggtgacagcgaaaaccttgaaggtcgagcggctgcctattattggaagtccgtttttcctgaaatggagcggtttgtacgcgaccgcgagggtgaggcacccaacaatcttttgaactatggctacgccatcgttagggcagtgatagcccgttcgttggtggccagtggtttgttgcctacctttggcatccatcatcacaatcgctacaatgcctattgtttggcggatgacgtgatggaaccctatcggccttacgttgacgagttggtgattgagattttgcgtagcggcgttgattgtgacgaactaactacggatttgaaacgtaagcttttgggccttccggtaaaggaagtcatcatcgacggtcgccgcagtcctttgatggtggcatcctctcaaaccacagcctcgttggcaaagtgttttggtggggaattgcggaaagtggtttatccaatgatgggactctgatggaccgatttagcgaatatcgaatcatgtgggtactggtgctttttgatctgcctaccgaaacgaagaaggagcgtaaggcatacgccacttttcgcaaacgcattatggctgatggcttcacgatgttccagttttccatttatctgcgacattgcccaagttatgaaaacgccgaagtgcatatcaaacgggtgaaatcgttcatgcccgagtatggcgacattggcattttgtgtatcaccgacaagcaatttggcgaaatggagattttcagcaactgcaagcctaaggcagtggacacgccttgccagcaattggagttgttttgaataggcaaaactggtcaaaacgaagaaaaatcccactctttcgggtgggatttttcttttcggaaacaacttctaaattgctatggctctttgttttacacatatcgtgttgtttcaaagagcaaagatacaagataaatgcaagcaattcacaacatttctcggttgataaattatgtgtttcagttgtttcaaagagcaaagatacaagataaatgcaagcaattcacaacgtttgacttgatttccccgacgagccaatcgttgtttcaaagagcaaagatacaagataaatgcaagcaattcacaacccttgtggcaatcgtgacacaacgccacggttgtttcaaagagcaaagatacaagataaatgcaagcaattcacaacggcttgttcaagttccgttgtcataatatgttgtttcaaagagcaaagatacaagataaatgcaagcaattcacaacttcgattgtgccttctccgcgtaagatgagttgtttcaaagagcaaagatacaagataaatgcaagcaattcacaacggcctcctaaatcaaactaattatgattagttgtttcaaagagcaaagatacaagataaatgcaagcaattcacaactgctgatgctgcttcgttgcctgattccggttgtttcaaagagcaaagatacaagataaatgcaagcaattcacaacgcagactatatagaaatgtttgttcgcacggttgtttcaaagagcaaagatacaagataaatgcaagcaattcacaacttgcgtcatgcaggaatgtcagagacgggtgttgtttcaaagagcaaagatacaagataaatgcaagcaattcacaacctacttccaccaatggctgtaattgataagttgtttcaaagagcaaagatacaagataaatgcaagcaattcacaactattttctttcaaacttagtatcttgtatagttgtttcaaagagcaaagatacaagataaatgcaagcaattcacaacaagtgttgggttccaacccaactcggacaagttgtttcaaagagcaaagatacaagataaatgcaagcaattcacaactttttggtataacgtttccgttgtcgtcaagttgtttcaaagagcaaagatacaagataaatgcaagcaattcacaacagttggctgagcattatgttggctacgagggttgtttcaaagagcaaagatacaagataaatgcaagcaattcacaacatctgctcggctgcgaagccaacgggccacgttgtttcaaagagcaaagatacaagataaatgcaagcaattcacaacaaacgagtttgatagccttacacctgaagagttgtttcaaagagcaaagatacaagataaatgcaagcaattcacaactactttcaaaaggtcgtcgaagtcttcgacgttgtttcaaagagcaaagatacaagataaatgcaagcaattcacaacactatggtcacgatgtcgaccaacgaggtcgttgtttcaaagagcaaagatacaagataaatgcaagcaattcacaacgttgtcgaacatgtcgcactgtatgtcgcagttgtttcaaagagcaaagatacaagataaatgcaagcaattcacaacaagcacttgaaaggcggtcaaacgcatggtgttgtttcaaagagcaaagatacaagataaatgcaagcaattcacaacagtgtgcagtgttggcttcgccttgaaccgttgtttcaaagagcaaagatacaagataaatgcaagcaattcacaaccaaaagttcctgcatggccataccggcgaaagttgtttcaaagagcaaagatacaagataaatgcaagcaattcacaacacagacagctcgcttcaaacatatagaagagttgtttcaaagagcaaagatacaagataaatgcaagcaattcacaacgtaaaggctcgccgtgtcttggtcaaaaatgttgtttcaaagagcaaagatacaagataaatgcaagcaattcacaacggttggggttcgggatttcgtgcttacgggttgtttcaaagagcaaagatacaagataaatgcaagcaattcacaaccatattgacatagagttttataatggcgaagttgtttcaaagagcaaagatacaagataaatgcaagcaattcacaacgaacctcgaagccgtcaccgacgcccaaggttgtttcaaagagcaaagatacaagataaatgcaagcaattcacaactgtttgcggccatgatgcgcggcatcgacggttgtttcaaagagcaaagatacaagataaatgcaagcaattcacaaccacctcttcggtacaagcatactttggagcgttgtttcaaagagcaaagatacaagataaatgcaagcaattcacaacgacaccatcatcgccaaggagattgccgctgttgtttcaaagagcaaagatacaagataaatgcaagcaattcacaaccacagtgtcaacggacttgccgcatttctcgttgtttcaaagagcaaagatacaagataaatgcaagcaattcacaactgaagcggcttcctggtgtgcctcgcgcatgttgtttcaaagagcaaagatacaagataaatgcaagcaattcacaaccatggcgttagatgattgagtagtacattggttgtttcaaagagcaaagatacaagataaatgcaagcaattcacaacttgctacccgtcttccgtagaagtagtcagtgttgtttcaaagagcaaagatacaagataaatgcaagcaattcacaacttgccaacaatgtgttctttggtgagtattgttgtttcaaagagcaaagatacaagataaatgcaagcaattcacaacaagatgaacttcgaccgtacagccgagaaagttgtttcaaagagcaaagatacaagataaatgcaagcaattcacaacataattcattgaaatgggcttttataactatttattgctatttttgtgtccgaaatcactacttgctatgcccattatgaaacgtttccttcttttcctcattgcaatggtcatcgtccccatgggcctcaacgcccaacagacttttaaggtctccaagaccaagaagccgggcatcatcgcccatcgtggcttccaccagtttgaaagcgcggccgaaaacagcatcgcggccatgcaactggccctcaaacaaggcttcgacggcaccgagttcgacgtgcaaatcacctccgacgatgtcaccatcgtcttccacgacgccatcatgcaaggccaccgtatttgcgagaccccttacgacacactgcgagcgctgtccgctttcaccctgagaaacggcgaacccgtgcccaccatggatgcgtttctggccgcatgcagccaagccctcaagagccaacagcagagtaaaaaacagagacgactgtttttcgaggtcaagccgctggaatcgtccgtccaacgctgccacctgatcggacaaatcatcgaagctatagggaaacaccagcttcacgacgaagttttctttatctcgttcgacctcgacgcctgtgtcatgctgtcacagctcatgcccgacgtccccgtggcctacctcgaaggcgacctctcgcccaaacaactgaaagacaagggaatcaccgacatcgactatcactggagcaagttcgacgcccatcccgaatgggtgaaggaagcccatgacctgggcatgaccgtcaacgtgtggaccgtcaatgcgcccgaaaaagccaaggagatgctgcaattgggggtggactacatcaccacggattatccttatgatatgcggagctggctggaaatggagaaggaatgaatcgtgcgaggcactgttttgtcctccagtcggtggcgttttttgtctgacttgccttacccaagggttagtcttggcttagtcttggcttagttttgggttacccaagggttagactagggttccattattcaatgatgggtataaccattcactcctgacagatagttggacgcttataggacaaagtttttggctttggtttatggtgtttttatggttccaaatccaatttatttttacttttgtatccgaaaaacaccatttactatgaacaaaactatgcatatccaagaagaggcggcacgctgtctgctctgcgccgatgcaccttgcagcaaggcttgcaagaacggagacccggcgcgcgccatacgcgccatacgattcggcaacgaagccgtcgctggccagtggctcgacccatgcagcgatgccgagctgcaagccgccgaagcggcctgcatccactacgattggcctatccgcatcagggaactggcggaagccgtcaaaggcacgaagccacaaaaggaacttcccagcctcgccatcgacttctgcggcatccattgcgagaatcccttcttcctcgcctcgtcggccatctgcaccaactatgagatggtggctcgtgccttcgaagcaggttgggcgggcgtgttctacaagaccatctgcatggaggacatccgcgaggtgtcgccgcgcttcgatgccgtcaacgagccgggtctctccgatttcttcggcttccgtaacatggaacaactgagcgagaaccccgtggaggtggacttcgacatcctgcggaggttgaaaaaggactatcccaacaaagtcgtcgtcgcctccatcatgggcaacgccgagacggagtgggtcacgctggcgaaaatggccgaggaggctggcgtcgacgcggtggagctgaatttctcctgcccgcagatgaagttggctggcatgggcagcgacgtgggacagaactcggaactggtgctgttctacacgtcctatgtgaagcataatgtcaagatacctgtcatccccaagatgacacccaacatcactcaaatcaaccagcccgccatggccgcccactttgccaacgccgatgcggtgtctgccatcaacaccatcaagagcgtgacgatgaacaaccgtggcgccgtggccaacaagaagaccgtctccggactctcgggccgtgccgtgaagcccatcgccttgcgccatatccttgaaatggcgaaaaaccccattttcactgccaccaacaatggcaaacgcatcgagctgagtggcattggcggcatcgagacttggcgcgacgccttggagttcatccagctgggctgcagcaacgtgcaggtgtgcactgccgtgatgcagtatggctaccgcatcatcgacgaccttgtgttggggctgcaaaactatatggctgaacgcggcatcgagcacctgtcgaatctggtaggagaggagctgcctaatttcgacacacccactaacctcgaccgcgacactatcgtgtatcccaccttcgaccgtgagaaatgcatcggctgcggccgctgctatacctcttgtcaagacggcggccatcaggccatcaccttcgatgccgacatgcgtcagccgcatctcgacggaaagcgttgcgtaggctgccatctctgccgacttgtctgtcctacaggcgccatcggtgtggcgaaacgcattgcgaaacccaatcctctttattcttcctcccggtaatagaccttgtagtatttgccgcgctcatcttcgccttgctcgatgtggtcgcggttaccgttgatgatgatctggatcttcttgtcgaggttgatgacgcgcttgtagctgcgctgttgcttcttgaaggcgtagctcgagatggcgaagctgtcgtcgatgctgatgtcgttttccgactcgtagttgcgcttgtattcttggaaactctcaatcacctcgggctgctcgatgacctcttgggcgaacgcctccatgtcgaaggtgtctttctccttgaagaactgcaatgacttgttcaacagctcgatttggtcggccttggtgacctcaaacgacttgggcagctcctgtgtgacgaagctcttggccatggccatcacgttgtgtgtgttggaatattcgtccttgcgctgacggaggtgcaggaagtcgtccatccagtattgcgcctcgaagcctcggttggtgttgtcgaccacggccaccacaaagccgttgtcgcggtctttgttgaagacgaggcagcccttgtcgagtttcttgagggggatgccttgctcgcagtcgaggctgaagccgccaccgccgatgaggaccttcaggaaggagtctttgttctccgacttgaagaggcccacggcatcggccgtctcaccgccgacgaagcagtccttgaaatagaccacgtaaaactcgccgcctttgatcttcgggtgcgtgctttggtcatagaggtatttggccaggttgacggactgctcgtagagcgtctcaggggcatcgaatatctgggtcacggcgccgtagacgacgttgtattccagcccgctgtcgtggtagagctggaagtattcctcggaggtgaaaggggtgaggaaatggttttcaaggatggctctcatcccgtcgtcgagagccatccttgaagtggagattatcgttccttcttcggctgatttgttgcctacgaagtgaatggatgcgttggtaatcattgtgtttagaatttcagcgttagattccccatgacgttgaaacctgccatcgggatgaagccgatttggtagtagcggttgtcgttggggtggccgtagctgtcgcagatggccgagtagacccagccactggcagcatagcgcttgttgaagatgttgttgaaacttacgctgataacggcttccttcgggagacttgctggtttcatggtgtaactgaacttcacgtttgacgtggagaaagccggcaacgaacggtcgaggttctgggtgttgtcgagatacatccttgagacgtagttggtgtgccaaacggcctcgaagcccttataatggaaggtgatgaagccattcaggatggccgaaggcgagaaagccaaagtggagttgtcgtagtggatgacatcgtagccgtcgccatcgtaggcattgccgtgggcgtcggtgttgccttcccagtcgtcccaattctcaaccacctcgtcgaagtccttgattttgttacggctcaaggcggcgttggcctcgatggtcaaccacttggtggggctcacgccagcctgcagctcaacgcccatgcggtacgagtccttgatgttggtggtcaaggcctcgccgatgtcgctgacggcacctgtctgcacgaactggtcggtgtagtccatataatagaagttggcgccggcttgccagatgcgaccgttgtagttgtaacctaactcatagtcgaggagttgctcgggtcttgggaaagggtaggagccgttgtcggtgaagttgttgcgctcaggctcgcgatggctccaagccacggaggcgtaggcgtgatggccatccatgtcgaaggagacaccgcccttgggattgaggaaggggtatttctcgtggatgtcaagctcctggttgtagtattggctgtcttcttcgtagaacttgtcattgatgccgttggtcttatagtccacatagcggaattgcatatcgccaaagacggtccaatggtcgcagaaggtgaaggccgccttgatgaaggcattgccgtcgaacttggaggcgtcggagtcgtagtatttgtagtcgccgttggagaggtatttttctgctacgccagggtgggcaatgtaggtcacgtagccgaagtggttgcctttgaagttttgggccgagatgccgccgatgatgttccagtgctcgtccttgtagcgggtgaaccaaacgaggccgtaggtgtcctgacgcaaccctttcttgcggacgaagtcggtctttttcacttggttgccttcagcatcgtaataggtcatgccgaacttcgagagcttgttgttggggcggaactcctcataatagccgtagccgtaggtgtagtgcagtgtggccgtggtcgcccagtgctcgttgatctcccaggcggcggagagaaggttgtggttttgccagaagttgtcggtggtgcggtcccagtaggtgccgtcgttcatttggtagcgttgggtcatgtagttgccgttttcatcctggacgaagttgccgtcctcgtcggtgacgaggtattcatagagcgagttgaactgtcccagacccaccttatacatatcggcgtaggtcttgatgcccgtggggatgccgtaggtgccatccatgaggctcatgtcgttgttgccagccgtcacgccgttccaggcttggccggtcctctcgaagttaccgatgttcttatagcggatgacgaagttcttgcccatccaggtgaggccgccgtagtagctgccgctgcgccctttggtgccgtggacaaagccgtcggtgttggtctggtggaaagcgccgtcgatgatgaggtgtttccacaggaggcccgtggaggccttggcgccgaagttggtggtgctaaatgagccgtaggagcctgtgacttcggcactcggcacgaaggaaggcgtggccgaggtcaatgatatcgtaccaccgaaggcgccgtcgccgttggtggatgtgcccacgccgcgttggatctgaaccgagctgagcagggag

SEQ ID NO: 2153 - DNA, 24257 bp, synthetic construct
  misc_feature 1..24257: note = Synthetic
  source 1..24257: mol_type = other DNA
cccgctgccgtggtataaaaagaccggaaaataccagactgaacaaaagcgacttcactatgcttctcgtgttcacgcacaaaaaagtcacccttattcaggtttcgggctttaaaaagcggaacaagctcagtaatttcttccgttgtaaaaatgccaaattgtttaaagaattccgttatcacaactattttgaatattctgttttaggataaagctttttaaaagcattgtataccgcctggtggattgctgtagaatgcagttcatccggaagataatcgaaacttacactaatatttttattcattttaagaatcttatacagtgattctgcctcagcatacatcttggtatcttcttccttattaggtgcgcctatatataccttaacaggctgttttaaatgtgttctcaataaaggctctgcctctttcagcagtttttcctcaccccaccacaaactcgggctgataataatatactgactgaacaattccggatttttcagcagaataccggttgccagaagacccgcaagtgattcaccaataatggttctgttaccggaagcattataatttttctcgatataaggctgcagttcatttttcaggaagttaatatacttatctgaacctccgtattgcgtgaaactttcttttttaaagccctctttttcaataaagtcggtattggctaccggaaatgtaaaatcgcgtctgcggttggtattttctattccgaccacaatagactgtggaaagcggttaatccatggttgattattgaagcggacaatgcctgtaatatgaacaaaatcttcttcaaaaccgccgtccggaatataaatgacagggtatttctcagctttcttcggatcgtaatcctccggaagataaatgttgatattccggttttccttcagaacatccgaatgaaaaacttcggttgttccgatgattaaaggtttacttgcctgagccgcaagaggagtccctgcaagagttaacatcagcaggaatagaattttatattttgtcatatcagttattaaacgcttcaatttaaaccggaaagctgtatcgctttatacaccgggaattgtcggactaagataacgattttacagggcttttgctacactttattttctgtttccctctggtaggtaatgacttcatttttctgcactatttttcgttcaaaatgagacgcgttgaacttccattaagtttgaaattggaggtttgaagttgttggtgatgatcataaaaaagagaccgcatcagaagttatacgttttgccatccggaataagctgataacaagcttgtctaaattatcgaatggcttttgaaataaagtcttatgatgcggtcttttttattaaatatgatgtttaaaaatctacagtatccggattaagacccgaaaaaccagcttctcccatttgggcaatacgctgcatatcttcatcggaaatatggaaatgacctgtatccagattagaactgatatttgccggagttaccgattttggaagcggcagtgtacctgtctgcaaacagaatttaatacacagctgtgcaacacttgcgttatagcggcctgcaatttctttcagaagctcattattcagtatttttccggaacctatcggactccaggcttctaccagaatagcattatccttacagtaatctactacctcgctttgcaaatgccccgggtggtactcaatctggttcaccattgggttaatcttagccgtttcttttaaagctttcagatggtgtaccagaaaattacatactccaattgccttggctcttccggaagtataaagatcttccattgcacgccatgtttcagcattcagcattttccagttgtcgtactgtgctgcgttggcaggccagtggatcagataaaggtcgataaaatctgtttgtaaatgttccagcgatttatcgaaggcagccatggtttcatgatagccgcggtcgctgttccatacttttgtcgtcaggaatatttcttcacgcgaaatcccgcttgccagaataccttcacctacacttttttcattttcatatatttttgccgtgtctatatgtctgtaaccattttgcagcgcgtataccactgcattttttgcttcggcaccttcaggaatctgccaggttccgaaaccaattttaggaatgctaacaccattactgagcataaaatcttccatgatcataatttaatttgtgatttgacttaattgtttttcaggtattcacgcaatacatactggagaataccctgatttttataatattcgatttcaatagctgaatccagtcttgcctttacattgaagtttgtttcttttccggatggatgaaccgctttaacttccagaattttgtgcggtgtaagcccttcagccaatcctgatatatcataagtttccgtaccatccagccccagcgattccgcattggcgccatcggaaaataccagcggtgctacacccatacccacaagattactccggtgtatgcgttcaaaactttccgcaattacagcgcgtactcccagcagaaaagttccttttgcagcccagtcacgggaagaaccggaaccatattcttttccggcaaggataatcagcggtgtatgatccttttcatacgccatagccgtatcaaagactgttttaacttcattggacgggaagtaacggctgtagcctccctccttatccgctattttatttttaatccgcacattggcaaaagttccgcgcatcatgacttcatgatttcctcttctggaaccataagaattaaaatcctctttatccacgttgttgtttttcaaataacttccggcagcggaatcttctttaaatgaaccggcaggggagatgtggtcggtggttacagaatctccgagataaagaagtacccgtgcatttttaatatctgttacagcatcaggctgcgcactaatctctttgaagaaaggcgcttcttttatataagtggaatgctggtcccattcgaaattctgatcgaggttcacctccagattttgccagtcggcagatccatcgaaaataacatcgtatacttcttcgaaatcaccctgtttaagacattcgttaatagtactctgaatttcctcacgggaaggccagatgtctttcaggtataccggctgtccgttcggatcgtattctataggttcattcatcaggtcgatgtccacatgaccggcaagcgcataagcaacgacaagcataggcgacatcaggaaattcatttttacctgcgggtgaacccgtgcctcgaagttccggtttccggaaagtacagacgccacgacaagttcacctttatctactgccatggcaatagccggcggcaaaggacctgagtttccgatacaggaagtacagccgtaacctaccgtgtgaaagcgaagagcttcaaggtcggtactaagtccggaacgctccagatatttggttaccaccttggaacctggtgccagagaggtttttacccatggttttgttctcagtcccttttctattgcatttcttgcaagcaatccggcacctaccattacagcagggttcgaagtattggtacagctggtaatagccgcaatcacaatactgccgtcgctgaggataaattcagaattgttatgtttaattcttaccgtatgtaaagtatcctgaataacttcagaatgtgtatttccttcaatcggaactttaccaaaagtaaattctgttcccgaaccgccgtcagccagccatgcatattcagttcttttagataccggttcatattcacggtggtgctcatctttcaggatttcagaaaacttatggctgaggtcttttacgagaattttgtcctgtggacgtttaggaccggatacggtaggttccagtgtattaagatccagttctacaacagaggagtacaggatttcttcttttccggttctccacaacaggttttctttacaataatcttctacaattttaatttgctcgggtgaacggttggtagcgtgcatatattccagcgtacggtcgtcaatagggaagtaggttaccgtacagccaaattcgggtgacatattggaaattgttgcacggtcggttactgtaagatgatccagcccttcaccgaaaacttccacaaattttccaacaacacctttatcccgcaatatccgggtaatagataataccatatcggtagctgtacattgtgccggaattttacccgtaagtttcagcccgatgacttcggggcatgtaaagaatataggctgtcccagcatcgcggcttccgcttcaataccacctacaccccatgcaattacgccaattccgttaaccataggggtatgtgagtcggtacctaccagtgtgtccggaaataaccatccgtccctgtcgataacacctttggccaggtattccagattaacctgatggcagattcccataccgggcggaacaacggtaaagttgctgagtcctttttgtgcccatttcagaagctcgtagcgttctttatttctgtcgaattctaaagttacatttttatcataggcatagtcggttccgaaataatcgacctgtacagagtggtcaattaccagatctaccggaatagcagggttgatcttctgaccgtcttttccctgacgtacaaattctgcgcgtagtgaagccatatccaccacagcaggaacaccggtgaaatcctgcatcaggattctggcaggtttaaacggtatatctttgtctgccggcgcgggtgtccattgcagcagtgtatcaatgtgttcatctgtaatactgaaaccattgtagttccttaatacattttctaaaagtatacgaatactgaaagggagatgaccgacacctttttctgaaagatttttcagggaactgtaatgataacttttaccattaaccgtaagctcctgtaccgattttgctttttgggtgttcataacgtatgattttatgtgaacatctaatataccgctaaaaacggagagataagttaatattatgatagattaacatgaacattaacattaaaactgactatttgtaaaggagaaggtttttgagaatttgaaaatttgaaaatgtaccaatgaggtaataagtaatgagtaatcaatcatcaatcatcaatcatcaatcatcaatcatcagtaataaccggtatgtttgtcatgctgcaagcatctaaacttttaccattaagaagtcaagagaattaaggatacacacattcagcttaatgccttaaaggtaaaaataataatatctcacttcgtcacttcgatacgaaacgcagtgaagtgtatcgagaagttattaaccgcaaaagcttttaccattaagaacttaagaaaattaaggttaaaaggatttgcttaataaactcaataccttaatggttgaatatatttaaccgcaaaagcaacaaaagcctttaaacacttaagttctacatgatctgcacatcatagtcactaaagtacacataagttagaaaatctaagattttctttatgttgccctgatgtataattgctttagtaatctatataatactttacaggtaaacagaccatgtctgtatgcagtttatttttaagtgttaactatcttaatatcgaagatctccgaactgattcgaataggtttcagattcactaatctgttatatcattaatgaagttttatcagaatatgaccactataagcgatcagggattaactgtaattcgtatattcagttttttcaaaagcttatggaacaaagttttacagaagttattcatctgatcagacaatcgcgtataagagctgttagggctgtgaatacggagctgattaatctttactggagtattggtgcttatattagtgaaaaggtagagcaggcggaatggggacagtcggtggtaaaagagctggcaggttatattcagcgtacagagcctgaaataaaggggttctccgataagaatatgtggcggatgaagcaattttatgaaacctataagggtattccaaaactctcggcactggcgagagaattaagctggacgaataatgtggtgattttcagccgggctaaaaccaccgaagaacaggagttttatctgaacctgagcattcgtgaaaaatacagctccagagaactggagcggcaaatcaacagtgctgttttcgaacgtaccatgataggccacgcaaaactcccggcactgccgagagtttttgacaatgagcttggtgcttttaaagacagttatgtattcgactttctgaatcttccggaactgcatagtgaaagcgatttacaagcagccttaaccggacatatgaaaaactttattctggagcttggcaaagattttattttcattggtgaggagtataaactgcaggtgggaaacagtgatttctatgtggatcttttattttaccaccgcggattacaatgtttagtcgcttttgaactaaaagcagataagtttaaaccggaacatctgggacagctgagtttttatctggaggcattggaccgcgatgtgaaaaagcctaatgaaaacccgagtatcggtgttcttctatgcaaagacaaggatcatgaggttgtggaatatgccctgagccgaagcctttctccgacaatggttgccgaataccggactcagctgccggacaaagagctccttcagcaaaaactccatgagttatccgatttaatatgatgagtagttgtcagttgctagtagttagtttacagtggttagtagttagtctttattagtgattagttcaaacatttcggtaattgccaattgcttatcattcatcattcatcattcatccccgatagctacacacttgtctgtatccaaaatatttagtattttaagatactgaaaaaacactaacttgatgccccatactgaaaatacagaccataagggtgcctcaaatccgtcactggaatcgctattactcacgatgattacagccctgaagcgggaagataccagaaatgaaaaattttatgacagtgcagatctgaagcgcctgctgaatatcagcgataagactttataccgcatgcgggtaaataaaagtataccttgtgtccgttttggtaagaaatacttctatccaaaatcctattttaacaacaaagcctctgaataagggcttttttacgcctaaataggtgtaccatattcattaatctggtaatacaagacagtaatgaataaaataataggtctggaatgatgagcaattagcaattagtaatgagcaatcagtaatcaattatcaattatcatcaatagccagaatgcatgtcatgctgcaagtatctcagtcaatttgaaaatttgaaaatgtgccaatgaggtaataagtgatgagtagtgagtaatgagtaatcaatcatcaatcattagtaatagccggtatgtttgtcatgctgcaagcatctcaaccgcaaaagaaacaaaagaagtttatagttgaatattgaagcgtacagaagtacataaaagttagtatatcccgtcactttgcagcaacgcggagggtatcgagaagttgtttaaccacaaaaacttttaccattaagaacttaagaaaattaaggctaaaggagagcttaatcaactcaatactttatggttaataaaatcagtttaatattcaccacaaaagcaaaaaaacttcaaacactttagttttacatgatccctcattatcgtagtcactaaagtacacctaagttagaaaatccgggattttctttatgttagcgtgatgtgtaattgtattggaaatcaaattgttattaattaacatcaatcatcatttatcaatcatcacttatcaatcatcacttatcactcatcactcatcaatcatcaatcatcactcatcaatcatcaatcatcaatcatcaatcattagtaatagccactatgtttgtcatgctgcaagcatctaaaccgcaaaagacacaaaagaagtttatagttgaatattgaagtgtacagaagtacataaaagttagcatatctcgtcactttgcagcgatgcggagggtatcgagaagttgtttaaacgcaaaagcgacaaaagttttatcaacaccttagctttacatgatgctgcatgatcatagtcactaaagtacacctgggttagaaaatccgagatttcctttatgttgccctgatgtataattactttagtaatcgatgtaatactttgcatgtgaaaaactatgccccaatacgttttataaacaaccactatgtcattccgtaggaatctaaactgcaaaagcgacaaaagcttttaaacaccttagctttacatgatgctgcatgatcatagtcactaaagtacacctgagttagaaaatccgggatttcctttatgttgccctgatgtataattactttagtaatcgatgtaatactttgcatgtgaaaaactatgccccaatacgttttataaacaaccactatgtcattccgtaggaatctaaactgcaaaagcgacaaaagcttttaaacactttagttttacatgatcctgcgttatcatagtcactaaagtacacctgagttagaaaatccgggatttcctttatgttagcctgatgtataatttccctggaaatcaatttcttattaattacgatcaaccatcactcatcacttatcacttatcaaccatcaaccactgccttttctcccgataggcttcggtgtttgttcgggaaacaccccgtttttgcatacttttcccgaagcttacccgaacaatacccgaaggaggttccattttagtatttttagttatctgtataaaggcttttataccggtcgttagatggtgttttaagtagcgccggagtaccggtgtcttgcattgcatagtggacaaaaccggtcaaaaccggacaaaagcagtcaataccggtcatgaaattctgaaagtgatttttgagcggaatatgtctatatcttggcttcactaacctttaaaaatgagcattatggcacgaattgaaaaaggaatcctcggcggattcaaaggaaaagttggcacggtagtcggtgtcacctggagaggaatggatattatccggagtgtaccccgggcatccagaaagaaacccacagaagatcaactcttacaacggtttaagtttaagcttgtcgtaggctttctacagcctttaaaggagattcagagtctgtattttggggtcaatcagggcacacagtcacgcgtaaatattgcgacttcttatgtgctgagtgaggccatagagatggtaaatgatattccggcgattgtatattcccgggtgatgattacgaaaggggatctggcaggttttcagagcctgaagatcacaccaaaagcagacgctaaactaagtctggaatgggagggtaacggtacccagtcgaatgcacaggatacagatatggtaaacctgatctgttacaatgaaaagcaaagctcttttgcaatttttgaaggcctgacctcacggaatataatgaaagctgaagcaatattgccggccgattataaggaggttcatgtatgggcatacctgaacaacgagataaagacgcaggccagtacaagtgtctatttcggaaagctcacatttccgtaaaaaacaaaaaccacctgaaagggtggttttttattggaaataaaaatgccccgaagatagtcgaggcgctaaatgttttcacaacggaataatccttattgtgaactgctttcaattacaaatgtatctaaaagaatttaaatagcaatacggaaaaccgtaataacaaaagaaaaagtatctctatatttaaaaaatattataactattgagatatgaaggttaaaaatatacttggattggatattggagttacttctataggttttgcacatgttacagaaaatgaaaaagataataaatcccatattaagcaattaggtgttcgcattaatccgctaacagtagatgaacagactaattttgaaaaaggacggcctgcatcggttaacgcagacagaactttaaaaagaggtgccagaaaaatgcttagtcgttataaagacagaagaaaaaatcttatagaaatcttaagtaaaactggttttattaattcggaatcaatattggcggaagacggtaagaatacaacacattctacctgggcgttacgtgcgaaggcttcccgagagagaattgagaaggatgaacttggcagggtattattggcaatcaataaaaaacgcgggtacaagagtagccggaaagccaaaaatgaagatgagggtcaggcaatagatgggatggctattgctaaaaggttgtatgaagaaaaccttacgcccggacaattggtttatcagttactaagagaaggtaaaaaatatattccggacttttaccgttcagacctgcaggatgaactcgacaaggtttggaattttcagaagcagtttcatcaggagatacttacagatacattttataaagatatacaaggaaaaggacaaagagctacatctgcaagtttctatggtgtatatggctttaatactgcagaaaataaaggaagccgggaagaaaaacgattacaggcctatgcatggagatcagatgcattgacaaaacaattgaccagagaagaagtagcttttgtaattacagagattaataacaacctcaataactccagtggctatcttggtgctatttcggataggagtaaggaattattctttaataaaaaaacagtagggcagtatctgtatgaacagttacaacaaaatccccatacaaggctaaagaatcaggtgttttacagacaggattatctggatgaatttgaaacaatatggacaatacagtcccggtattatccggagctaacggatgacctaaaaagagaaatccgggatgtagttattttctatcaaagaaaactaaaatctcagaaagggctggttagtttttgtgagttagaaagtaaagagattatgattgaaaaaaacggaaaagctgctgtgaaaaaaataggatcaaaagtagctcctaaatcctctccgttatttcaggaatttaaaatatggcaggtattacataatgttgacataaaaaataaaaaagataagactaaaagacctttggatgatagtgaaaaagaatatctgttcaatgaattgaatattaaagggaacctgaaagctgcaaaagtaatacaactactcacattaaataaaaatgaaacagagttgaactatacgcaactcgaaggaaacagaacacaaaaagcactatatgaggcttatcttaaaatactggacacagaagggtatgatgtaaataacttactcgggataaaatcaaataaagatgaggtatttctggatgatcttgatgttaatgcccttgaaataaaaacaatgataaagcagatttttaatgctttaaatattaatactggtattcttgattttgatgcggaattagatggaaaagcctttgagcaacaagcttcttatcacttatggcatcttctatattcctatgaagaagatggttccaaaagtggaaatgagcatctctataagttgttggaaaacaaatttgggtttaaacccgaacatgcgcggatattggccggtataacattgtccgatgattatggtaatctttctgctaaagcaatgagaaaaatttacccgcaaattaaagaaaacaatttcagtacagcctgtgaacttgtaggctacagacattctaaaaattcattaaccaaagaagaaaatcaggaaaggccattaaagaacaaactggaattactgaaaaaaaatagtctgcgacagcctgttgtagaaaagatcctgaaccagatgatcaatttggtgaatgaacttattgataaaaacagtgaaaaagacgagcaaggaagtatcattgaatatttcagattcgatgagatacggatagagctggcgcgggagcttaagaagaatactgatgaaagaagagatttagatgctgcaataagggaaggtaaccttcggaatgagaaaatttataaacttctgcaagctcaatttggtattaaaaatccgacccgaaatgatattatccgctatcgcctgtatgaagaactaaaaaataacggctacaaggacttatataccaatagctatatacctcaggaaaaactgtttggtaaagagatagatattgaccatattattccgcaatctaaattattcgatgacagtttttccaataaaacacttacgtataatactacgaataaagacaaaggaaaccaaaccggttttgattatattgaaagcaagtatggaatagatggtatagaagcatatactgcaagaattgaaaaccttttcgaatccggtaagaaaaataaggaagaaggggtttcaaaagcaaaataccaaaagttgcttaaaaaagagtctgagataggagatggatttattgaaagagatttgcgggaaagtcaatatatagcaaagaaagcaaaagaactattgttgcagataacgaggtccgtagtagctacttcgggaagtatcacggcacgcctgcgggaagactgggatcttgttaatgtaatgaaagaactgaatcttccaaagtacagagcattggggttaacagaaatggaagaacggaaatacggacaaaaagtagaagtcataaaagactggacaaaaagagatgaccatcgccatcatgcaatggatgccttaacaatagcctttacaaagcataaccacatccagtacctgaaccatctgaacgcacgtaaagatgaacagcataaagaacataagattataaatgcaatagagaataaagaaacaatactaataacggataaaagcgggaatagaaaaagagttttcaaagccccgatgcctaatttccggcaaacagcaaaacaatatttggaagaggtgcttatttctcataaagctaaaaataaggtggttactaaaaacaaaaataaaatattaggtaaggaaaaaatacaggaaacacttacaccccgtgggcagttacatgatcaaacgatatatggttttaattggtggtccagaattacactttcaaaaaaggtttctagaaatgaaatagaaaaaattattgataataatactaaattttttttacaagagtttattcaattaaaaggaagtattgctaaagctttttcagatgctgaacttaacaagcttatgtataaaggtaaaattcttaaagaaatagaagttgcgattccttgttatactcagagaattgatattagtaaagttttcactgattcgcaaaaatcaaattcagctaaagaaaagaatataaaaaatatattagacttaaaagttcgtaacattcttcaaaatagattgagcgaatttaaaggtgattttaaaaaagcattttccgatttggataaaaatccaatctggttcaataaagaaaaaggaatttctattaaaagggttatcattagcggtgttaaaaatgtagaaccattacactataaaaaagatcatctgggtaatgatattttggatggaaaagaaaatagaattcctgttgattttataagcacgggtaataatcatcatgtggctatttaccaggatgaaaaaggcaatcttcaggaaaaagtcgtgtcattatttgatgcagttaaattggtaaatgccgacgaacctgttattgataaaacttataaccaaggattgggatggcaatttctgtttacaatgaaacaaaatgaaatgtttgtattcccaaatgataatacaggctttgaccctaaagaaattgacttgcttgatccgagtaataaaaaactcataagtccaaatttatttagagttcagtcaatctcaatagtacagtatggaaataatatagtacgagattttaaattcagaaaccacttagaatcagttttgaatgatgataaagtattacatggaataacctttcagcaaataaaaagtttaggaccattgcttaatattgttaaggtcagaattaatcatctgggtgatattgtaagcgtaggtgaatattagtagcataagttatgattacccgcagcatttacatcggcaatccggcatacctgaagcttaaggatgaacaaatgtatatcctggaaccggctacaaatgaactgaaagcgagagttccggtggaggatttggggttgctgatgctggatcattttcagatcacactttcccatcagctcattcagaaaatgatgggcaataatgtagtagtcattagctgcgatgcacagcatttgccacatggtattatgctgcctttatacggacataccgaacattcggacagggtaaaggatcagctgaacgccagtgaacctttgaaaaaacaattgtggaagcaaaccgtggagtttaaaattcagaaccagatccgggttttggaaaaatataatgcatacgcagaacccatgtatgaatatcttgggaatgtaaaatcgggggatatgaccaatatggaaggaatcgcagcacagcattactggaaatatcttatcagccccgattttctgagagggagattcggtgatgtaccgaatccattttttaactttggctataccgtactccggagtattgttgcaagagcaattgttgaaacaggtctgcttccggtgttaggaatctttcataaaaacaaatacaatccctattgtctggcagatgatcttatggagccttaccgcccttatgtggatggactggtgatggggtatattcataataaccctgatgcagaagaattgacaaaagaagcaaaagcccatttgctgaaaattgctactcaggatgtaaaaatagacaagttaacccgacccttattggttgcagttaagatgaccgtgatctctctgtataaatgctatacaggagaaaagcgtttgatttcttacccggaactggtatgaaagaggaccgttttaatgcataccggattatgtgggttttagtattatatgatttaccaaccgagaccaaagccaatatgcgggatgccgcacagttcaggaaacgcttattggatgatggtttttcgcttttccagttttctatgtatgtccgccattgccccagtcgtgaaaatgccgaagtccatattaaaagaacaaaagcaatgttaccaaaagcaggaaaagtagccattatgtgtattacggacaagcagtttggggatatagagatcttttttgccagaaacagagaagaacccccaccaaccttccagcaactggaattattctgattttttgaatcctaaattaacgcaaaatccgctgaatatcagcggattgaattttgaggttgtgcagtatcacaaatatactgtaaaatgaaagcagttcacaacgacgcagttagtaagaatccaaacactaaagttgtgcagtatcacaaatatactgtaaaatgaaagcagttcacaaccttaatattttatcatcaaggcaaaaattagttgtgcagtatcacaaatatactgtaaaatgaaagcagttcacaacttagtctcataacagaacccctgatcgttcgttgtgcagtatcacaaatatactgtaaaatgaaagcagttcacaacgccgtagcaatacggctatttttatgcttggttgtgcagtatcacaaatatactgtaaaatgaaagcagttcacaacatgctccggagataaagttgttcggaaaggttgtgcagtatcacaaatatactgtaaaatgaaagcagttcacaactataaatgatccctgtagcgggtcggggcggttgtgcagtatcacaaatatactgtaaaatgaaagcagttcacaactctgaagcagattgtttggtctaacaatacgttgtgcagtatcacaaatatactgtaaaatgaaagcagttcacaactaaggaaaaacaaccttacaaaaatttaaagttgtgcagtatcacaaatatactgtaaaatgaaagcagttcacaacctttaacgtagaacgtcatatcgccgtcatgttgtgcagtatcacaaatatactgtaaaatgaaagcagttcacaactcgtagtacgatatacttatacttccgcgagttgtgcagtatcacaaatatactgtaaaatgaaagcagttcacaacgacttaggatgtgaattagtcatagacttggttgtgcagtatcacaaatatactgtaaaatgaaagcagttcacaacatacacggaaaagcggagctaaacgctgatgttgtgcagtatcacaaatatactgtaaaatgaaagcagttcacaactaatgaggaacctacttacgataggaacaagttgtgcagtatcacaaatatactgtaaaatgaaagcagttcacaacatattagcacgatataaagagtacattaaagttgtgcagtatcacaaatatactgtaaaatgaaagcagttcacaaccacttctgcgattgaagcaggtcagaacaggttgtgcagtatcacaaatatactgtaaaatgaaagcagttcacaactataacggcaaggagatcaaatatgcgacggttgtgcagtatcacaaatatactgtaaaatgaaagcagttcacaactagacgcaaaaaatccagaaattgttttcagttgtgcagtatcacaaatatactgtaaaatgaaagcagttcacaactatgataacgataatactctgaatgctctggttgtgcagtatcacaaatatactgtaaaatgaaagcagttcacaaccccggtgttacccggggcaaaactgcaaccgttgtgcagtatcacaaatatactgtaaaatgaaagcagttcacaacggggaggcccatatatagaagctttaacaagttgtgcagtatcacaaatatactgtaaaatgaaagcagttcacaactcgacatttaatatgtcttatgatcgtaaagttgtgcagtatcacaaatatactgtaaaatgaaagcagttcacaactcttattctcaaggtgttcctaggcattttgttgtgcagtatcacaaatatactgtaaaatgaaagcagttcacaacccgagatttcccggggcttgttttaaattagttgtgcagtatcacaaatatactgtaaaatgaaagcagttcacaactaaactgtccgtttgctttgaagtaagaatgttgtgcagtatcacaaatatactgtaaaatgaaagcagttcacaacgagcgggattcttaagtcctctgaattgccgttgtgcagtatcacaaatatactgtaaaatgaaagcagttcacaactcctgactcattttatagggttcatttagcgttgtgcagtatcacaaatatactgtaaaatgaaagcagttcacaacacgggcataataagtaaagaggggcagttagttgtgcagtatcacaaatatactgtaaaatgaaagcagttcacaactattgttccaactgtgcattttcactccaggttgtgcagtatcacaaatatactgtaaaatgaaagcagttcacaactgtccaacagaaagaagtccagcaagttgtgttgtgcagtatcacaaatatactgtaaaatgaaagcagttcacaacgtggttgaatgaacaatcacttcaaatcctgttgtgcagtatcacaaatatactgtaaaatgaaagcagttcacaacttatccttctgatcccacttatagttgtctgttgtgcagtatcacaaatatactgtaaaatgaaagcagttcacaacagtaaaacatttaatttaaaaaactttattgttgtgcagtatcacaaatatactgtaaaatgaaagcagttcacaactaccgaggagcggggaaaaaaaaattgcgtgttgtgcagtatcacaaatatactgtaaaatgaaagcagttcacaaccggccgctatatatagacattcatgggatggttgtgcagtatcacaaatatactgtaaaatgaaagcagttcacaactacatactgaatacaatattcatgatataggttgtgcagtatcacaaatatactgtaaaatgaaagcagttcacaacttctccattaatttgttcaattaaggttacgttgtgcagtatcacaaatatactgtaaaatgaaagcagttcacaactctacccttttaggctgatccgctaatagagttgtgcagtatcacaaatatactgtaaaatgaaagcagttcacaacatgcaatcttatcaaagaatttagatttaagttgtgcagtatcacaaatatactgtaaaatgaaagcagttcacaacgaatagcaatgataaccgtataacaagctggttgtgcagtatcacaaatatactgtaaaatgaaagcagttcacaacccggatgagcttcttaatatgcttattggagttgtgcagtatcacaaatatactgtaaaattgtgaggatagaatactaaggaaattttacaaatcatggattaaatgttatattgaggtcttcatagatatttagaaacctcctatatttgcaacaaacctttccatgcccttagaataccgaaaattaaaaccttatgaaagcagaatttacagagagattcgcttggagagtctgaagaaatttcctgaagcttttgaggcagattatcaggatgcgttgagaactgagaaacttcgattcgagattgatattgaaaatcaggaaaccgacagatttataattggggcattttacggggatgagcttatcggtatctgtggttttgtaaaagatgaaagcggtagagggaatatattccagatgtatgttaaagaagaatatcaggggagaaacattggtatggcgcttcttcgtacggttataaaggaagccgatacaaaagaaattatactggaagtaaagccagataacttaagtgcttttcatttgtatcagaaagtagggtttaaagaaattgaatgccatcccggaggtactgagattcggatgcagtataccaaataagccagatagaggtttggcatgacatggttacttttgtttcttttgcagtttagattcctacggaatgacatagtggttgtttataaaatgcattggtacatagtttttcacatgtaaagtatcacatcgattactaaagtaattatacatcaggctaacataaaggaaatctcggattttctaacttatgtgtactttagtgactatgatcatgtaggatcatgtaaaactaaagtgtttaaaagcttttgtcgcttttgcggttaaacaacttctcgatacacttcactacgtttcgaacccgaagtgacgggatggtttagatgctttgctccgtcgaatctaaaggtttcagcatgacaaatagtatgtaaataattttctaaaatttaaccacataggtacatagactatttgccagtaaagtattgcatagattactaaagtaattatacatcagggcaacataaagaaaatctcggattttctaacttatgtgtactttagtgactatgatcatgcaggatcatgtaaaactaaagtgtttaaaagcttttgtcgcttttgcggttaaacaacttctcgataccctccgttccgctgcaaagtgacgggacatgctaacttttatgtacttctgtacgcttcaatattcaactataaacttcttttgtttcttttgcggtttagatgcttgcagcataacaggtgttctggctattactgatgattgacaaatgatgaatgattattgattgctcattacttattactcattacaaaaacaggctcctttcattatgatgaaaagaacctgccgttaaagtaaataatataatatatatttacaagtgtgttatttcttcttcatagccttcatcttcgatctggaaggtcgtatgactgattttgaaattacgtgtcgcctgatcggtcaggattctgagcagctgattgtggggaatgctctgatcggaaataatatgcgcactcattgcattcactccggatgtgagcgaccatacatgcaggtcgtgcagatctttaacgcccggaatttgtgcaagagactgtcgcagttcctgaatgtccacatcctttggcgtaccttccagtaatacatggattgcttccataagcagtcgtaaagtccttgggataatcagcagtcctataccggcagagatcagcggatcggcataataccagcctgttgtaagcataataacaccggcaatcattacgccgacagacgttagcatatccgataatacttcaaaataggcgcctttcatattcagacttgctccggagtcttttctcaggattagcattccggcaatattcaccagtaagccaattcctgcaacaatcagcatcgatttgctctgcacttcgggtggattctgaaagcgttggtaggcctcatagagaacatacactgaaatgccgagtaatactactgcattgataacagcagcaagaatttcggtacggtaatagccaaaggttttatccgcattggcttttcgttcacctattttaatcgctatgaaagccagtaaaagtcctacgacatcggtaagcatatgggcagcatctgccaataatgcaaggctgttggtaagaataccgccgacaacttccgcaataagataggttgcactgaaagataatacaatcagcagattctttttatgtttgctggatgccgatacagtttgtgtgggtgttgtactcatgatttccgggaattacatttcgtagtataaaggatttctttttttctggggtacctgctgtgcaccaatcatttgcagaatattaatctctattgtttgtgcaagtgaggtcataggtgtatctacaggtgagttttcaaacggatcctgcataacaattgctgttttttcaatagcaataaacagggtaggtaccagaatggtgatcagtatttcaataaatacctgcgggaactgcgcatcgtccagaccgaaaggcagtataactgcaaaaacatagataagaacatgtacgagaatactgtatgaacgcggaaatactgtgtttttcagtctttcgcatttacccatatggtcgcataaacgggctatggtttcattgatttgtatcagtctgaattctgtaatcagttcttgctccgccagtttttttgcctgtaaagaatgtgcatccagtaaagcattagggatattaaccgcatcgatatgatgctgattaaggtaagtctgcaccttatcggaaaagtttagttttctcagtgactcgcccaatgcatagttccagataatctgacgcttagcaaattgctttacagcagcttcctgatgttgggggagtgcctgaatgatttgtcttacaagtgtgcgggaatcgttgacaatagcgccccataccatacgggcttcccaccatctttcataagactgggaagttcggaaggccagaaggagcgaaacggctgtacccactaatgccgggatgcttaaaggcagtgagatcttctgaaatgcaggcagcatatcgagaataccgataagtaccgcaaacatagagatcagtaaaagctgggatttaatcaggctgatgaaataccagatggatatttttttgttaagtagcataatgttgtttgttatggtgtgcagtaagtgattctgagtttaagcgatactttgcctgccagtgatctgactatttagccatagcgcctggcaggcggagtatcgcttcaggtattcagtacctattgttttctaatgtgttgtgtatctttaatattttaatgtccgtggtctccggcattggaaagtttggcattgacaaagaacgctccttttaccacgatgcgggcattcagatcaatacttccaacaggtgtaatggcagtgtagcccatatcagatgcacctttcacaatttctactttctcgaagttcattgttttagcgtgttcctttggtgctttttcccctttggtatcttcggctttttcttcctcttcatgttcttccggttttttatccgtctgtacaaaaacatagaactttccatcggcttctacaatggcttcatttggaatagccggtgtggtggaatgatcgagacttaccactcctgtgatgttcatgccgtcaatcaatccggttttattaccaatcactgtggcgtgtacagaaactgttttgctgtcattttcgaatgaagatccaatgctgtatactttggcatcatattcggtatccggattattggtaagcttaaaatgaacaatttgtcctacgcgcattctgggaagatccttttcaaatatctgaagatcgaggtgaattgagctgttgtctataatttcggcaacgggagcagatacatctacatagctgccgatctgggctctgatattgctgatggtaccgctgataggtgctgtaatagccagtccggttctcaggctggaattggttacagccgtcgggttaatacccatcattttcagacggcttgcaagagacgctttttgcgtgtatagtgttttcagatcggaagaagagctctgcaggtttttcttggtacccgcatcgttatcaaaaagttctttttgtcttctgaattcctgttctgcaaaagctattctgctgcttgctgtaaggtactgctcctgtacttgtatgtattccggattgacaaccgtggcaatgacctgacctttgcgtacatagtcgccttcctgaataccaagagttttgacaacaccgctgaataaagcggctactgtggctttattgctgttgggtacgcgtaaaagtccgttagccttcaccgtagctgtcagttctttcatttcaatattcccgagtgtaacgcccaccgctttcatctgctcttcggttaaagcagcaatggtaggtgcctcttctttatgttctttatttttttcagtggtttcggtcttcttctcaggagcggcttcttttttaccgcagctgatgatgaataaggatatgctcagataaatgatgatgtgtttcagtttcattttattgattaattatagaattaataatcacgacagattggttcacttgctgaatagattccagatatttcagctgaatattggtggcagtctgcaaggcaaacaaatattctacataagaaatatcaccggtacggtaacccagctgtgcggcttttgtaattttttccgcattggggattgcctgttccgtataatagttatactgttctgtatcctgccggtactggcgcatggcattttccagctgtgccgctaactgctgctgttgaagctttgcattgacttctgcagcctgccgctggtattcgagtgactgaatccgcgcttttgtagcaccgaaggtcagtggaatactaatgcctacattaaaggaattgaaacggttggaactgccatagtacttttctacaccgtttttggtatgcataccaatcaatgactgagtggtgacacctaatgaaaattccggaagtccttgtgacttctctacctttttatttttttcggcaatttccatttcctgataaaaggcttttactgaaggattattggcaattacagtactgtccagtacaaggtctatttttaaaggctgataaccagcagaaactggaacttcaatttcttcttttgtattcagaagggttttcaggtttttataggcgttatccagatatacctgattttgtttcagcaggaggttaatttctcccttctgggtttcggccgtactgatttctacttttttaatgtcacctgcattgtatcttacggtagcaatacgaatgaaatcctggtacagattatccagatctgtgagcttggatttgttaaactgtaggtattcaatctgatagtaataacttctgacttgcttcagtagttcatttacagagatttctttttcaatttccctgctttttatggtagaggcaatcagttctcttctcgccttaaatatagta

SEQ ID NO: 2154 - DNA, 24254 bp, synthetic construct
  misc_feature 1..24254: note = Synthetic
  source 1..24254: mol_type = other DNA
  variation 16040..16101: note = n is a, c, g, or t
tcagggaacatcccgacgggaaagtggaattcgtctcccggaacagctatttcccgaaatcaggatctgataagagcggaagcggtatcggcctcgaattagtggagaagaagctggaattgctttatcccggtaattatcaatggaagacctccatggatgagaatgtgtattcaaccatgcttttgatcgacacaaaacaaacaaccgatgatactcaattgttggatcgtagatgatgaaccactggccttgtcgcttctggagtcatatgtacagaagacctcttttttgcgattggcaggtaaatacagcaatgccctgtcggccatgaaacatctggcggaagaaaaggtagaccttattttcctcgatattcaaatgccggaagtgaatgggatggagtttgcgcgcatcatcaatgaccacacccgcatcatctttaccaccgctttcagcgaatatgccctggaagggtataaggtaagcgcgcttgattatctgctgaagcctttttcgtttgccgatttccttaccgccgccaaaaaggcgttaaactggttcgaaatgaccgagaagaagccggccaccgaagcggtgcaagagaattcgggtatctttgtgaaatccgattacaaacttctgcatgtattgtttgatgatatcctctatatcgaaggactgaaagattatgtgaaaatatataccgaaggtcagccaaaacccatattgtcgctgataagcctcaaatcactggaagaagacctgcccccggatcgttttatgcgtgtacaccgttcctatatcattcacaagaataagatatcgagtatcaataaaaagcgcatcatcatcggagaaaaacaaatcccgatgggagacacttaccgcaagcaattcatgtccctgataggaaaatagacatttaaagtatctgacagaccaataaatggttggaaaagcataaaaaaagagagcaatcacaagttgtgatttactctccttactctattctctcaatgcggtcttatgaaagatatgaggtaagcatccagactgttttttcttgttctgagagatagtcgctcatcaacgccacggtgccttcgtcgttggcttcggaagcattttccaatatttcacgttccaaagcgataatcactttcagtgagtccaggatttcttttacgatttcctttgcattggttaccacgccggtttccttgatggcggatactttgaggtattcgctgaagttatgcgcgggggtgctgtccagcatcaggaggcgttctgccacttcatccaccttttcggcagtgtcatcataatactcttcaaatttagcgtgtgcgttgaaaaattcagcaccttttacgttccaatggtatccgcggaggttggtgtagtaaagctgcaagctggccagtaatttctgtaagccatctactgtcttttcagtactctttgggtttaaccctaaataatctaatctcttcataatttttttgtttaactgtgttgtcgttataactgcggcaaatttacaaaatagtgtgctatttgccaattttttcatttatattccccggattctgtcgtcgaacgccgtcaaagccgcctttgccccttcacccatcgagatgatgatctgtttgtagggcaccgtggtcacgtcgccggcagcatagatcccgggcacattagtccgggcgcgttcgtcaatctctatttctccgaaacggttggtatttaccacatccctgaaggcagcactgttgggcgccaggccgatctgtacaaataccccgtcgaggtctacaaaacgttcttcctctgtcttacggtcttttactttcatcccggtcactttctccccgttattgatcacttcagtggtctgcgagtggaggaagatatccacattctgcaggcttttcaccttttcctgtaacactttatccgctttcagttcatccaggaactcaaagacagtgacatgggtacagattcctgccaggtcgatagccgcctcgatgccggaattacccccgcctaccacggctacacgtttacccttatagaacggaccatcacaatgggggcagaaagctacaccctttccgataaaatcggcttcgccgggtacgttcagcctgcgccagcttgctcctgtagcgatgatcaaggcagatgcggtaaatatctctccggtccgggcggtaatcaccttttggccgttttccacctttacattttccaccgaacggttttcaaaaatatcaatcggatattccttcatgtggtttttgaggtcatccgaaagtttagggcctgttgtctggggaaccgagataaggttttctattcctcccgtctcattgacctgtccgcccacacgttcagcaatcactgccactttcagtcccttgcgggcgctgtacacagccgctgatgaaccggcagggccgccacccaccacaaccacatcgtattcgcggacgggctgttcttcgatttcggatgtctccgtaccgtaatgtgcttcgagttttgccagcagttcgccgaaattactacggcctacatgcagcaattcgccatcggcaaaaactgccggaacaccctgcaagtccaaagcatccgcctcttccttgtagatggcgccatccaccgcttcgtgggtaatatgcgggttaagcaccgccatggcgttcagcgactgtaccacatccggacaattggtgcaggtaagcgacatataagtcgtcaaatggatatcccccttcaacgatttcaatttttttatgacgaattcatcaggcagattcttacctttgccgtcagcattcaatacggccagtaacaatgaggtgaactcatgaccgtttggcacggcgcggaaccggatgccggtcttttctccgttcttcagtatatcaaaagcaaaggcttcaccgggattcactttcacagtcaagtgatccgaaaccgatgctacgtcgttgagtagttcgagcagctgtccacggttcggatgattctcactgaccgaaacatcgaatgtgtaatcattaccgagttccgcgaagatgccccgtagttgttctattaatgatgtgtctaacataatgtgtaaataaaaagacaggtaacccgtagtttgtaattcactacaggttacccgtcagtagtgattgtatattaaatttttccgaccaggtcaatgctgggtttcaatgtctcctggccttcctgccatttagcgggacatacttcaccgtcgtgggtggctacgaactgggcggctttcaccttgcgcaccagctcttcagcgttacgaccgatgccattatcgtggatttcggcaatcttgatctttccggaaggatctactacaaaagtacccctgtaggcaacaccttcttcttccaccatcacgccgaatgcgcgggcaaggagtccggtaggatctgccagcataggatatttgattttgcggatgctgtcggatgcatcgtgccatgctttgtgggtgtaatgcttgtcggtacttaccgaataaacttccacgcccattttctgcagttcttcgtatttttcagccacgtccaccaattcggtagggcatacgaatgtaaagtctgcgggataaaagaaaaaaatagcccatttacccaatacgtcgttgtgggttactgttttgaactcgccttcgtggtaggcttctactttaaactctgtcagttgtgaattgataattgaagtcataattttttctattttgtttttgttatataattagatgtttcttatatggttttcttctgaataccgggtgaaaacttgttgtaaaaacccttcgaaccggttttccttcgttcgtgctacaaagatagataaagattttatttattgaaatacatccttgattgattgtgtttatatggtattggctaaagttttgactttggacaagacttctgataaatatgagattaaattagatagcttggtttacagattcggcataaatatccattataacatctgacggaatattcagtatataacatatttggctggctatttttaaagaaggctcggctcttccgacaataaaatcgttaattctggaagggctgatcccgagtatggctgccagttttttttgcgtcattcctttttctcccagcgcgtttttaatcaatatgcctatggtcggtttaccaatggggaagtgttctgtttcatattcctcaacaatatccgacacaatcgttaattctatcagattcttatctgtaaccggagtattgccatctaccagaggtaaaagttcctcgatccttgcaagggcaaattcgtattgtgctttgctgattttattcataattcattttcttaaatagttgaacagtctattttattgtactcttcatgtgtacccacaaaacggataaacattgttctcacttgaaacagaatgatagtaacaatcctgtacttattacctttgatgttgaatacataacggtcattacccacataatccgttctcggataaactgcttttagttctgcgagattcttccactgagctttttttaccgtcgcataccagcactcaagagcatctttcgaatcttcataccctttcctttcataaaaaattcgtaatgtcttgtgtgctataattaccatctccctattttattattagctatacaaagattggtaaattattttgatattcaaaataaaatatacaaataaatttgtaattttatatttttgagtacaagaaaaggtagtctaaagtattttattgatatattctacaaaggtttccggatatttaataggagcctcgacatgtctgccttcatatatccagaatattttgggacaagctaaattattgtagatttcccgggcgccttctattgggatttcatcttcttttgagtggataaatagaactttaatgttctttatttctttggtatcctccttggctgagtagggcgatgttataaattgctttatatgttcgtgatattctttgggtgaggtcaataatgcaacatccgtaaaggaagtcatcattccgtcaaatatcagtgcagatattttattgttattgttccttgttaaatgtacggcaacctgcgatcctatcgaagcgccgtacacaattaacttaccatccacaacatcttttctcttcaaaagggtgtccaatagcatttgtgcatcatgggcaatattcaggtgggtgggtgttccggtagattttccgtagcctctgtaatcaagcatacagacctgaaaaccattattgaccaatggacgtatatgatttgcccatttggaaatattaccgccattcccgtggaagtagagtatggttgctttgagacgttcctggggtttgaatatcacggaataaatagtgtccgtatccgcatataatataatatcctgataatccagggaatcaatattcacccattctctatcgggatgataaaatttctcatccatttgggcatttacactactcaaacatattgctaataataaaatgctgaaaatctttttcatacagttttttgattaataattaattttcagcaaaaataaaatcggaaaaggagagatgcaaaaaacagggataaaagtacaaaaatgggataaaatgcaagaaaaatcagcacatttggctccaatatctacaatttctctttaatgctcttgatataggaacgggaaacaggtatcttttcattcagatatttcagatttaatttaagaccctgtgagtttccttccacattgacaatatgtaaaacatttaccatatatgcgcgatgacagcggacgacataaggataattccggagatcttttgtcatttgagttattgtagtacgtatttttttttgtttcagcacattatcagaaaaataattcacttttatataattacctgacgattcgagatagaggatattatccggatataacattacgttttcttttgtttctccatataattcgatggaatccgtttccacctgatcaatattcgtcttggattgtagtctttgggataaatgattgttcatcaggacggcctcatgaagattctttttcaaagcattattttgtacaatgaagactgacgccaaagccggtataaaccctatgaatagcgttactattaaataggagagtaagagagaaccaaaagtactgtttagccgatgtcctacactccagtcaaacattgcatttcctaaggcaattaataatagaatgaggatattattgattaagcttttccagatcgtccatgtagatggattgtagaattttttgaataaaaggggaaatagataacctataattgaggtcgcaatggctgtaaccagtgtaaaaccagtcaccaccagtaatttcacctttggattgaatcctgctattccgaatggttgaaagaaacctaaaaggaaacagactaataatgtagcaacaacaattaccgcccacggtttggtattatatggagcagacctattgagatacgtcaaaagcttattcacttattcttaataatggaaattgacgcaaaagtacggatttctaatgaaagcatcgccgctatttttctttaatgctggataatcaaatataattattaattttgtactgatagattattattaattgcttgaataatatggataatttgactacttatatttcaattgatccggagatacgctttgggaaaccgtgtatcaaaggaacacgtattgctattacggatattctcctgtggcttgcttccggtatgtcaaatgaggaaattctggatgattatccttttttggaagagaatcatattcgtgcagcattgcattttgctgctgatcgggaatcttttattaaaataatccctacagccaatgcagatccggctattgcttgacgcaaacttgtcatggcgatcagtcaacctattaagacaatattatgatgactgttctcatgtagatagcataggtttgtcaattcctgcaagggatatggaaatttgggaatatgccaggcaaaatgaaatgattattgtaaccaatgatgaagattttttacatcttgccggagcaaaaggttttccgccaaaagtaattttattacgtgtaggtaaccaaagccgaaaacatattgaacacctccttatcaatatgaaacctcaaataattttatttattgattctccggaatatggtgttttggaactagtgtgaacatcctgacataatagcaaaaaaggctgtttcattgaaattttgaatttcggggaaacagccttttattttggtaatgctccggaaaattacttgcctgatggcttcaatcccatattaaagagggtaaatgcctgaaggtccgcattctcttcgatgattttggagagtggttttcctgctccatgccctgcatttacttcaatccggataaggacgggattggtaccgttctgtttttcctgcaattcggaagcaaatttaaagctgtgtgccggcacgaccctgtcgtcgtggtcagccgtggtaatcagcgtggcaggatattgcacaccttcttttacattatgcacaggggagtatcccagcagatattcgaacatttccttgctctgttcggcggttccgtaatcataaccccaaccggcacctgctgtaaaggtatggtaacgcaacatatccatcacgccaactgctggaagcgccactttgaacaactcggggcgttgcgtcatgcaagcgccgaccagcaacccgccgttcgaacctccttcgatagccagaaaatcaggtgaagtataacccttttcaatcaggtattctcctgccgcgatgaaatcgtcgaacacattctgcttttgcatctgaatgcctgcctcgtgccatttcttaccatattccccgccgcctctcagattgggaaccgcgtagactccgccgttttccatccagactgcattgacaatcgaaaaatagggtgtcatgctcgcgttaaatccaccgtaaccataaagaatagtcggatttttcccgttgagtttcgttccttttttataggagatgatcatgggaacttttgtgccatctttagaagtatagaagacctgttccgactcgtaatcgtcagcgttgaactttgcttttgatttttcatacacctccgtttttccttctttcggttcgtaggaataggttgttcccggggtgatataattggtaaagctataataaaggaccggatcttcttttttgcctccgaatccacctgcggttcccaccccgggaagctcaacttcccgtatcagattcccctgatagtcatattgttttacctgtgaaatggcatccttcatatagtgtgcaaagaaatatccggaacccgtagtcggggaaagcacattctctgtttctggaataaaatcgatccagggagcagaaggatttttggcatccgccgtaacaattttgctgttaggggcatctttatcagtgacgataaacaatttgtctccttcattatcaatgacataatgctcgttatcaaaattatcgataagaggaataatcttactgttgggagtggtcaggtctttgatatacagctcatttccataagtggaattggccgctgtaatgatcaggtatttgtcatcttccgttacataacctccgatatagcgtcttttctggtcgagtccgaaaaccactttgtcttccgattgcagtgttcccagttgatggtaatacaatttgtgttggtccgtcattgcggaaagctgacttcctgtcggtttatcatagctcgaataatagaacccttcatttcctttccacgaaatgccgctgaatttaatatcaatgagagtatcgccaagaattgccctggaatctacctccataatgatcacttttctccagtcgcttccgccttcggaaatggcataagccgctgttttgccatctcttgaaaactgcaagcccgccaatgaagtagttccgtcttccgaaaatttattcgggtcgaggaaaacctcttcatttccgtctttatctcttttatatacaacgtactgattctgtaatccgtcgtttttcatgtaaaaagtgtactccccttcggtaaacggagcaccgatcttttcgtaattccacaaatcttccagtttgtttttaatctgattgcggaaagggattttttccagataatcgaacgttacttcattctgtgcttgcacccaggcggcaatttcgtctgaacggtcatcttccagccaacgatacgggtctttaatctccgtaccaaagtaagtatctacggtatctactttcctggtttcaggataagtgaccgctacagtttgtttgttttcttgattgcatgaagccaaagtcgctgcaatacacatagggataagaatttttttcattgtaaaatgattagttattggaagacaaaaatagctttttatggtcagagttgaaaataatcttatacctatgcgtccaaagtattattgaacgatctatgatgagatgtttatcatctcaatctttgaatagctgaatatttttgcaggtggttcgtgattcctgaataatgggggttcaagttggaataatcaaaaaaggcgagtttccccgccttaaatgttttcacaacggaataatccttattgtgaattgctttcataagtttgaactgcaaacttacaaattaaattttatttgtcaaatattttgttaactaaattattcaatttaactttacaggcaagaaaaatttaatatattatatgaagagagatgactaatatctcgttcttggtattttgaatttgatttatatacaaaaggttgaaatgttgtagtcaataattgcctagaagtattagtaaaataacaatatgaaaagaatcttaggtcttgatctaggctcaaactctattggatgggctctggtaaacgaagcggaaaatgaatctgaagaatcgtcaatcataagattaggtgtgagggtgaatccgctaacggttgatgaaaagcaaaattttgaaaaaggaaaaagtattactaccaatgccgatcgtactctaaagaggagtatacggaggaatttgcaacgctataaacttcgtcgagagaatttgatcgagattctgaaagagaatggattcatcggtgatgaaacaatactttcagaaaacggtaatcatactacatttgagacctatcgtctacgacaaaaggccgtgaccgaaaaagtgtctttggaacaatttgctcgtgtgttgttgatgattaacaagaaacgaggttacaaaagtagtcgaaaaataaaaggaaccgaggaaggtgcactgattgacggaatagaaatagctaaacgtctttacaatgaaaaattgacgcctggacaactttgtttacagcttcttaaatcttctggaaaatatcttccgtacttttatcgttcagatctattatcagagtttgacaaaatatggttaaaacaacgagagttttatccattattgttgactgacgaactgaaaaaaaaattgctcggtaaaaatgaaactcaaacatggactatctgtcaaaaaccatttgaaattgttgggataaagcgggttccaaaaggaatagaattaaaaaaagagaattttgaatggcgtgtaagagctctttcagaaaaaatgaatttagaagagctggctattgtatttcagaaaataaatggacaaatctacaattcaagcggatgtcttggcgatatatccgataggagcaaggagttgtttttcaaccgtcaaactgttggtcagtatcaaatgatgattctggacgcaaatccgaatgcaagtttgcgaaatatggtgttttaccgacaagattatctagatgagttcaatacgatttgggacaagcaagccgaatttcataaagaattaacccccgaattgaagcatgaaatacgaaatgtaataattttctatcaacgtcgtctcaaaactcaaaaaggactaattagtttttgtgagtttgaaaatcgaaaaatcgaagtagaagtcgaagggaaaattaaaataaaaacagtaggcagtcgagttgtgccacgttcgtcaccattatttcaggaatttaaaatttggcagtctttgaataatttggaagtttcagagaaaggtcgaaaagtgaaaaataataaaaataaagtacttccactattccatgagaaggaaaatgcattacaaatctatgggaaaagagagctctttcaggaagagaaagagttattagcagcagaattatctattaaagagaaactgacaaaatcagaaattctaaaattattgtttgatgccccgcaggaattagatttgaattttccctctcttcagggcaatttaacccaagctaaattatttgaggcatataaaagtattatcgatcgtacaggacatgaacttgatttgagaaaacctacaaatcaaatattggataatattgaagagatattcacatctttgggttataataccgatatcttacggttcaattctaattcaaacaacttggataaggaaccaatgtataaattttggcatttgttatattcttttgaaggggataattcagtttctggtaatgaaaaattaattaataaaatcagcgaactttatggttttgagaaagagtatgcaggaattttggccaatgttacattccaagaggactacggaagtctttcaacaaaagcaatccgaaaaatattaccttaccttaagtctggtaataaatacgatatagcttgtgaatatgcgggttacagacactctgccagttcattgacaaaagaggaaatagagaataaaatttataaggaacgtctcgaaatcttacctaaaaattcattgagaaatccagttgtggaaaaaattctcaatcaaatggttaatgtgataaattcaataattgatgtttatggtaaacctgatgaaattcgtattgaattagctcgtgaactgaagaaaagcgccaaagagcgagaggaattgtttaagtcaatcaatgaaacgacccgtttgcatgaacaatatagggatattttattaaaaccaccgtttaatttttcgtatgtaagtagaaatgatattatccgctacaaactttacgaagagttgaaggataatgggtataaaacgttgtattccggtacttatatttcaccgaaagacgtattcagtggaacatttgatgttgaacatataattcctcagtcaaggatattcgatgactctttttctaataaaacattggagctgaggagtattaatatcgaaaagggaaatagaaccgcaattgactttgttaaagataagtatggggaagaggagggtgataattgtatggggaattatcttaatcgaattgaaaaattgtataaaactggatccttatctcgtgcaaagtacaataaattgattataaaaaacgagaatatccctgagggttttatcgaacgggatattagagacacacagtacatttccagatatgcaaaaacattacttggggatttggtgaaatcggtggttactacatccggttccattaccgatcgtcttcgtcaagattggcagttggttgatataatgaaagagcttaactggataaaatataaggaattgggattcactgaagagttcactaatgaagaaggacataaaattcgcaagataaaaggctggacaaaacggaacgatcatcgccatcacgcaatggatgccctgactgtagcatttactaagttgagttacatccagtatcttaacaatttgaatgcccgaagtgataaaggttctgccatttatggaatagaacagaatgaactatacagaaatggcaaaggaaaactactgtttaaacctccttttgcattggatgaattcagaacagaggccaaacgtcatttggaaaacacgcttatctcaattaaggctaaaaataaggttacaacacaaaatataaactcttcaaaaagatcaggaggtctaaacaagaaagtacaacaaacacctcggggacagttgcatttggaaactatttacggaagtaaaaaacaatatattgtaaaagaggaaacgataaatgctaaatttgatattgagaagattacaactgttacaaaaccatcttatcgagaggctttgttaattcgtttgaaacaattcgacaatgatcccaaaaaagcttttgcgggcgtaaatgctttatcaaagaagcctatttggctcaatgaaaatcatattgggcgagtttccgaaaaagtgaagaccgttaatatagaaaccgtttatactattcggaaagaaattgttggatctaatcccacatccaaacagtttattcctgatgaaaaagggcttaaaaatgtcattgatgctggaattagaagcatcttggaagacagacttctcaaatatggaggtgatcccaaaaaagcattctcgaaccttgatgataatcctatttggctcaataaaggaaaaggaatttcgataaaacgagtgactatttctggtattagtaatgccgaaagtttacatgacaaacgagacaaagatggtaattgggttttagatgaaaagggtaacagtcagccggttgattttgtaagtacaggcaacaatcatcacgtggctgtatatcgtgatgcagatggtaatttgcaggaaaatgtgatttcgttttatgaagtagtaagtcgtagaaacttgggactttcggtcattgacaagtcgtacaaagctggggagggatggcgattcattttcagtatgaagcaaaacgaatattttgtttttcctaatgaaaatacaggttttgacccccacgaaattgatttacttaatccagataattattcgctaattagtccgaacttgtttagagtgcaaaaattttcaaaactattctatggtaattcagcagtaagagagtatgtgtttagacaccatttagaaactaaagtagaagatattaaagaactaaaggatataacctataagtcgataaagagtttgcctatatttgagaaaattgtcaaggtccgaatcaatcatattgggcaaattgtttcggtaggagagtattaagaattgtagtgtagattgacaattgtattttaaatctgtaattaaaccttttcttttcaatcaaaaataaaaggtttcgtctgctttgatgtttatactcgcttattgatactgaacaaagatgatgtatttgagaaaataaacgattatgataaaacgtactctttattttggtaatccggcatatttgtccctaaagaaagaacagttggtaatccaattgccgggagttgtgaacaacgaaacgttgcctgattcgtttaaggctggtgctgtgaaaactatccccatcgaagatatcggtgtagttgtattggataacaagcaaataaccatcacgcatggtgttattgaaaaacttttggctaataatgtggctcttataacttgtgacagtagccgtatgcctgtggggttaatgctaccattgtccggtaatacaacacaaacggaacgttttaaacatcaactggatgcatcggttccattaaaaaagcaactgtggcagcaaactgttcaggcaaagatacaaaatcaggcttatctgctccattctactaccggagagatcgtgaaaaatatgatggtatggggttcagatgtgagaagcggtgatccggacaactatgaggcacgtgcagcggtgtattattgggcaaatatttttccacaactaccaggattttcgcggggtagggaaggaattcctcctaacaatctattgaactatggatatgctattttgagagcggtcgtagcacgctcattggtctcaagtggtttgcttcctacattaggagttcatcatcgaaataaatataacgcatattgtcttgccgatgatattatggaaccttatcgacctttcgtggataaggtcgttattgaaattatggaaagcggggagaattatcaagagctatccaaagagatcaaaatgaaattgctaaatattcctgttttggatgttgtaattggtggacagcgtagtccgcttatgcttgcggcgtcacaaacaacagcttctttggctaaatgttatatgggagaagtgaggaaaattgtatatccaagtttttaaatgggtagaaatttcatgaattgtctaagtgaatatagaattatgtgggtactcgtattctttgaccttcctacggaaacgaaaaaagaacgtaaagcatataccgtatttcgggataaactcatcaaagatggttttacgatgttccaattttccatttatttacgacattgtgccagtcgtgaaaacgcagatgtacatattaagcgggtgaaaaataatcttccaccgcatggacaaattggcattctgtgtattaccgataagcaatttggaaatatggaattgtttatcggtaagaaagaaaaggaagtaaccacaccttaccagcaattggagttgttttagaaaatagaaatcccgccataaaggcaggatttcatatttggaacaacgactttttttaattgtgaatatctaatcaagtatctggataatagtaaaatacatatatccagttgttcctgatgtcaaagatacgaacttatgagagcaattcacaacttcttttttcaactttcccaagcggggtctgttgttcctgatgtcaaagatacgaacttatgagagcaattcacaaccgtccttcaaccatttctcgatgatttcgagttgttcctgatgtcaaagatacgaacttatgagagcaattcacaaccctttgaggatgattttcgccatgcaaatagttgttcctgatgtcannnnnnnnnnnnnnnnnnnnnnnnnnnnnnnnnnnnnnnnnnnnnnnnnnnnnnnnnnnnnnaagatacgaacttatgagagcaattcacaactatctccaagtgagccctgacaggacgtttgttgttcctgatgtcaaagatacgaacttatgagagcaattcacaacaacgccggtcaatatcacaaaccatgcatagttgttcctgatgtcaaagatacgaacttatgagagcaattcacaaccggcgatctgcgtttgatttgtcgcataggttgttcctgatgtcaaagatacgaacttatgagagcaattcacaaccatagacaatgacgtcacctgacgcggagagttgttcctgatgtcaaagatacgaacttatgagagcaattcacaaccaccatgagctaaataccttacccaaggcgttgttcctgatgtcaaagatacgaacttatgagagcaattcacaacgtataatatattgttccttcaataggtggtgttgttcctgatgtcaaagatacgaacttatgagagcaattcacaacctgttgcttggatgttaaatactcctgaccgttgttcctgatgtcaaagatacgaacttatgagagcaattcacaacatatgttgcttccggtactggcttatcacgttgttcctgatgtcaaagatacgaacttatgagagcaattcacaactttatccgctccaagctatcggaataatagttgttcctgatgtcaaagatacgaacttatgagagcaattcacaacgtcgtagggtcaatgctataagacaatgagttgttcctgatgtcaaagatacgaacttatgagagcttcttttagtaatttttcgatagtgtcaataaaattcggattactctgggcgttttcataaaataacctctctccatcccaccatttggcagcaagtaaatcacttccggaaaatggattttcttgttctcctttgaagtatttatacaagctataatctttcatgaggtcagttccttaaatctatgtataatagatgtgaactccccggataaatactcgaacgcacgattcttgatatgttccgaaatgtcgtagtaagcttcggctatgctgccggtgatggcggcaatcgtatcactatcacccccgatcgacatggctaagcggatggcactttcaaagtcggcactttcgagaaaacagatgatcgcttgctgtaccgttacttggcacgtttcgttgaatgagtggacatggattgtcgtcttgtatccatcgagcaaacgagcttccataggcacctttagggtggggataccttctgcaccaagaatgcaagctatctccgaatggaatacctcttagaagggcatccgctaccgcaataggacaaacggtatcagccgcgaaatcacattccggggtgaacaactcaaaatcggtagagttcgtattgttgaactcgaaccttgaaccgattatatctcctattattgctgtatgtttttacacgtcataccgacaccacttccactttgctttttccgctctgttgcttgctcaccctgatctgcaccggtatccgttcggtcatttcctgcacgtgggagatcacgccgactttccggccttgattatgcagtcgttccaacgcgtccatggcaatattgagggtagtgggatcaagtgaaccgaatccttcatcgataaagagcgattcgactttcatgcggctcgaagagagcgatgccaaccccagcgccaacgccagcgagacgagaaatgattcaccgccggacagggaatagaccgtccgtacctcatcgcccatatcctggtcgaccacttgtaatcccagcgaatttggtatgcgctgcaagagataccgcttgctgagaatttccagatgcacattggcataactcaacaacacatccagagtatattcctgcgctatctggcggaatttcttgccgtcggccgacccgatgatatcattgagttttgcccaattttcctctattactgtctgcttctctatctcttttaacaacgaacctatacgctgtttattgagggtatcttgctttatattaaaatcgatttcattggcttcctgcgaactttgccttaataattcccggacttcattctgtgatgatgtcagtccttccaatgttctttccgacggacgttctccaacatgtttttccagcgccttggtccgttcacccaggattgatccggcctgcatcaccgcattatcgatttcctgcaggttattcctctcattttctatccaatcctgcgtgaattccaggagagatagtagcttctcacgggtaagcattgcatcatactgtgggttatgccatgaatcgccacccgattgggtttgaaaggacgtggccagctctgcattgtactgctggttatagtggataacccatttttcgagttgctcattggcggctgattcctgtcgggtcagaatactgatatctttttccaactgctcatgctgtgcctcgagacgggtaatctctgcctggattgtatcgactttctttttctgctcatccagggcctgttttcccaaacggatcatttcttttagcctggcctccacttccgttaccggcgcgccattaaaaatagctcctcgttgtccggtcaattctttatactgagcctgtaatccggccagatattctccttttccacgggagtcctcctttatctcttttagctggccttccattccttttattttttcgaccaacatcttttgttggtggaactgctcttcaagccgggtagtgttgattttccagttacgggcaaattcacggatttggttcacgaaagccccgggattgtactgccagttctcaaaccactcttcggcaggaaaataaacagccactgcgcgttttacaatttccaggttttcagctgtcttccgctgtgctgccgtatcattctcctgtaactcctgcaacgatttcaggattctctcattatccttaatccggttttcgtggtcagtcaactctttatccaacatagcaagattagttttatacaattccaacaactctttttgcttcccgtaggattgtatctgctcaagtagttgccgttgacgacttttatgttcctgtaactgatcttgtaaccatatcgctctgtctgaaagcggatattgttcacattttccggaaatccggaattctgaccactttgcttcaagttcttttattgatacgtttttatcggtaagcgttttttccaattcaccgattgacttttccaatccaacgcagatttggcggatacggctttgtatggtcagttgttctgaataagcggcctcattttgtgtgtaggtggattccagttctgaaagcagttggtctgctaacggatgtttctcggcatagggatggtcggttccaccacaaaccggacagggttctcccggctctaattgatcccgtagtcgttccacgctctcagccatgatcaactttgctttttcaagcaatttcaaagagatctccttttctaccaatttcgtttgcaggaggttttctgcctcagacaattgtactttatattgctccagctcctttttattatgcaatagtgatcggcttatattatcatgatccatgattgcctggtgcagtattttccagtgggcatccgctgtcactatttcttcaatgaaagtatccagtgaagacttttctttttctatatcctgtatgggaatggctgatagggtagtgtgcaagttctggaattcaccctgtttttgccggtgagcggccataagggtatttcttttatcctccagaatttgtttttcttgtccgtgctgtatgatctttttttctgtttcctgaatgcgtatggtatagtcatgcacgtttttcaggatttcttccgcatctgtcagtttggataaaataagactctcctgttcggctattggccggcgggattcattttcacctttccactggcccagtttaccaatttctttctccaggtcttccaaattctttttcgtcaaggacaattgccctttttgataagtcattttttcagaaatgatggagaactcatcggtcgcccgttttacctgttgtcccttttcagtaagttgtatgtccagcgcctttgctttgtttaatagcggttgtgcctcttcttctttctgaactgctgtctctaaagcggcagcggcttgtgcaaacacaatatcggctgtttttctctccccattcagcgtatccagttttaacgaaacatcacccgatgctgatttcttgacagcaatttgttcccgggcattttgtaacccattgactatttctctggcgggttgaacccggataatttgttgtaactgctgttcccgcggttgtgcttcagttttggcagcggttgcatgtgcatgttggaagacggcagtctgcacgttttcctgtaattttacccattgctcatgccagttgatctccttgttcagcgtctcacttaatttctcattatttttgatgaggatcgtcaacgctgctttcctttcctctaattcgtttaactcctcatgggtaagggtggagatcccttcgcgttgcaagttcagctccctgagtttttgttgctgttccttatagtgttcatagacccttttcgagatctcggaataaatatgggtaccggtcagcttttccaatagggacgatttctcgtctttcccggctttcaggaaagcggtgaaatcgccttgggccaacaggacggatcgggtgaactgctcgaaattcaatccgaccagccgttcaatttccaccagcagttcggttttccggccgggtatctcctgatgggttgtgatgtttttcagggacacctcataagcctgtaaattgccgtcggccttgttacgcgcccttctcacactccagttggcacggtaagaatatccgtcgacaccttcaaaatcgacctcggcaaaaccgtcggaagtgccatcccgcaggattccgcgcacatcgtcctgcttgatggtactcccttgcacatccatgatatccactccatgttccgccagcctgtaccgtggtgtcctggcatagagggcaaggcataaagcatcaaggatagtcgacttgcccgctcctgtaggccctgttatcgcaaaaatacctgcagaacaaaggggttcacgggtaaaatcaatttcagtcatgccatccagtgaggccagatttttcatgcgaatagccagtatcttcatagttttgcctccaattcattgacttcctgttcgacttgctgaaaaagcttttgcagtgctgaggggataggattgtcatacttggcttggtatactttgtgcagtacttcaattggtttcagccggttgagctgctccgggtcaatgtaagcgattttatccggattcgttgccgttgacttataacgcacatcaatcttggccaatctgaaattcttacccgtcagtgctgtctctatcttatgcctcaaacccggttccggcccttccaataatactctcgcttccagataaggcgcggtatgcgggtctccttcaaaagcttttaattgcgacaatgatgtaagtacttcggtaagtaaactgtggacaaacggaaccctcataagaggtactgaaaccggtatttcaattattttcaggttaccgatcgcatcatctgccatatcgaaaacgataacctggtgcttataattcgtttccgaaaaagacattggcaatgggctgccgctataacggatatgctctttacccccgatacgctgcgctttgtggatatgtcccagggccacataccggatattctcgctgaatgccgccgcggagatacattccactcctcccatgatcaacctttccattttgtccatatcacccacctctgcctgttgtgtatgcaagtgccccatggcaatgatggcttgccgggattctcttttcaatatggcatattcacaggcatctttataaaatgcgctcacaccatcggcataaggattggtacagtccggtatcgagggataatcacccatgcgcaggaatggtgctgctatacaccacgcttcggtattgccctctttaccctttaagggaatacagattttgtcatagtccaccatcccgtcgccgtccttttccacgatacccacaatatgaatattggaggactctaaaaggggtttgggcgattccaaccgcgaagcggagtcgtgattacctgcggtaacaataatctgtaaatggggattttgtttcacagattgattaagaaaagtgtaaaacatttttatggatgcagctgagggattcgacgagtcgaacacatctccactcaccagcagcacatcaatttgttcttcagaaagggtatttagtaaccagtcaaaaaattgctgatgttcataagtgcggtcatactcatgaaagagctgtcctatatgccaatcagccgtatgtaaaatccgtatcatatcaacttcctttattacccggccaacattctggtttaaaagaatgttatggccgtagcattattgtctcagttctgtctttaacgatttcccttcaaaaatactaataattgattgaatttccatgagtatgattggtagaaatattcccacaaattaaggagtttcaagataaatttatctctggcttacaataaatgcgtgcacaattccaaaacctgtttattataaaaaaacaagcctcaacttgagctgaggctttaagtgaactgtgcaggattcgaaccagcgacctctgccctgtcaaggcagcgctctaaaccagctgagctaacagttcgtgccgcaaaagtacggaaaaatctgatatgttctggtttcccggataataaattataaataattcctgatttggggtgtaattattatgtaatttatggtgtgatcggactaatagctgaaaaaccgatttattttcgtatctttgcatccattatcaattaagttagtattgtatctttcttctcaaggttttgctccgccattttaggcggatcttcccatcgccgaaatcgacatcaaaatcaacttatttgtataagttatcaatcagttacaggaatgtggaatatcgtttatcatagcatatcctgtttaatattaaaacatgacatttaaagaattatcaattatagagccggtattgagggctctcaacgaaaaaggacatacaactcccacaccaatacaacaacaggctattgccccggcactcgataaccgtgatatcttagggctggcacagaccggcacaggaaaaaccgcagcatttgtactccccatcatacaacaactctatctgaataaatcccatgtcaggaaaagagagatcaaagcattgattttgacacctacacgggaactggctatccagattaatgaatgcctgagcgattatatccgctatacgggactccgtcactgtgtaatatatggtggagtgaaacagaatgcccaggtgaatgaactgaacaggggaatagatatattagtggctactccgggacgattgctcgatttgatgaaccagaagatcatcagtctccaggctatccgtcattttgtgctggatgaagccgaccggatgctggatatgggatttatccacgatatcaaacggttgttacctctactacccagggtgaagcagactcttttcttttcggccaccatgccatcatcaatagccgatctttcacgttccatcctgcataagccggtcagggtagaagtggcaccggtatcgtcggtagtagacaccattgagcagtatatctactttgtggaaaaaccggaaaagaaggatttactcattaatctgctgaaaaaggataagaagagatcggtattgatattctcccgtaccaaacatggagcggataagatcgcgcggattctctccaaatccggaataaacagtgccgccatccatgggaataaatcgcagaatgccaggcaaagggcactggctgattttaagtcgaataagatacaaaccttaatcgcgacggatattgcagcacggggaatcgatatcaacaatctcgaactggtcatcaattatgaccttcccgatgtggctg

SEQ ID NO: 2155 - DNA, 24254 bp, synthetic construct
  misc_feature 1..24254: note = Synthetic
  source 1..24254: mol_type = other DNA
gcacgattttgctgtgcatttacaattttaaaattttgatcaaaatctactccaattccatcaaaaaaacttttgtttttatcggtaaccttaaaataatgctcggtaaaaaaccagttgtttttttgatcgtagtacatttggttggtttttagtattttaccatcgtatgatgtgattgtaacattgcctgttaaattaatcattcctgttttgttataaacagttgcttggtcggcaacaatgtaatttttgtttttgttgctgtcgtaaactgttactttaacacctttgggaaaatgattaaacggatattttgctttgccgtaatctaacattttaacggcgtacatttcagcctttattttggcagaatcggtgtactttacgttaatagaatcggcttctccgctggcaaacagttgttttttgcttaagttctgaatgtcttttaaatcgttgttacaagccgttaaaacaaatgataaagcaataatatgggcaaaatatcgtttcaattaatcaaattttctgcgtttaaaccaaacatcgttgaaagaaaaacctatattaatgccataataattttcttttaccaatcccatattggtattacctctttgtccgtattcaaaccctaaattgatgtttgaattgaatcttccaacaggaaatcctaaacctacattagcattcaagcctttaatttcttctttgttgataatcaatccggtgttttcgtaatttataccggcacgatacgtcatacgttgaaaataacttgtgaacgaattgtatttaggggtgtaaaaaccacctacgccaattttcatataatcgttgtaagaagcattttcgtaagcgtaaaacgaattgtattttgatgtttgtgttgaagtatattcggcacctacaaaccattttaaatgattgccgatacctgcaccaattgaataattggttggtaacaacattttttcgttttctgccatttcgttagacgaatcaatctcgtcaagactgccactgctgtttaattttaccgtactttttattttttcctgatcgttttttaacttcatttcaggactaaaagtagcacttgcgtacaaagttaaattcttgtttaaaggttgttggtagtttaatccggcattaacgttaagtccgctgtaattattaaggtatctataacgtgtaccgcggtctaatgccacaccttcgccattatcggttataaatttggtaaggctggtttcggtatcgccaaaaatataagctccatcaacaccaatactgaaatttttgttgattttataaccaaaacctaaaaaagttctgtttaaaccaccttctcctatgtattgacgagcttcggtcattccttgatcgttaatgtttgtgttctgtatattgtatcccacaaatgagtaaggcataatacccacggcaacactaaaattgccggcagggaaagctaatgacaaataatcaaatgaaccgcttgtggttttttcttttccgctttggttttccagattgtttcctttgtaagacgcacccattgaaaaagtagtggttttcagtttggcatacgacgccggatttagtgtattaatgtgtaaactgtcgctgaaaaccgccaaagcccccattgatttgatttcatttgagcctttaaagtgtttgtcgccaaaaccataataagaatatggagaagcagtaccctgttgtgcaaaactgtttgaaaaacttgccaaagcggctgctaatattatttttttaatcatttgatacaatgtgttgatgcaacaaaaataaactttctaataaaaagtttggattggcaaagatgctattttttaaacggtttaccaaaaattcagaatttccgcctgttaaaattactgttaaattctcgtcctgatgtttaaaatgatcaataaaagcttcaatctcagcaataacaccgtttaaaacacccgattgaatagatgccgaagtggaatttccgacaaaagaatgcagctctgaaatcttttctaaaggcagatttgcggtgtaatcgtgcaaacttttatagcgtaaacctattcccggagaaatagccccgccgtggtattggtcctgattgttgataaaatcataagtaaggcaagttccggcatcaataatcaacctgttttgatcgggatattttaatgtagcaccggctactaaaacaattctgtcgatacctaaagtagtgggtgtggcgtataaatttttaaagggaatgggcgattcgtgcgttacaataattaaattgcccagttttttgaggttttcaataacttcggaaggtaaatttccaacagaagaaaggataatatcaacacaattttctattccttgaatttgtttggatatattttttactaatttttcgttgttggtaataaccaattgttgcaatgtactgttttcatacacagctactttggttctggtgttgccaacgtcaatacaaataatcataatttattaggcatatagcaacaaaggtagttaaatttttttttgaaaaagttaggaaaagtttaaaaaaagcttctatatttgcaatcgcttttgagaggttgtttacctcacaaaaaggtaccttagctcagttggtagagcaacggactgaaaatccgtgtgtccctggttcgattcctggaggtaccacaaaaaccgtttcaatctttgagacggttttttttgtaatatgccttactttttactgaacggggtggtcttttcattacaacctttttgcttatacctaacaaaaaggattttttttggtttcaaaatatagcagaacttgctaaaagtaatcccttttataaatagctgttaaatgtaaaaattactgttctaaaaaataggagataatgtggatattattgttatttattcagtaatcatttttttttattatatttacagtataagtaactgaaaaatattgttttatgaagaaaataattactttttttgttttttgctttacttctataatgttttgccaaacgcaatatctggataccaattttggaaatcaaggaagtgtttcagaaatttttacaggaaaacaatcacgtccagaagagattatttatcttgatgatggtaagtttctcatattatcgttcagatatgatttttttgctggaatgtggtctaattttgatttttatctttcaagatatcatgctaacggaaaaattgatacatcgtttggaacgaatggttttttggtttattcatctccaagtacttcccaaagagctccgcttctaaatatgtttaaattgaacgatggtaaaattatggtgcattgttatcatgacaatagtaccagattaatacgattttcaagtacaggtgtaattgatagtagttttggaaaaaatggtgaagtaaatctttcaacaggtgagcattataaaatagttcaaacagcgaacaataagtttcttttgttaggacagtattatgatggttataacaatatgtatcaatttgcccgattaaatacaaatggtacttttgatacaacttttggtacaaacggtacaaaaatagttgacctaacagcataccgatttgatttaatatccgatatagcatatactaccgatgataaaataattactattggtatgtcatatgatagttcaacaacaactaaaggggttattgcacgatttacttcattaggagttttagatacgagttttgggacaaacggtttggtaacattagatgtgaatacaccaggaaataatgcacttttaaaaaatgttgcgatacagcaaaataatgggacgattgtaatttgtggtgatgcaatgtcacctggtggcacaggtggtttttatggagcacaaccttttttagcaaagttaaataagaacggaacaatggtgaaacagtttggaacaaatggtataaaatattataatacaatttttcaggcaaacgattcgtttacaggtataaatttccataacaataccattttaatatcgggtacggcatcaaagccttttccatatatgcaaaccttttattacttacggttggttaatagtgatggcagtgatgtggttaattttggtaataatggtactatgttattaaatttaggtacaacaactcctgatgttgtaaatcatttcaataaaacacttattgtagataatcaaatttatggtttaggtatgagtacttacataaaaggattagattatgctactacattttttaaactaaaaaaggaaactttaagtaacaacgagcaattagcccaacaatttaatatgtaccctaatcctacaaccaatatagtaaacataactaatagtgaaagcttaatggttaaaaaagttattgtttacgatatagcaggtaaacaattgagtactcatatatttaacaatgaaccaaacatacaactaaacatagaaaatttagcaagtggcaactatttgttgcatttgcataccagccaaggtgttgcggttaaaaagttgattaaattgtaatatttcagatcgaaaaagaaatgaattttcttttttttaagttgtttcaagttcgtaatttattgaatctgtgaaattgttttaaattatgatttatctaagtcaaaagaaaatagcttaggatctatagtttgataaaacaaaaaaatcggttatgaaaccgatttttttgttttattcagaataactgaaagtataatataaaaagctataattaccggaatagcttcaaatctaaaaaataagagcaacaatgcacaaatacctaaaaatagtagcgtgattttgttatcacttaaatttttattttttgtttttaatgaaaacaacgggatttcggcattcattataaaagcactgaataaactaatgcctactaatacatacggattgctgaaaactgttaataccggatcacttgaagtagtgctggtaatcattggaatgcttaaaataaacaaggcgttggcaggtgtgggcaaaccaataaaactatcgctttggcgggtgtcgatattaaattttgccaaacgcatacaagatcccaaggtaatgataaacccaataaacggaaccagtttcatataaaaggtatcatcggtaatagtgtaaatttcgttattttcttggatatgtgccagcatttgatacattacaacaccaggaaccacgcccgatgttaccatatctgccaacgaatctaactgcacacccaacgggctggatacctttaaaacgcgtgccgcaaatccgtcccaaaaatctaagaaaattcccatacaaacccacaaaaaagccatttgcaggttgtcgtcaaaagcgtaaaccaatgcaattaaacccgataataaatttaaaagtgtaattgcattaggaaggtgtttttttattgtcatcaattttatatttttattggactcaaaattagttaaaattatgcactttagtgcgttaactttcagtttataaaaattttactaactacaaattacacaggtcagaaggattttttttaacctgtgagaatctatgtagtttggttaaaataattaaaactataggctttcagctcctagtgacttattttgaaattgaatattctattacttgaaaattgtctgaagaatcatgtatttttatagggaaattattttcgttgtaagtcattttataattcctaacatccttaatttgggtacaattattattatagtttaaaaaagtctctcctagtaggaaacttcttaaaaaatacacaaaaatccactgatcattatttacatttttaaacattccgttttttgaatcgtatgtcatttctatatgtacatcactaattttactgatattgctattatggtcgtaagagcaacttgtttttgatcccatattattagagccatttacaaaatacttattagaatcaattgtaatagtatcctgtacttgtcttatattatctgggtaatcaagatgaaggctactttcttcaataaaaactttatttccagaataagaaatgtcgtagttagctttataacgtgcattttcgattaaattaacatttactaacaattcgttgttatatgcaaatagtatcgaaatatttcttttatttgtatgaatttcaatgtttgtaattctatttttagtgtcataatcataacttattaatccactttcacctgaattagtataagttacatttaaaggcacgatcccatcaagagtattggcttgtacattattgtcatcattacaacctagaatgcttatcattcctaaaaatacaaagagaaatagtttttttttcattgggattttttatccaaatataaaataaattcgaaatcaaatataaaagaatttaaatttttattacaaagagtttggatacataataactctaattaaatgtaagaacagtttatgaaataaatataaaaccaataaaaacacctaacaggtgtttttttcattagatagatttttatgtaaataataaatattatatttagccgtttaatcataagaattaaacaaaactaaaatatgccaagcaattatataaaacacaataaaatttcaatgtaacaaaatatatttgatcattaattgttaacaaatgtgattaagtgttatgacttatatattgtaaaattttgtaatctttgtaaaaaataattacgtgaaaaaacgtttatatatcgtgccgttgcttttatgcaccgctttaatgcaggcacaaacagcaagaaaatattctaatgagtttttaaacattggggtagatgccgctgcttttggtatggcaaacagtgttattgcgcaaacaggcgatgtaaattcgggttattggaatccggcggggttggttcatttgcaagataaacaaatcagtttaatgcacgcaagttattttgcaaacattgcacaatatgattatgctgcttttgctatgccgattgatgagaaaagcgcattggcggtttctgccattcgttttggagtagatgatattatgaatactaccgaattgattgatcaaaacggaaatatcgattacaatagaatttcattattctctgctgccgattacgcttttaatatatcgtacgcacgaaaactatctgtcgaaggcttgtcgttaggtgccaatgctaaaattgttcgcagggtaattggtgattttgcaaaatcgtggggatttgggttagatgttggtttgcagtatcataccgaaaattggaagtttggattaatggcacgcgatataaccacaacctataatgtttggaatattaacgaagccgaataccaaaaaataaaagatgccgtagaaggtcaaaaccaaacagtacctgaaaccaccgagcttaccttgccaaaattgcaattaggtgtagcacgtgattttgcattgacagaaaaatttaacttaacagctgctgccgttttacataccgaattttacgaaactaatgccattatttcaacatcggcgttcagtattcagccatcggcaggttttgagtttggctacaacaaaatggtttttgtacgtgcaggtgtagggaattttcaaaacgagttgcaaatcgatgataccaaaaaaactacatttcagccaaatgttggtttaggctttaagtacaaaggtattcaggttgattatgcactaaccgatattggagacaacagtgccgctctttactcaaacattttttcattaaaacttgatttaggaatttttacaaaatcaaatgaataataacgttctaaaaattaaacagcaaattgtattaataatctgttgtttttcttttttatcttctttcgcacaaccgcaaacattgacagaaaatgccgaaataagtgttttaacctgcggaacggctaatgaaatgtacaccctttttggtcatacagccttgcgaattaaagatgttgatcaaaatttagatgtggtttacaattggggaatgttcgattttaaaacacccaatttcttagctaaattcataaaaggagatctgctttattatttagatgttgatcgttttgatgattttttatacgcttacaccaatggtaaccgggaagtttttgagcagcaattgaatttatcgtatgatcaaaaattaaaaatatgggatgaaattaaccgtcagttaaaaagcaatgagcgtttttatacttatggatttataaggaacaattgcactacaaaggttgtcgatgttataaataaggtgattgataaaccgttagcggttgattttccgtcaaacaatcattcgtatcggtatattttgaacgatggattagaaaatcattattttgaaaaattgggcatcaatttattgtttagttatcccaccaacaaaaaggccgatttaatctttttacctttaaaatttaaggatggaattgcatttaataaatcgatcttaaaatcagaaaaaaaactaaatactgtcaacgaaattaaagaaaaattccgttttaattccatttatactttatggattatcgcaattgtttttgcattaggagtttttaataaaaaagcccgattgtggtattttggaattacagcaatttttggtttattcttgttaacagtaagtctttataccaatcataccgaattacattttaacgcactgacattgttttacaacccgttattttttgtggcattagtgcttaaaaataaaaaaataataattacagctgtagtgttaacggttattagcttaatttttataggaatagagttaatgatggtagctgcaccattaattgttttgcatagtgtttacgtattggcattgtttttgagcaaggcaaagtctgtgtaatttagaaaataaaaatgtttagtttttttaaaaagaaaaaaatactgaaagatacaattccaaacggttttgtagatattcattctcatattttatatggcttagacgatggggcaaaaacattaaaagaaagccaagatttaattttcaatttaaaatcgtttggcttcggtaaatttaccgctacgccacataccacgcccttggtttgggataacaccaaagaaggtatcttaaaacaatatgagaaggtaaaaaacgagttaaattttacagataaagaattgcgggtagcatcagaatacctaatagacgattcgtttttaaaacgtttggaaacagagaaattactaacacttaaagataatttagtattggtagaaatgtcttatttaaatccgccgattaatctgtatgaaattattttagagttaaattcacaaggatacacgccagttttagcccaccccgaacgttataatttttataaaaacgatgctaaaagttttaaacgattaaaaaaggcaggctgtttgtttcaaatgaatttattaagcagtgtagggtattacggtagcagcgttacagaaattgccgattatcttttaaaagaaaaaatgtacgattttgtaggtagcgatgtgcaccatcaaaaacacatagccgcttttttggctgagatcaagctcaaaaatattgatgaatttgaaagcgtcatcgaaaaaaataaattttttgcttaaatttttaaaagctgtcttactttaagacggcttttgttttatttaaaacttgaatttaccctttgtaaaagcaaaaagcaacttattatcagtttaagtgttttaactcacaattttattgtaatcattgaataacaatgcaaatatataaataagaaaaaggcgagttgccccaccttaaatgttttcacaacggaataatccttattgtgaattcctttcaaatttataatgcaatgataggaatattttttgatatataaaaaaataagtgttaatattttgtttatattagtggttcttataaaaacagaataatatgaaacatatacttggattagatttaggaacgaattcaattggttgggccattgtaaaagaagcagaaaatgacaaagagcaatcatcaatagaaaaaataggcgttcgagtaaatccacttacgacggatgagcaaacgaattttgaaaaaggtaatcctattacaacaaatgcaggtagaactttaggtcgctcggctcgtcgcaatctacaacgttttaaactacgtcgtgaaaatctgattcaaattctaaaagctcaaaactggatttctgatgatactgttttagctgaaaacggaaataaaacaacttttgaaactttccgattacgtgctttagctgctgaaaagcaattggagttaaatgaattatctcgtgtattgttacaaatcaacaaaaagcgtggttacaaaagttctcgtaaagtgaacaatacagaagagggtactttaatcgacggaatggatattgctaaaaagctttatcacgaaaaccttacaccaggtcaatttatattggatttattgaaatctggcaagaaaaaagtacctgatttttatcgttctgatttgcaagctgaatttgataaaatatggaattttcaaaagcaattttatcctgaaattttaaccgatgagtttaaagaaaccataaaaaataaaggtcaaaaagttacttctcagattttctattcaacttatggttttaatactgctgaaaataaaggaacaagagataaaaagaagctacagaactataaatggcgtaatgaagcgttatctcaacaattagcgaaagatgaagttgcttatattttagcagatattaatggtcaaatctataattcgtctggttatttaggtgcgatttcggatagaagtaaagaactatattttaacaatcaaacggttggtcaatatcaatatgcacaattacaagataatccgcatgctcgactgaaaaaccaagttttttatcgtcaagattatatggatgagtttgaaaagatttggacgattcaatcaaaaggtcgtgaagctatttttacagaagcactaaaagaggaaatccgtgatgttgttattttttatcaacgaaaattgaaatcacaaaagggtttgatttcgttttgtgaatttgaacaacgggagatcgaagtaaatggtaaaaagaaaacagtcggcttacgtgttgtaccaaaatcttcgcttttatttcaagagttcaaaatctggcaaaatttacataatgtcaaacttaaaaataagcttacgaaagaaatctatgttttatctcaagaagataagcaaatgctttttaatgaattaaatctaaaaggaaatctttctgcatcagaagttctaaaattattggttgacaaaccaaaagattgggaaattaattatacaagtttagaaggcaatcgtaccaatcaagccctttacaatgcctatttaaccgttcttgaaaacgaaggttatgatgtgcgtgaagaactgaaattaaaactgaaaaaagacgacattaccttagcggatattgacaaacctgcatctgaaattaaggaaatggtgcaagctatttttaatcatttaggaattaaatctgaaatcttagacttcaatgctgaattagaaggaaaggcttttgaagagcaattatctttccaattgtggcatttgttgtacgcttatgaagaagataattcgcctacagggatggatactttatatcgtttgttggaacaaaaatttggtttcaataaagaacaagccaaagtaattggttcggttgcttttcaggatgattacgggagtttaagcagtaaagctattcgaaagatttatccattcatcaaggaaaatgaatatagtgaggcttgtgttttggcaggataccgtcattctaaacattctttgactaaagaagaaattgataagcgtgagctaaaatctcgtttggatatacttccaaaaaatagtttgcgaaatcctgtggtggagaaaatattgaaccaaatggtcaatgtggtaaatactttaattgataccgaaaatgataaattagaaaaagagggtaaatcaagagattttaagtttgatgaagttcgtattgaattagcgcgtgaattaaagaaaaatgcaaaagagcgtgaggaaatgacaagtgaaataaatcgtgcaacaattgaaaacgaaaaaataaaatcgataataaaaagagattttcctcatattcaaaacccaacaagaaacgatgttattagatataaattgtacgaggaactttctattaatgcatataaagatctatatacagacaccaaagtagattaccacaaattatttagtaaagaatatgatatagaccatattatccctcaatcgcgtttgtttgatgatagtttttctaacaaagttttagtaccaagacaatctaatttagataaaagtaataatacagcatttgactatataagctctaaaggagataatgatcttttaaagtttcaagcagttatagattctttattaaaagcaaataaaatctctaaagctaaatacaaaaagctgttgatgaaaggagctgaaattggcgaaggttttattcaaagagatttacgtgattcacaatatattgcgaaaaaagccaaagaaattctatttcagattactaaatcggtgctttctacttcgggttcggtaaccgaccgtttacgcgaagattgggatttggtcaatgtgatgaaagaattgaatttggaaaaataccgtttggcaggtttgacagaaatgcaaactacaaaagatggaaatccgaaagaagtcatcaaagattggacaaagcgtaacgatcatcgtcatcatgccatggatgctttaacagtagcttttactaaacgaagttttatacaatatttaaacaatttgaatgcgcgtagacatgatgaatatgatggtatttctaatgcaaaagacaaaacatcaattgatacgaatagtttaaaaatttcgagtagagatgctttaggaatcgaagaaaaagaaacgcataaaatacatgatggaaaaggaaattacaagcgtgtatttaatgaaccaattccaagtttcagacaagttgcaaaacaacatttagaagctgttttggtgtcgcataaagctaagaacaaagttgtaacgaagaatatcaataaaataaaaggaagtgataaagttcagattgctttaactccacgtggacaaatgcacaaggaaaccgtttatggcaaaatcaaacaatatgcatttaaagaagaaaaagtttcagcaaagtttgatgaatcaacgattgccttggtttcaaatccacagtatcgtacacttttattacaacgtttagtcgaaaatggaaatgattctaaaaaagcttttacaggtaaaaatgcgttgtcaaaaaatccaattttactaaaagatggaacagaattacctgaaaaagtaaaattgatgtggttggaagatgattatacgattcgaaaagatattggaccagatttgaaaattgataaagtgattgatgaaggtgtaaaacgaatcctacaaactcgattaaatgaatttaaaggcgatgctaaaaaagctttttcagatttagagcaaaatccaatttggttaaatgaagaaaagggaattgcaataaaacgagtaactatttcaggggtcaaaaatgcagaaactttgcattataaaaaagaccatttaggaaaagtgattttagataataatggaaagaaaattccggttgattttgtaagtactgggaataatcatcacgtagccatttatgaagacgaaaaaggtaatttacaagaaaaagttgtttcgttttatgaagctgttgttcgtgtaaatgaggatttgcctattgtagataaattgtataatcaacatttaggttggacgtttaagtttacaatgaaacaaaatgaaatgttcatttttccttcagaagattttaatccaaatgaaattgacttgttagatagaaaaaatcaagctttgattagtaaacatttgtttagggtgcagaaattcggatctctactttcgggtttttggtttagacatcatttagaaacaactgttgatgtgaataacagtttaaaaggagttacttataaggttattcaaagtgctaataatttgagagatttaataaaagtccgcacaaatcatttaggagaaattatacaagttggggaatattaaattactaggttatgctaaaacgtaccatttacatcggcaatccggcatatttaaagctgaaagacttacaacttcaaattattgatcccgaaacaaaagaagtaaaaggatcagtacccgtagaagatttaggttttttggtgttggatcatccgcaaataaccctttcgcatccggtaattctgttgttgcaacagcaaaatgtagcaattatcagctgcgacgaaagtcatttgcctttggggttgatgttgccaatgagtggacatgttgagcatagtgagcgattgaaaaatcaaataaacgtttcggaaccattgcgaaaacaattgtggaaacaaacggttgaagctaagatttttcaacaaaaagaagtattgcggaaattcaatatcgaacattcatcattattaaaatatatgaacgaagtaaaatcgggcgacagcaccaatatggaaggtatcgccgcacaacattattggaaacatttgtttgacgattttacccgggaacgtaaaggagatgcacccaataattttttaaattttggatacgccgttttacgaagtatggttgcccgtgcgttggtttgtagcggtttgcaccctacaataggcatttttcatcggaacaaatacaatgcgtattgcttggcagacgatattatggaaccttaccgtccgtatgtggatacgttggtggtagaatggatgcaaaaatccgaggcttatcatgtattagacaagcaagccaaagcctatttattgcaattggcaacaaaagatgtgtacataaacggattgcaacgcccgttaatgacggctttaagcattacaaccagttcgctttgcaaatgttttacaggcgaaagcagaataatacattatcctatgatgtaaatgagttttagtagatacaatgcatacagaattatgtgggttttagtattttttgatttgccaaccgaaaccaaaaagcagcgtagtgttgctacaaaatttcgtaaatcgttgttagatgacggatttaatatgtttcagttttcgatctatttacgacattgccccagtaaagaaaatgcggaagttcacataaagcgtgtaaaaaaaagtttgccacaagaaggaaaagttggaattttatgtattaccgataaacaatttgggcaaatggaactcttttttgctaaaaaagaaaccgaattacctaatattccccaacagttagaattgttttaataggaataaaaaaatgcttgattagttattagaatcaagcattttttataatttttctttgtagattattctcttaaaacccttgatttttatagggttttgatgaggttgtaattctactctgtaaatctacaaaaatttgaaaggaattcacaacaggtaaggcagaagcttcattattatatttgttgtaattctactctgtaaatctacaaaaatttgaaaggaattcacaactaatccgaaagggtcatcaacaatttctatgttgtaattctactctgtaaatctacaaaaatttgaaaggaattcacaactctaaagagtattttaaaaacacgacttacgttgtaattctactctgtaaatctacaaaaatttgaaaggaattcacaacgtatatttgattattgtttttcatagttatgttgtaattctactctgtaaatctacaaaaatttgaaaggaattcacaactccttattaactatttgacattttaaataagttgtaattctactctgtaaatctacaaaaatttgaaaggaattcacaacgaattgcttattgatgcaatgatattaagcgttgtaattctactctgtaaatctacaaaaatttgaaaggaattcacaacggcataggtaatttttccccgtttttccccgttgtaattctactctgtaaatctacaaaaatttgaaaggaattcacaacatgtttgtaaaaggattgttcattttaatcgttgtaattctactctgtaaatctacaaaaatttgaaaggaattcacaacgcgtgatttaacgctgtcagaaaaacaattgttgtaattctactctgtaaatctacaaaaatttgaaaggaattcacaacggtaatgaatcataagtaactaatatttttgttgtaattctactctgtaaatctacaaaaatttgaaaggaattcacaacacttaacgctctttcatttaaaggatcaaggttgtaattctactctgtaaatctacaaaaatttgaaaggaattcacaacataaccatgttgcatataaagaagcattaggttgtaattctactctgtaaatctacaaaaatttgaaaggaattcacaaccattgaccaaggtttgcttccgaatccaatgttgtaattctactctgtaaatctacaaaaatttgaaaggaattcacaactaaagctccattttcaactgcatacgttttgttgtaattctactctgtaaatctacaaaaatttgaaaggaattcacaaccaactattgttagttttccagatagccgttgttgtaattctactctgtaaatctacaaaaatttgaaaggaattcacaacaacttctataaacaaaaaattaagtttaaagttgtaattctactctgtaaatctacaaaaatttgaaaggaattcacaacacggcataattgtatttttaataagattttgttgtaattctactctgtaaatctacaaaaatttgaaaggaattcacaacaataaccgatttaaaaaaagtgagcaatgagttgtaattctactctgtaaatctacaaaaatttgaaaggaattcacaacgacaatttattttataaaaaaaagattaatgttgtaattctactctgtaaatctacaaaaatttgaaaggaattcacaactccattaatactggaatcctcccaataacggttgtaattctactctgtaaatctacaaaaatttgaaaggaattcacaacgattgaatataaaaatgaaagatgttttatgttgtaattctactctgtaaatctacaaaaatttgaaaggaattcacaacataatgataagaagaatattatatcaagatgttgtaattctactctgtaaatctacaaaaatttgaaaaatggtaattataaattataaaagaagtttacttgttaccaaagtagattttttaaaacgattcgttctctaaatcttttagaaaatcaaaaatcaaattactttcgtagcccttacgtagtaaaaaatcaacccattttcgttttttcttttctatagagctttcgttaatgcttgtccattttttatcggctaaagcatagaaattatttaaataatctgtttctatttcttttaaagcaatcttgatattatatgccgaaatatctctgaattttaattcttgttcaattcttcgttttccccagtatttaaatttatgtttgccgcgtgcaaaacttttagcaaaacgttcctcgtttaaaaaattgttttctgctaaatgattcaaaatgtggtcaattgctgtttgaaacattcccaatgattttagcttagaaatcacttctttgtaacaccgatcttgataagaacagtagtattctaattttttgatagcatcatttacagaaagtcctttttcattcatcatacaagaatatcattttattacaagcaagtttttctttgatgacaaatttacaaaatgatcatgattggattctttttaagaaagaaaatcatacacattagatgatttttcgtagaaattaatcaattggttaatgatttaattttaaactgttatctttgtaagcaatgagaatttctctcaaaaacaagaacaaatgacaatagaaaacaattatgtagttgcggtaaactacaaacttcatacaattgaagcaaacggtgaaaaggtatttgttgaagaaaccaatgcagaaaatccgttaacgtatttacatggagtaggaatgatgattccaaaatttgaagaagaactgcaagggttggtagcgggtgataaaaaatcgtttaccattactcctgaagaaggttacggagcaattgatccaaatgctttagccaatttgcctcttgatatgtttagcgagtcgggacttccgccagttggtgcaatgcttccgttgacagatgatcaaggaaaccaattccgagcagttgttaaagaagtaaatgatgttgctgttgtagccgatttaaaccacccaatggcaggtaaaacattaacttttgatgttgaggttattgctgcccgaccagcgaccgaagaagagctatctcacggacatccgcacgggattgacggcactgaaacgcattaataaatatataaaatgcccaatttttattgggcattttttttaagtattaggctaaatctgatagatccacttcgggctctaattctaagggttcttggttctggcggaataaacgagcacttaaagatccttttaacgtgattttttcattgcgtacttctaaccagcttccttctcttaatcctaaaactggttgtgtattaaacgcgtggaattcattaatacgggtttctcttgtttcgcccatgtgtgtagaaccttcaacaggatccagataatgtgggttaatgttaaacggaaccagtcccaatgtttgaaagcttggtgggtaaacaattggcatatcattcgttgtttccatagttaatccggtaatattacttcctgccgaacatcccaagtaaggaacacctgttaataacgtactctttaaagcagacattactccggttttgtacaattgtttgaccaataaaaaagtgttcccgccaccggtaaaaattccttgagcttgttcaattgcctccgcaggatttttaaaagtgtgtaatcctacaatttttttgttgattttagcaaatgcttctgccacttttgccgtataatcatcgtgcgaaatgccgccgggacgtgcataaggaataaaaataacggtatctgcatttttaaaatgctcttttaatattggcaataaatattctaaatatcctaaaccataaatagttgaggtacttgcaatgattaaatttttcattcgttggtatataaaaaacaaacttatctatttaacaattgtttatcaatatgctattcttattttaacattttaacagatacttttacgacaaatcaaataaatgattatgaaatacgtttactttttactgttttttattcctgcggtatccttggcacaaaccagatcagaacaaaaaatgcgattaatggttaaagaaatcagtgcgttacccttaacagtgattaacaattcaacaaacgaagaggtacaaaccgatgttgcaggatattttgtaatgcaaattcaggctaatgatgaattaatgttgaaagaaaacgatttttatcagttaaattatcaaatacgggcatctgatttgtcaaatacgctcactcgtatttatccacagtcgttaacaaccgttttagaagaggttaaagtggaacaaatcacaacagaatcattaggaattgacgcccaggcggcattggttaaagtttataatcccaatcctaatatggattttaaggcactgtttttttggttgttaagcaagctaagaaagccaccagttgataccggacgaaaaccccacgaaatgaatccgtatgttgcgggattaccaagaagtgtaatgaccgattatttaaaaattcccgattcgttagtagaaaaattttattactttatgaacgatgattatttgattgatcaatacattaaaagtaacgacgaagccaaatggaaaatgcatttgttagataaatcatttgaatttttagagcaagaaaaggtaattgagcgttaaattcattataatagattttgtactgctaaaagaatcaatagttttgtattatgaataaaatctttacccatatattaattccttttttcttgttacttggcagtatagaaacctatgctcaaaaaaagacggttttaggtaaaattgttgcaaaaacacgtgatttagaaggaatttatattaaaaatatcaatgcaaatacttttgctaaaacgcaaaagggcgggtatttttctatagttgcaaatcctaacgatacgttgattttttcggcagtacacttaattggtcgtaaaaaagtgcttacttatgcagatatgaataaatcgttggtttttattcctatggaatatgccgaaaatattttagatgaaattgtaattgatcgccgtattacaagtgaaagtttgggttttggtaaagtaattaaacgcacaactgcagaacgaaatctgcatagagccacttcatcgggcggaggaattattccggttgatttaattgtaaacgccatttcgggcagaaccaaaatgttagaaaaagccgtagaattagaacaagaacaattatttgtagaaaaacttttaagtaaattttcatcagaattttatacccaaaagttaaaaattcccgagcagtaccatatggcgtttggctactttttggcacaggatcctattattgttacatcttatcaaacagttgaaattacacagcttaacattatgtacacagaaaaagcgacggaatttttagaaattcttcgcgttttaaaataattgttttacgtaactttgctttaaaatagaaaaatgtatttaaatttatatataagtccgcttatttttggtattggagggggcgagatggtgttgattatactggtaatcctaatgcttttcggttctgataaaattcccgaaatggcacgaggattggcacgtgtgattaatcaggtaaaaaacgcatcgaacgacattaaatccgaaatcacaaaaagtgtagatgaatcgggtgttgtaaaagatataaaagaagctgttgacgtagagggtattaaaaaacgcataggcattgatgatattaaaaaatcggtcaatcttgatatcgatcaatacaatccgttaaacgatgtgcaacaggaaattgataaggcaaaagaagacattgaaacaatgaccggacctattaaacgccaaaaataatgtgggaaaacatcattcataaagatcagcagttgttgatttatctgaacaatctgggaaccgaatttttggatcccgtttttatgtacattacccaccaaatcaactggtggccgttttttttggtattgatttttttactgctaaaaaaaatctctttaaaacaatttggattattggtgttggttttggcactatttttcttgtttaccgatcaaatgaccaacgtggtaaaatatgccgtagcccgtttgcgaccggtaaatgaacctttggttgaaccttatttaagggtattgaccaaaagaggaagttttagctttttttcgggacacgcatctaattcaagcggagctattttgatcatctttttaattttacggaaatactataaatacgcctggttaattttctttttcccattgctatttgcctacacgcgcatctatctggcattgcattatccgttagatattttatgcggatacattttcggattatcctcaggatttttattctattatatctttaaatatttcaacaataaatacagattaactgataaacaacaagaaaacgcttttgaatagaaagcgttttcttgtttatagttacaattgtaaatgggtagaatgatttttatagtaatcaatatttgatgaaataagtctgcaatgaatataattaatcttgcagttttttgtgattagctgattgttaaagtgatttaaataaaatagtaaatacacacagtaatttatccctttatcttttcactaataacattcaatatctttaaataatcttcttgattttcaacaaaatccatatcggttacatcaataatcagtagcttttctttaggaagtgtactgataaaatcggtgtaactttggctaatactgtttaaataatcgggttgaatattttcttcgtatccacggtttcgttttttaatgtttgctaataaattattggtgttctgataaagataaatgtataaatcgggcttggcaatttctttatacatcacatcaaaaacagtgcggtgcaataatatttcgtccggatcaagagttacctgggcaaaaattaacgatttgtaaatatagtaatcggtaattacaaaatcattaaaagaattatgttgacctaaagcagtgtgtaattgtgtgtatcggtcggcaagaaaagacatttctaatgggaaagcgtatcgtttaggttctttataaaacttgggtaaaaacggattgtcggcaaaacgttccagaatagttttggcattgaaatcttgtgccattttttgtgctaaagtggtttttcccacgccgatatttccttcaatagccaagaaattcaactgcttaaaacaataattgtctttaggcaaatgaatatctgatacttttttaattgctgacgaatcattgcaatttgccaatagttcacgtgtggtttgctgtaaaattggatgtttccaatcaaaaataagatcgtttaaaggtttcaatacaaacttccgatgctgcatttgcgggtggggaatttgtaaatcaggaacattaaaaaccaaatcgttaaaataaacaatatcaatatcaacggttctggcctggtaactatcggttgttttcttttctcggcctaattttttctctatttcttttaaacggattaaaagattttgcggtaacaaatgcgtgtgaattaaaaggcacatattatagaacggaaaactgctaaaaccccacgaaggcgtttcgtagatagccgatgcctgtgttacaaaacccacttcgttgtgaataagatgaatggcgtttataagatgttttttcttatcgcctaaattacttcctaaagctaaaactactttgttatacgtgtgcataatgcaaaaatagttagaaaagcttaaaaaagaacatttttaagttgtgataaggtaggaaataggatatttatcatcaggatacctgtgaagccttcatagcaataaacggttgtttttcttttaggtcttctttttctttttctttttttaaatagaaagaaggacttacttttgtttttttaagaaacgccgaagagaagcttcgggcactggtaaagcctagctcctgggcaattgcctctatttttaatttattccattttttatcggtagctgatactttcaaaaaataatcaatccgtaaatcgtttaaataatctgtaaactgttttccttttgtctggttaatgtattttgaaatatacgtgcggttactattccattcggttgccaggtcgtttaggttaatacaccgcagaaattgtttttcttcttcaaaagtagttacgcgttgggttaattcgtcccatatttttttgtttatggtattattctctttggtttcttctgtttctgctaccgtttccgaatattgagcccattggtaagcagcaagctcttctgtctggttaatgctgactatattatacagttcattattttcaacaaggtcttgttcttgttgtacgttttgttctttaagtaaattgttgtaattttttaagtacatacgttttttacggctgttgcgtattgcaataacaaacagtagcaacacaatagctccaccggcaaggacaatgaaaagcgtaaaaattccttgcatatttaaatcgttttctaaacgttgtttatcagccagtaacccttgggtatcaaatttgtaatgcaaggttcccgaaagtgacttatattctttttgtaaatactgcattacctctatcatacggttggtgtaaaacaattcctgattcacgttgttttgtttacggtaatggtctatcaggtacgtataagcttctttaatttccgggttgct

SEQ ID NO: 2156 - DNA, 24254 bp, synthetic construct
  misc_feature 1..24254: note = Synthetic
  source 1..24254: mol_type = other DNA
tttgaaaaatgcctctcccgtaaaccctttatctgtctgacttgcccaagaattaaaagtgtttttttcttctgttcctaaggtttcccaattaggaatcgttaatccttctggaccataagaaataatggcaggagtatttttgataataatcttcggtgtgtttggggtttgaaatcccaatgaatttaactttgctgtaaacgcatcacgaataagtgtgatttttgctgttaaggctggattgttttctgaagtaatatttcccgtttcatctttgcgacgagaacttaaaaataaaaacgcaaacatactgattagaatactcaattttttcataattcatctgtttttaaattaacactaagacaacctcgtattgtctttgtacaaagagatgaaatttaaagtattctaacactaaaaaaccaggcagataagttcgtttgccgttaatcggacttttttagcattgattcgtactgtttaggtgtcatacccgtaacatttttgaaagcagtgtaaaaagttgattttgaggaaaaaccaacctcttgcgacattgccaatatggttaattgtttaaatttaggagaattaatactttttttgaattcttcaatccgaaagccattgataaaatgataaaaagtggattgggtatgtatttttatcaatttggagatgtatttttctttcaatcctgtcaaatctgcgacatctcgcaaactaagattttgttttctatataatttatcttggataattttttgagtgatgagttcaaaatcagctctcgttttatcaataaaacctgagtgaatagcatcttcgttttttatatcgtttacctctttttctttcggattattttcttccattggtatgttgaatttctcaacgatattcttggaatctttctgactgaaaaaagattttttaaaaacctctgattgtgaaaatccattatagcctgtccaatatgaaatcaaaaagacaataaccgagggtaaaatatgcgttagattcgataccattttgttatcagtttcaatcatattcgcaataaaccaaatgaggtgtaaaagtatgatgaggtataaaagtacttttaaccacgatagtgttttcagttctaaattagagtagtagtgttctagcttatagcggtgttgttctaaaattttaaagaagtaaataattaaaaataattgaaatccataacagatattactcatccattctgcaaaaacactatcctgacctataccaaaattgatgagattgataataataccaggtaagaataaaagccaataccatttttaaaaacagaattaatggttgatattaggtataaaaagagaaaaacgagaataaacaaatttccatcaaacaaaagagtaacattatataaatcctcaattactccacacaacatcaaataggaactattcaaaataaaaagacctaaaaagtagtttcttttattggaagatttaattgtgaaaaaaaataaactcacgattaaactcgcaccgattgttaggctatttataatggtttctaattcaaacatataatgtaacttatttataaagcatcatttaaataggacaaatatagatttttttaataaaaaaagaggaaaaaacagaatgtctttcatctaaaaatagcactctaataattagaataatttttgtaactttggtttgtagaaaaaatgaaagatgaaaaaaataaaattaataataatattgtgtttaattaattttttaaatgtaacagcccaatatggaggcaatcgagttttcaataattcaaataaaaatgatatttcacgaaagactttttacgcaacagatagtacactaaccgtctatgcctctatcctcttaaataaagaacccaaagaatattcaatggtgatagggattaaaagcaaaggagaaactattaaagaagccaacaaaaaaggaaatgataaaattaaagaaattatcaaaagggttgagcaattgggaattcataaaaacgattattatattgatttcatatctcaaacaaagatgtacgactataatatcaatgaaaagaaaatcaaaaatcaaaacatcgctgaattaaacgaatatttggactctttttgtgtaaggaaaaatttaattattaaatctaaaaaattatcacaaattgataaaattattgatatttgcgcaaaacaacaaatctatgatatcgtaaaaatagattatattagagatgatatcaaccttatttcgaaggaattgtttcctcaattaatgaaaatagttcaagagaaaaagaataagttccttaaatatagctctaaaaaattgtcaggtaattttctaatagaaaatgaagacctaaaagttttttatcctaaaaatctttataatcaatacaacgaagtttacgaaacttcaaatatagaatggggtagatattatagagaccatataaagaaagatataagaaaagaaaaaacactatactatgataatgttgaaagtaaatacccaacagatatcgttattgaccatatatctcctaaaataggaattcaatatttaatggaagttacggtgagatatgatttaataaaatgagaaaattcgaacaaatcaacaagggtgaaaaatataacgacaccaatattggtccaaagagtataggtatcacattgaataaaaatctggaaatcgtctatataaatcccgaggatgaaaatttattccaaaaacttatggataatcaattaaccatcgcaaaagattgtccttgtttaaaaattcaataatattcaattttcttaattattgaaaagagaaaaaataaaatcactaaaatcgccatttattttaaaatttactggtggttttcttcttattcagaaatcaaaattgtatttttgtgagaaatagactaaaatatggagtttttaaataaatatcacaaaattatcaatacagcaattgacaaatatcttttcaaagataaacccgtagaactttatgaaccaatgaattatatcgtttctcatagagggaaaagaattagaccgataatggttttaatgggttgcgatttatttggaggagatttaaaacaagcggtaaaaccttctttggcgattgagtatttccataattttacgctgattcacgatgatataatggacgaagctcccttaagaagaggagtacaaaccattcataccaaatacggactaaatacaggaattttgtcgggtgacggtttacttttaaaggcttataaattctttgaagatttagaaccagcgcttttcaaagcctgtacaagggttttcacccatacaggattgctactttgtgaagggcaacaatatgatattaattttgaaacccaaaaagatgtcacctacaatgattatatccgaatgatcacttataaaacaggagttttgagtgccagtgctttagaaataggagctataattgcttgtgcgaatgctaaagatgctagaaatatgtttacttttggaaagcatatcggtattgccttccaaattatggacgattatttagatgtttttggagatcaaactcagttcggtaaaaaacacgctggtgatatttatgaaaataaaaaaacggtgctttatcttttagccaaaaagtacggaacccccgaagaagtggaagaattagaatattggtacagcaaaaaaaccgataatattgataaaatttattccgttgaaaagattttcagaagtaccaaagtagacgagaaaactttaaaattggttgaaaaacacaacgaaattgcacaagaatatcttcaaaaaatagacgctcctgaagagaagaaaaaacctttcattgaattagccaattaccttttgagaagaaaatcttaaatttttaatctgattaaaaaatgaaattcagaacggaagttgatattcaggaggcagaaaaaaaaatccagctcgaagataaaatattttctataggctcgtgttttgcaacggagatttcttccttgctgagcaaaggtcagttacaaacttgccacaatcctttgggtactatttttaacccctactctattgataaagggattgaaattttacatcaaaataaaaaatacgaagaaaaagatttggtggaataccgagatacttacctttcattggagcatcacacaagttttaattctggaaatatctccgaaaccttaacgaagattaatgctgcgatgacacaaggtaatgaatttttaacctcagccaattgggtcgtgattacctatggctcatctttcgtttacgaatttttacccaaaaataaaaaggtcgccaattgccataaaattcctcaaaagttttttgaaaaacatcttttatccagagatgagatcaataatttgatgaggaaatccattatgaaaatcaaggatatggcaagtgatggcgttcagattttattcacggtgtcgcctgttcgtcataccaaagatggcattatggagaatcagaggagtaaggcacaactcatctcttgtattcacgaagtaattgctactatcgagaattgtcattacctcccgatttacgaaataatgatggacgatttacgagattatcgtttttataaaaaggatatgattcaccctaacgaacaagccattgaatacatttttgagaaatttggaaaggcttattttccaaatgaagtagcggaatttttgcaagagaactttaaaatccaaaaagcccttgaacatcgccctcagaattctaaaagcaccgaatatttaaaattcaaagccaaattagccgaaaaaataaaaactcagcaaagcaaagtacaatttccgatatttaagtgatatttttttgtatatttgttggaatcagtagaataattaacaaaaaacacttatttatgaaaaattggataaaatttattggacttacactagtggcatttgttgccttatcatttacgaatattgataaaaaagttattgttatcgatgcaggacacggaggcgaagattctggtgttaaaacccatagcattaccgaaaaagaaatcactttgagtattgctcaaaaaatcaaaaaacttaaccaaaatcccgatatagaaattattcttatcagaaatgaagaccattatattcctttaggagaaagggctaaaaaaatcaatgcgttaaagccaaatttagtgatttcacttcatgctaatcagcataaaaataaaaccaaaaaaggaaaagaaattattatcaatgataaaaatcaatcaaaagatttggcattgaaattaaaaactcaacttaaagacgccaatattatcacgagtaatcgtttacaccttctacgaaatgtggagttccctgtcgctttaatagaattaggatttctaaccaacgaagaagataaggctctattaacaagtgaagcaggacaaagacaaatcgccgaaatgattttaaaagcgattaattaagaaaataaaaaatcatatacgagtgcttgaactaaagtttaagcacttttttattgggataaaaccaaattcgcctaaaaaataaatgtgtacttttgttctctaaataaaatcagaaaaacaataactaaaaaaatgattgacacccacactcacctttacgcagaggaatttgataacgatagagccgaaaccatacaaagagccattgataaaggagtaaccgaattttatttaccagccattgattccgaaacgcatcagcaaatgctggatttggaacaacaatacgaccaaatacacagtatgatggggcttcatccttgttatgtaaagcctgagaattgggaagaagaactaaaaatcgtagaaaattatttaaaccaaagacacttttgtgctattggggaaatcggaatcgatttatattgggataaatctactttggatattcagattcaagcttttgagcgacaaatcgattgggcaatagaaaaagatttaccgattgtcattcattctcgtgaaagttttgatgaaatatttgaggtgttagaacgaaaaaaacatcccaaattaagagggatttttcattgttttacaggaaatttggaacaagcacaacacgccattgatttacaatttgttttaggaattggaggtgtggcaacctttaaaaatggtaaaatcgacaaatttctcaacgaaattccattggaaaatatcgtcctcgaaaccgactctccttaccttgcacctgttccttatcgtggtaaaagaaacgaaagtgcttatgtggaattagttgctgggaaattggtggacatctatggcaaaagtttttctgaaattgacaaaattaccaccgaaaacgccaaaagaattttgaaaacaacaaggtaatctgagtttttgtttcacgcactatcaagtttcgattgtttacacttaatataaataactgaaacttgatattttttatttaaaactatttgttagattaatctaactttgtaactttgcaccataaaacaagttgaattagataaataaaaaaaatgaaaagagtttacactgtattaggtattgcattaagttgcttaatggtggttcagtcgtgttctcattttgaaccgggagaacctttggaggaagaattattagacggtcctattgagggattaagttttgaggagcaacaacgctttttagacggagatgaaacctttaatgatgaaattttcactgttgaaaaaggtttaggacctgtctttgtagcgaatagttgcggaagttgccacgcgggagatggaaaaggacatccttttgttgggtttatccgttttggacaaaaagatggtgaaacggaaaatcagtttactcatttaggcggtagagaattgcaagatagggctatcccagggtatgagccagaagttttaccagaaggagcgacttttacgacgcttatagctcctgccgttacaggattaggattattacaatatgttcctgatgcagatttgttggccatggctgaccctaatgatgaaaatggagatggaatttcaggagccatcaactggattgataagttcgattatagccctgcaaggagtaataatattaccaaggaaattgatgggaaaataaagtatatcggtagatttggtaaaaaagcagcgacttttgatttgttagaccaaacagccgatgcactttcagaagatattggtattgcatctatctatagacctattgatgtatattcaggagaggaaattgaccctgaaattgacaccaaaaaagtgaataatatggcgttttatttacaaactttaaaagcaccaattcctagaaaccaagacgatccaacggtaatgaaaggtaaacaaattttcaatgatatccaatgtgcaagttgtcataaaccaactttaaatacaggtcaagcacctattgaagcattggcattcaaagagttccacccttataccgatttgttattacacgatatgggaagtgccttagatgacaattataccgagggaagagcgagaagttttgaatggcgtacaccaccattatggggattaggtttgtctaaagactctcaaggaggagaatatttcttgttacacgatggtagagcaaaaagcattcaggaggcaatttctttccacggtggagaagcagcacaagctagaaacaactataacaacctttctgattcagataaggaagcgcttattactttcttagaatcattgtaacttagtagttagtaatctagtagtcagtaatattgactcttgattcttgataaaaaaaataaaaaaaatgaacaggaaagaatttattaaaaaatgcggatttgcttgtttgggagctggtttatcggtttcgttattggaaagttgcatcgcaagaggtgtaacgggcaagatagtgaatactgatattaatgttcctttggatagttttaaggataaaaattatatcgttgtagaaaatgaaatgctacaatatcctatttttgttcacaaaacttccgagaccgaatattctgccgttttgatgcaatgcacacatcaaggagccgaattacaagcttttggagacaccttggaatgtcctgcacatggcagtcagtttgatgcaaaaggaaacctaaaaggaggtcccgctaatcaagatttaagaaaattccctgttagtattaatgaaaatcaattaaaaatttctcttaaaaatgtataaaaatattaaatattgggtaacatgtttggcattgggggcaatgactaatgctaacgctcagatagattcaagtcttttaaaaagagtagaaaagcctaccgatagccttgaaaacaaaatgaatatggacgctatttacaatcgtccgatgctttctatgggaaaagcacctgtgaatatcggtggatatttagagtccaactggcaacatcttggagaagatggagtgagtgaagggcatcaatttcagttccgtagattgacaatgttcatgtcttctgccattacgaaacgaatcaactttatgagtgaaatcgaatttgaggaaggtggaaaggaaattaatattgaattcgctgccgtagatgtgaacctacatcctttattaaatttaagaggtggtattatcgttaatcctattggttcttttaatcaaaaccatgatggtccgaaatgggaatttaccgaccgacctatttcgtcaacgcaaatgctacctgccacttggagtactgcaggatttggattgtatggaaagtaccatatgaaagattggtcattcggttatgaggcttatctttcaggagggtttaattcttctattattgataatgaagaacaaaaaactttccttggagcagctaaagacgatgccgaaagatttgaagaaagtgtttctggagaacctttatatacagggaaaatagctcttaaaaataaaaaaattggagaattaggattatcttatatgggtggcgcctataacaattattccgatgatggattggatttagaagaaagaaaaacgcttagtgtttatgcggtagattttaatacaacaatccctaaattaggaacattcatcactacagaatgggcttgggtgaatgtagaaatgccagaaaattatacccaacaatatggaaataaacagtttggaggtttcgtagatattgtacaaccattgattcgtcgtaagatgttaggttggaaaaacgcaagtattaatttagcctgccgattggattatgtggattggaatattgggaaattcaagcaaacaggaggagaaattggagatgaaacatggagtgttatgggaggactaagttttagacctaccccacaaacggtacttcgattaaactatagacatcagagtattaaagatattctcaacaatcctccagcgaaattaggtggatttagttttggtatttctacttatttttaatgagttaaacataacacaaatagtgcaaataatgagagtctcacaaactgtaatggtttgtgagattttttttatgtcagtattaatcagtagcaattttaacaggtataaaaaggaagcgatgacaccaactaaggtctcgccactttaaatattttagctcacggcattttttgtttttttttaggtgttcgtgaaacatttaagcaaaaaaaataccccaaattggaggtcaaggcagtttaaatgttttagctcacggcattttttgtttttttttaggtgttcgtgaaacattaaaaaaagaaaacgacgatatcaattaagacatcgccatttcaaatgttttcacaacggaataatccttattgtgaattgctttaaaaattgtgctacaaatatagaaaaacattatttaaaatgagtttaatttaatatttttttttaattttattgctcaaaaacaataataatgaaaaaaatattaggattagatcttggaactaatagtattgggtgggcgttggtaaaagaagcaacggagccaaacgaaaaatcagaaattataaaattaggcgttagggtaaaccctttaactgttgatgaaaagactaattttgaaaaaggacgaccattaacaactaatgctgatagaactttaaaacgaggagccagaagaaatttacaacgctttaaattaagacgagaagccctaattaaaatcctaattaaaaacgggcttattactgataaaacgcctttaactgaaattgggaaaaatagtacatatcaaacacttgcattaagagcaaaatcggcaaaagaaaaagtggctttggaagatttagccaaaatattccttgccatcaataaaaaaagaggatataaaagtagccgaaaagcacaaaatgaagaaaagggacaggctattgacggaatggctattgccaaagagttatatgaaaataatttaacggttggacaatatgtgtttaaccttttagaaaatggtaaaaaatacattcctgatttttatcgctctgacttacaaagtgaatttgacaaaatttggaattttcaaaagcaatttcaccccaatattttaacggatgaattgtaccaaaatttacaaggaaaaaataaaaaacaaacatgggcaatttgcaaagaaccgtttaatattgttgggattaaaatcaaagaaaacggcaaagaactcaaaggagcagaccttaaaaagaaaaattacgaattgcgttctaaaggtttttcagagcaattggaattggaatatttggcaattgttttacaagaaattaacaataatttaaaccagtcaagtggttatttgggagcgatttccgaccgaagtaaagcattgtattttcataagcaaactgttggtgaatatctttttaaacaaatccaaaaaaaaccacatacttcacttaaaaatcaagttttctatcgtcaagattatttagatgaatttgagcaaatttggtcaacacaaagtaaattccatcaagaattaaccgatgaattaaaagaagaaattcgggatgttattatcttttatcaacgaaaattaaaatctcaaaagggattgttaagtttctgtcagtttgagagttgggaaattgataaaaaagatgaaaatggaaatattatcatcaataaaatcacaggacttccaaaaaaacaacgcatcggaagacgagtaatttctaaatcttcgcctttgtttcaagagactaaaatttggcagaacattaataatttagagttcatcaatgaaaagcaaaatgaaaaaatagagttcgttaaattagagaaggaaattagagctgaaatttttaatgaattgaatcttcgtggagaccaaaagccaaaagatattctaaaattactatctaaacatctaaaattaggtaaagtttctgaatggaaatgtaattttgaaaaaatagaaggaaaccgaaccaatcaagtcttatataatgtctatcaaaaaatcgctaacgaagagggctacggatttgattgggcaaaaaaatctgcaatagaaattaaagaggaattaaaagcaatctttcttgaaattggtatcaatgctgaaattttagattttaatgccactttggaagataagaaacttaaaaatggtaaaaaatcaaatgattttgaaaatcaacctgcgtatcaactttggcacttattgtatgcaaccgaagaagatgacaaaatcagcgaagaagataaattgatttatggaaattcagcggttaacttaaagaaaaaattggttgaaaaatttggttttaaacctcaatatgctaaattattagccaatgtttcgttacaacaagattatggaaatttatcaagtaaagctttgcgtaaaattatgccgtatttagaagtaggacacgactattatgaggcttgtaaattggcaggatataatcactcaaaaagtttaaccacagaagaaaataacgctcgtgaattggcggatagattagatttagtcccaaaaaacagtttgcgaaatcctgtggtagaaaaaattttaaatcagatgattaatgtggttaatcagattgttgaagaatatgggaaacctgatgaaatacgtttggaattggctcgtgaattaaagaaaaatgccaaacaacgagccgaaatgacgaaaaatatcacttcagcaactaaaagaaatgaagatttaaaaaaacgaattaccaaagaatttggcattcccaatcctacaaaaaatgatgtgattcgtttgcgtttatgggaagaattatcggtaaatggtcataaagatgtatttagagggaaggaaatcagtccgaaagatttatttacaggcttaatagaaattgagcacattatcccaaaagcattattgtttgatgattctttctctaacaaaacattagcctttagcaaagataataaacaaaaagataagcgtacagctttagactttatgacacaagatcataatgctgatttagaaaattataaacaacgtattgaaactttatacaacaacggaaaaggggcgattagcaaagtcaaacgcaataaattattaatgagtcaaaaggatttacccgaagggtttatcgaacgagatttacgaaacagtcaatatattgccaaaaaggccaaagaaattttacaagaattggtgcgagagcgtatcgtttctacttctggaaacattaccgataaattgcgtgaagattgggatttaatcaatatgatgaaagatttgaatttaccgaaataccgtgcgttaggtttaacaggatttgaagaacgattaaacaagcaaacaggtgaattggtaaaacacgagatcatcaaggattggacaaaacgaaatgaccataggcatcacgcaatggacgctttgaccgtagctttcacaaaacacgatcatatacaatatctaaataatttaaatgccattcaagaattagaggaagataaaatagaccttgaaaaaagcgaactttatggattgaaaaacaaaataacctttttggataataagaaaaagcggagatttactccgccaatgaaaaacttccgaaaagaagctaaaaaacatatcgaatccgttttaatttcaataaaaaataaaaataaggttgttactaagaatattaataaaataaagaaaaaagggaaagataaatattatagaaaagaagaacttactccgagaggtcagttacataaagaaacggtttatggaaaatcaaaacgcttgatggcaaaaccaacaaaattgagtaaaaaaattagcttaaaacaagtcaatttaattgcaaatcctattcaaaaagaattggttttaagtcatttattggactttaaaaacaatccgaatattgcttttgataccaaaacgatgaagaaaaatccgattatttataaagatgaacctttaaaagaggtgatttgttatgaagaaattttcaccattaggaaagatatttcgcttgatttaaaaattgaaaaagtgattgaccctaaaattcgagaaatcttgcaacaacgaaaaaaagattttggcggagatgctaaaaaagccttttcggacttggagaaaaaccctatttggttgaataaagaaaaaggaattgctattaaaagagtaaccattacgggagtgagtaatgcagagcctttacattataaaaaagaccatttgggcaatgaaattttagaccaaaatggagaaaaacaagcagttgattttgtgagtacggggaataatcatcatgttgccatttatcaagataaaaatggaaagttacaagaaaatgtagtttgtttttatgaggctgtagcgagagtaaatgaaggtttacccataattgataaagaatacaacaaacatttaggttgggaatttttatttaccatgaaacaaaatgaaatgtttgtgttcccaaatgatgattttgatattaatacaatagatttttttgatgagaataattttgctaaggttagtaaacatttgtttagagttcagaagataggttcaaaagattattggtttagacatcatttagaaacaagtgttactaataatttagactttacatataaaagaataagtagtttgaaagggattgaaggaataattaaagttcgtattaatcatattggtcaaattgtacaagttggagaatattaaaagttttaattatgctaaaacgaagtatttatataggaaatccatcatatttaaaagtgaaactcaatcaaatgcaagtgattgacccacaaactaaagatgtaaaaggagctattcctattgaagatatggcactgttaatgttggataatccacaaattacgctttcctcacaacttataaatcaattgatggaaaatacagttgcagtcattcattgtgatcattatcatttacccaatggattgatgttgccaatggttggtcataccgaattgacacaaagatggcgaatacaattagaaacatctcttccattaaaaaagcaactctggaaacaaaccgttatcgccaaaattaataatcaaaaaagattgttagaaaagcacaataaatatgcagagcctatgactgattatagctcaaaagtaagctctggagatgagcaaaatatggaagggaaagcagcgaatcattattggaaatatctttttgatgattttagcagacatcggtttggagattaccccaataattttctgaatttcggttatgctgtgcttcggagtattgtagcaagagctttggtaagtagtgggttgttacctgcacaagggatttttcataaaaacaaatacaacccgtattgtttggcggatgatatcatggaaccttaccgcccatttgtagatcaattggtcatggattatttgtcagaaaacgatattgaggaagaattaaatattaaggcgaaagcgaaattattgcagattgtgacagaagatgtaaagatagacggaaatgtacgaccattgatggtggctgtaaccactacaacggcgagtttatataaatgttttacaggagagcggagaacaatttcatatcccgaattacaatgagtcaaaaccgatttaacgcctatcaaattatgtggattttagtattatttgatctgcctacagaaactaaggcagaaagaaaagcagcgggattatttagaaaaagattattaaaagatggatttagtatgtttcaattttcaatttatatgcgccactgtccaagtagggaaaacagcaaagtacatatacaaagggtgaaaagttggttaccaaaatatggtaaaataggcatatttgaaattacagataagcaatttgggaatatggagatttttcatggcacaaaagaaattccaaagcctcctacgacccaacaattagaattgttttaaaatttcaatcctataaaaacgcaaaaagcccttatttaaaagggctttttgcgtttacgttgagaatactcacgtaaaaatacaattttaaaagcaattcacaacgagatgcaccctaatgaaattatttcatagttgagaatactcacgtaaaaatacaattttaaaagcaattcacaactagcggggttagggtttagcgaaatgagtagttgagaatactcacgtaaaaatacaattttaaaagcaattcacaacttagcttcttcaatctcctgactttttgcagttgagaatactcacgtaaaaatacaattttaaaagcaattcacaacatcagtggcttgtaaaacagctacataacggttgagaatactcacgtaaaaatacaattttaaaagcaattcacaacctgtattgataattgatgtttttgcttttggttgagaatactcacgtaaaaatacaattttaaaagcaattcacaacgtagcaaatgaacgcctacaagtatgactagttgagaatactcacgtaaaaatacaattttaaaagcaattcacaactctcgcggtggtgctaagaaaaaaccgtttgttgagaatactcacgtaaaaatacaattttaaaagcaattcacaacgattatgatatttacgaaaaagtaagacgagttgagaatactcacgtaaaaatacaattttaaaagcaattcacaacatgttatttcgtttaatgttatcattttgtgttgagaatactcacgtaaaaatacaattttaaattaacaatcagcgattccattaaaacaataaaaaacggagagctaaagcaattcacaacccaacatcctccaacgctacaagtgtccctgttgagaatactcacgtaaaaatacaattttaaattaacaatcagcgattccattaaaacaataaaaacggagagctaaagcaattcacaacggtatttccttttccttgttgtttaaagttaatttattttatagttttctgaaactcttatcgtcgctctctgttcttttttaagttcatttacttttaatcgtaacttctctaatgcctgttgcgatttagatgccttttctattactttactaatatctaggtctaaatgatacaattctaatttctcgctcataatattttgtatttatatttattttttgtattcttatttttttaaaaaaaagtatcccttatgaaaaaaatgttttcaagaaaaaccttatttaaagtatttatattacttttaataccttctataatcctctatttaacaatagacacatttgggaacacttggtattggggattatctactatgctattatttgtttggtggtgcatttatgtttttcttcttattgttcatataattgtaaaattaatagacattaatattaaaaactaaaccttttttctaacgctacacgatttttaacaatctccgtttctacctttgataaatcaatctcaaaacttcctaaatttatattttcactcataatattttgggttattttttgttattttaaatcttattttgtacatttatattatgaaaaattttagaaaaattcattttaagagaatgcgtaacaactttttagcgtgtcttgtgttggctattatttgttttagtgctatttctttatttaatgaaatcaatctatatattgcaagttttcttattttgttttctcttttcctcttccctttttttgcattagcatttgtttattatttatttatgttcacttttgcagatgataaagatgaaaaaattcacgaggcttatattccacctcatagaagatagtttttaccccacacacggcttcactctaaaaaactcccctcgtgccgtttccttgtcaaaatccactgttattttattagcaatgtaaattgtgattactcacacaaaagtaacaaattaaaagcaattcacaacatgtttacatttactttacttgaattaagggttgagaatactcacgtaaaaatacaattttaaattaacaatcagcgattccattaaaacaataaaaacggagagctaaagcaattcacaacgacttatttggtttatattcgtatttggtagttgttgatgctattggtaaagaaattgtgggaaaaagaggtaagaaagtgtctttaatggttaagagtttattagaaaaataggttaataataattttgaaaattttcaaaaaaaatgtaaatttggtgtatgaaaagtctttggatttatgttatattatttttaatgttcccattagcatttctctttgggggagtgttggtttatgatttttttttcagagatatagtggaggctattaaaggacatccgtttattaccgcttttatagtaggagttatcatattcctgcttattgcttgtaaaacaccaataagtgataatgatttacgagaatatgtcgataagcacggaataaaagaagacaaggagataattgaggagtatatacgaaaaaaaacagaaaaacaataactaaacagactgattaaagtctgtttttttgtcctttattatttttgtattcaaatatttcattttgcaataaattaatgcaaaatggggaaaacagttgttaatactatcgttattaagattaacgataaggaggttatcgattcttgttgagaaccctcaaacagagtataaaaactaatcctataacggatgtatcaactcaatacaccaaaaaaaaaaagaatacatttattatgaaacagtttaatatttttttatacttttacacactttttaaaataaaataatgatttttaaaactcaattgacatttgttcttattttgttctttccttttgtattaaatgcacaagattatcgatataccgaaaataattttgcctctacagagataacggagaatataacctatggaacggcaccctttctaaacgctccctataccgtagaatcttataccactatcgacgatttaaaaatggacatttatcttccacaaggagataccaataccaaaagacctgccattatattcgctcattctggtggatttattattggacataaaaatcatgatgatatgatggcactttgtgatttatttgccaaaaaaggttatgtaaccgccactattgattatagacaaggtttcagtcttgttgacaatcctaatacccatgggacaagagctgtatatcgtggtattcaagacggtagaactgccgtaagatacatgcgtgccaatgccaataattacggaatagacgctaataaagtttatttcgtaggaagtagtgcaggagcattcattgcattgcatagcatctatttaaacgaaacggaggaaatacctcctgaaacgggtattgttgattacctcaataccacctacccttttagccataccactccagaccttggaggattagatattggtgaaaatttaggttataatggtgaacccgatgctgtggtttctttatggggagcagtacaaaatacagatttaattacaacaagtgacactcaacccattttccttgttcatggaacgggagatgttattgttccctttgaaacagggagtccatttagccatcctatgctcaataccgtctatggaagtacacttatcaacgatagattggatgatttaggttttaccaataaagaaacttattttgttcaagatgaaggacacgaattttacggtgttaccaatggagtttggactaatggaacaggtggaaatgaacattggaatattattaccgaaaaaataacccactttttatggaaattacacaagccaacagctaattttgaacattctaccaatggactcaatgtcaatttcaccaataccagtattgatgctaattcttggctttgggattttggagatggaaccacaagtacagaacaaaatccaagtcacacttatgctgaatcaggaaattatgcagtgaagttgtacatcgaaaatgatattttaagttgggatgaaaaaacaagcaatgttacagtcaataacctttctgtgaatgatgttcaagcgattgattttaattattatcctaatcctacacgagattttctttatcttgaattgaaaaaatcgtatcctcagattaaggttgaaatattcagtttgtcaggtcgtcttattcgctctgctgaattttttaataccaaaaaagtgaaaattaatctaaaaaatttacctcaaaatacttatatcattaaagtaaaaaaaggaaatacaacttcgttattgaaagttttgaaaaattaattgaattaaaaatattagaaaaactaaaaatcaattatttaaaaataaaacttcatccttttgtcttgaaacctaacgaagtggttcggcgaagccaaacaaaagagccaaaaattcaaggcttcagatgaattatagataattgttgcattatttcatttatgtaaatacaacttatctgattaattaaaagcaaaatattcaggttcttccattatttcagtattgaattagcaaattgatttatccacaaagaccgaaaatttgtggataaatattttcgagtttaattactttaaaatcaacacattaacaaactttatgattttacaataatgaataaaaataaaaaaaatgtatttttgttatcttattaaaatcatcgtatggcaaaagttatagcaatagcaaatcaaaaaggaggggtaggaaaaacgacaaccgctgttaatctcgctgctgcattaggtgttctggaaaagaaaattcttttaatagatgctgatccacaagccaatgccacctctggtttgggagtagaagaagtaaggtattctacttataatatcttggaaaatagtgtggacacaacagaatgcattcaaaaagaggtcgctccttatttagatattattccttctcatattgatttggttgctgccgaaatagaacttgttgatagagaagacagagagtatatgatgaaaaacgctttggaagaggtcagagatgaatatgactatatcattattgattgtgcaccaagtttgggactaataaccattaatgctttaaccgctgctgattcggtagtgattcctattcagtgcgaatattttgcattagaaggtttaggaaaactattaaacacgattaaaaatgttcaaaatatccataatgcgaatttagatatagaaggtctactattaacgatgtatgatagccgattaagactttctaaccaagttgtagaggaagtaaatatgcactttccagatatggtttttgaaacaattatcaacagaaatgtacgattgagtgaggcaccaagttttggagaaagcatcttaaactatgatgcagaaagtaaaggagccgagcaatatttgaaattagcagaggaagtattattaaaaaattcaacagaaaaaaataagagctaatagtcataaactaaaagccagaagacaaaaaaatgaaagataaaaaaagagcaatgggtagaggattaggtgcgattctaagcgctgaatctaaaaccatgattcataaagctacggacaaaggagccgataaattagttggaaatattgtagaagttcccattgaggacatctaccctaaccctaaccaaccgaggacttactttgatgaaaaagcattgagcgaattatccacctccattaaaaatttaggtgttatccaaccgattactttaaggaaagatggaaaaaaattcgaaatcatctctggagaaagacgatacagagcctctaaattggcaggactaaaaactattcccgcctatattcgattggtgaacgaccaagaagttttagaaatggctttggtggagaatatccaaagggaggatttagatgctattgaagtggctttaacctaccaaagactccttaacgaaataggtctaacccaagaggaactcagcgaaagagtgggaaagcaaagagcgacagttaccaattcggttcggttgttaaaattgaaaccagaaatgcaagatgctattcgaaatggcgaaatttcagcaggacacggaagggcgattttaagtttagacaaggacgaaatgcaaacgcttttatttggtaaaatcattaatgaaaaactgaatgtaaggcaagcagaaaaagtagccaaaatacttaaaaatccaaaagaaaaggctcaaaaatcaaaaccaagtcttcctaatcacttgaaaaaagctcaaaaatcgatttccgatatgctggatgttgaagtagaaattaagtcgacagcaaaaggaaagaaaggaaagattattttagactttaaaaacgaagaagaattagcacagattttaaggcattttggaggggaatttagaagctaaaaagatatgaacaaactttttattttatttttattgatgactttcggttatttttcggcacaggaaaagtccgacagccttattattgaaaataaaaccgaaaaaattgatgattttaaaaatttagactccgaagaaaacgaagtggtttccaccatacaaaaggcaaatcaattgaaaatcaaaaaactcaatcccaccaaagcaggtttatattcagccgttttacctggattgggacaatattacaataaaaaatattggaaaatccctatcgtttggggagcaataggaacaggcgttgggatttcgctttggaatcaaaagaaatacaaaagataccgaaatgcttatatcgctgaacttaatggtcttcctcatgaattctctgaccgtcctcaagtgaccaaagaagtactcggaagaacacaagatcaagtgaaaaggcaacgagattacgccattgccatcacaggactgatttatgtccttaatatcgtagatgccgttgtagatgcacacttatacgaaggaagaaacgaccccgatttagcactaaaacctaccattatatataacgaatttcaacctcaaaccgcaatggcaggactaaatttaagatggaggttttaaattatttgtacaatgataattgatttgatggtgaatgacgattgatttgatgatgaatgatagttagttttttaatagtaaatcattatacaataaatcactaatacagtaagtcgttaatacaataaatcattagtacatcaatacataaaaagaaaaaatatgaaaatagcattagtaggatacggaaaaatgggcaagattattgatcaaattgccaccgagagaggacacgaaatcgtggcaagattaaatgaaacaccgaatctcaataatttaaaccaacccgatgtagttattgaattttctcagcccgaagtagcctttgagaatattcgtttttgtattgataaccaaattcctgtgatttctggaacaacaggttggcttgaaaagaaatccgaaattgaagccttgactttagaaaaaggaaccgcatttttatacggttctaattttagtttgggcgtgaatttattctttgcccttaatgagagattagcccaactgatgcaaccttttgacgaatatcaaacccaactcaaagagattcatcacacgcataaaaaagatgcaccaagtggaactgccatttctttagcagaaggaattatcaaaaataatccaaaatttgactcgtggaaattggacgaaacagagaagcatcaggtggggatttttgcagagcgaatagacgaagttccaggaacgcaccatgtctattaccgaagcgaagtagatgaaatagaaatcaaacatactgcatttagtagaaatggttttgcattgggagcagtaattgcctccgaatggattatcggtaaaaaaggaaacttcaccatgaatgatgttttggggatttgatgtacactgatataatgagcactaatacaacaaaaaaagcgtatctttgtcatcgttgtacagaaacatattgtacaattagacaataataaagaaaaaaagaatatgaattattttattacttacacgatttatgtattgatattgtccgtactattgggcgtatcttcatggaaaatgtttaaaaaaatgggatacaatccgttattggcattcattccgttttataattattatattattttaaaagaaaccaaccattccaaatggtgggcgataatgtcttatttacctattgtaggaacgatattaatgtcggtttttcatttgtttttaatgaaaaaaatgggcaagaaatcaactttggataaggtactgacggttattttgccttttatttatatggcgtatgtcaattatacccaaacattaggcgaagaggaagaggagtttttgttgcctggcgaggaaaaagaagaagaaaagaaagagacttttttaggctctgtagtttttgcaatagttttcgctacaattattcacacctttattgcacagccttttgggattccaacaggttctatggagaacactttgaaggttggagatttcctttttgtcaacaagctcaactatggttttagaatgccaactcgtcctttggctattccttttttacaaggaactatttttgacacaggagaaaaaaacaacccaaaagatgatccaaaatcttatgtagaggcggtagatttaccttatttcaggtttccaggttgggaaaaagtcaagcgaaatgacattgtggttttcaattatcctgaa

SEQ ID NO: 2157 - DNA, 24248 bp, synthetic construct
  source 1..24248: mol_type = other DNA
  misc_feature 1..24248: note = Synthetic
tgtttaccgaagggtagaccaggttcagcaaagggaatagcgcacggaaggtatcccagaagccggtgtcggtatacaggtacccggggagcacttgcccgttgtagggactgtaatgcacgatttttccagaggcatccacctcgtagaacttgcgagggaataaggtagcgcgatagagtgtggagtagaaagttcgttgctggtcgaggttgcccccttgcacttcaattttgcccagtacgctgttccaggcgtcacgtccctcctgttttacctgttcaaaatccttgccttccacctccttgaggttctgccatgcctgttccgggctgatgaaggaagaagctacacgggcgatcaccttctctcccttttgggtagcgaatccgatgaatgcgccggcatggtttgcctccattttggtgccgttcatgacaatcttcttgtctttcaccacatgttgctgcaggaaaggcttgtcgaagaccaccacgaagtagtttttaaaattatccggcacgccaccgctgttgcgagtggtgtatcccacgatggcctgcttttcggggatgatctccacggcagagcctctgtcgaaagcatccagcagcacgtaggccttttcggtctcggggaaggtgaagcggaagatggccgcccgtgtggtgggcgtgatctccgtggtcacatcataatcggccaggtaggcgctgtaatagtagggtttggccacttcagccttgtgggagtaccagctggctcttttctcctggtcgaattccatttgtcccaccatggggaagatggagaactgaccatagtcgttcatccaggggctgggctggtgcgtctgcttgaagccgttcagtttgttgtcgttgtaggcatactgccaaccgtcacctatcttgcgggtctggggtgtccagaagttcattccccagggcacggccacggcgggataggtgtttccgttggagagggcaaactccgactgggtccccatcagtatgttcacataatccaccggcgcgtcgaacgacttacccttcacttctgctgtacccaacaaggcacacagtgccattgcggcagctttcaaatatttttttctattcatcagatgctgttaacgaggttcattttaccttttgtctcgagttccacaatcagttcaccgaagagggtgtttacccatgcgaaccattttctggtaaagttagccgggtcatccttgtgaaacgactcgtgcatgaagccagtgtcggcgtcgctgttgcggagcatgcggaggcaatgttttatttcctcgtcgctgctgctagtctgtgcgcgcatgatgatgctcatgggccatatcatgtcgtagccgatgtgcggaccgccgatgccttctccggctgtacccttgaagaagtagggattgtcggcgctcagcaccatcttccgtgtgttctggtagatggggtcgttgcggtctatggaatcgaggtacggcatagccagcaagctgggtacgttggcatcgtccatgaagtaagcgtttccaaatccgtccacctcaaaagcatatacctttccatatttggggtgttgcacgatggcatacttctcaatggcttcctgtacctctttggccagtgtggatgctactgtagccagtgccgcatctttggtcactttctgggcaatctctgcgatctgcttcagtgaagtcaccgcgaagaggtttgagggcaccaggaactggaaggtggtggcgtcgtcggaggggcggaacgaagagacgatgagtcccaccggattcaccgggtttccccatccgtcgttattcagcgtgtcgagctgacgttctgttttccgttgaaatttataaggtccgttaccctctttgcgctgttgttccctgaatgtttcaatcaccctgttcatggctttggtccagtcggcatcgaacaccttggtgtcgccggtcgttttccagtagttgtatgccagtcgaacaggatacgcgagcgagtcgatctcccacttgcgttcgtgcaacatcggagtcatctccgtgcggtcgctcatccattcgttgtcgggtttgggatcatggttgaaggcattggcatagggatctatgaggatgcactttgtctgtctgttgatcacgccggcgatcatctgtttgagctgttcgtcgttctttgtcaggggcaggtagggccatacctgagccgacgagtcccggagccacatggcatcgatgtcgcccgtgatgacaaacgtgtcgggtttgccgttcagcatgctgaagttgacggtggtatcgagtgtgttggggaagcagttttcgaacatccaagccagtttgggatcttttattttggccttcaccctggcaatggtttgttcaacagcagccgacttgaaatggcgatcgcccgtggcaggtcttttggaaacatagttttcctttcctgttttacccatcaccgtggaggctgctcttgaagggttcagagccaatgcggtgaatccaattgccgaagttctgataaaatttctacgtgtggtcatactatatatattcaaaaaaaggtgcagtttgtctgcaccggtgtttattgatcatcttgctgtgaagcaaagtctatggggagctttttgcggaatccatctttgaagcacatcagcgtttccgttctcgagagtccgagaggttgtagttgcgagtggatgatccgcagcagatccttgttattctttgcaaacactttaatcagcaggtcatactgtcccgtggtgtagtagcattccaccacttcgggtattttctgtagttctttcactaccgtatcgaaggtggagggagaggtcaggaatatgcccacgaaggcacatgtctcatacccgatcttttccggatccaccacaaactccgatccctttacgacaccaagtgtggtcattttctgcaccctttgatggatagcagctcccgagacgtcacaagcgcgtgccacctccaggaaaggaacgcgtgcgttttccacgatcatcctgaggattttctcatctaactcgtctaattcgtgctgagccatagttaacttttaatttattacttatttggtatattttcaatcgataaatgatcgttttgtacaaaaataatacaaaagatcgttttacgagcacagaatggatgaattacattctattttaacgaatttaaagtaagccatgccgggagcgcggtagatgttttcagtgcctgttcatcaatgagaaaggtacccgaatggagtggtccagtttttctatagtcgccgtccaccccaaaacggtagtagcaacaacgataacgctgagagaagaaaccgaaatcatcggcagtcattcttttcgggaactccgagacccttttctctcccagaagatcggcagtcagcgccctgatgtggcctgtgatctgctcgtcgctgatgacggagggatagccctgtggcaagtccacctcgcaactgcatccatatgcagcggcggtgtctgtggcgatctgtggaatcagctgcagcatcttgtgccgttcctcctcctgcatgcagcgcagggagcctgcgagggtcaccacgccggggatcacgttggtggcgccgtcggcgataaacttcccaaaggagagcaccatggggtgaaagggattagccctgcggctgaccagttgttgcatggccacgatgatctgtgatgccgccagcacggtgtcgttcagttcatgtggcagggcaccgtgtccgccctgtccttttaccttgatgtgtacctcgtcggccgaggccatgatggttcccgcgtggaagcccaccattcctgccgggaggtcggtgtaggcatgttgttttacaacgagatcgggattgtgttcactgaagagtccatccttgagcatcaagtcggctccaccgggagaacgttcctcgcccggttggaatacaaagagggctgtaccggcaaagcggtcgcgcaggtcgtttaccatcttcacggcgcccatcagggaagcagcctgcgcatcgtgcccgcaagcatgcatcacgccgttgttgaccgacttgtaggggacctcattctgttccgttaccggcagtgcatccatgtcggccacaaaggccatgcactttccagagccttccctggttccttttattgtggcgaggataccctctccaccgatcccttttttaaagggaatcccttcccgttggaggtagtcggcaatgtaagccgccgtcaccctctccaggtacgatagctccggatgctggtgcagccactggtagtgttgcaccacttccgaaaatatcgcatccgtcttctgtttgatcagttctttgagttccattgtcacttccggttcatccttccctacccgcctcatctttccgaaccggcgttgtcagcagtaaagccggtcggtctcccgtgagcgctcagtgcaatttatggattaccaggcccgagcgcagcttcggctcaaaccaggtagttttgggaggcatgatgttgccggtgtcggcaatgtccatcagctgcttcatcgacaccgggtagagtgcgagggccagcgccatctcaccactgtcgacccgctttttcagttcatcgaggccccgtataccacctacaaagtcgatccgtttgtcgctacgcaggtctttgattcccaggatctcgtcgagcaccaggttggaggtgatggtcacgtcgagttgtccaatggggtcgttgtcgttgtaggtgcccggcttggcggtcacgctgaacgaacgtccatcgaggtataccgaaaagttgtgcagactactggggcgttgtatctccgtgccggtaggttccaccgtgaagttcttctccagcttttgtataaattcagtcggtgtgagaccgttcaggtctttcaccacgcggttgtagtcgatgatggtcagctggctgtcggggaagcataccgccatgaaatagttgtactcctccgtgccggtatggtctggattgtttttcaccttctcggcacccaccagggcagcagctgccgagcggtgatggccatcggcgatgtacatggccggcatggcagcaaaaaactccgtaatgcgttggatatccttctcgtcctgaatgagccagaagtggtgacccacgccatcgaccgacacaaaatcatattccggatgctgtgccgttgttttagttacaatctcattgagctccctgttatcgggataagcaaagaagaccggttctatgttggcgtcgttcacccgcacgtgcttcatgcggtcctcctccttgtcgcggcgtgtgagctcatgctttttaattttgccggtcatgtagtcctccaccgaggcacccaccaccagtccgtactgcgtcttgccgttcatggtctgggcatatacgtaatacatctcctgctcatcctggagcaaccatcctttctcctggaacaggtggaagttttcggccgcctttgcatagacatcctcgtcgtgttcatcttttcccaccgggaaatcgatctccggcttgatgatgtgatagagtgatttctcgtttccttctgcctctttgcgagcctcttccgaattcagcacatcataggggcgtgaagccacctctttgaccagcgctttgggtgggcgtaccccccgaaaaggttttaccttcatacaaatattcaatttttcgtgaatttactcaaccgattatttcatacaaatatagccatttttatccaaaataacaggatatccgaaaggagatttgataaaaaacagctacatttgttctggtaaacccacatccggtcaactaggaagaaacatcatccacacccgaaatcaaacataagaccctatgatacaaattcacgagacttctattattgccgccgccgaaaaggggatggacgaatttctgaaagtattcaccgatgcctatctggaggtactcggtggcgacatcaccacagagaatatggaccagctcaatggctatcagcacacgctgctggcctatcgttttttctcggaggaggtgaacgagggtggctttgtgcagctgatccagaatggctatggagggtatatcttcgacaaccccaccgccaaggcgttgaagatgatgggtgccaagggcatttcgaagatcctctacaaggccaaggagatttacgatgcccaccgtgccgagctggagcgggagaccacggaagaggagttcaccgccatgtatgtcgattttgaagagttcgacgagctggaggagaagttctttttcatcgaggaggaggaaacaaccctcattgcccagtatgtagatgagaacctcgaagactttgcggggcccccattgatcgaaatcatcaaaacaacaacgtaaacgttacgaaaaacatctactcagacagaagacccgccgttgccggacagttttatccagtgaacgcggatatgttgcagaaagaggtagtcagttacttccgggaagccgttaaaaaaaagcacgacaacgtaagggcaattatctgccctcatgcagggtatattttttcggggaaggttgctgcttcggggtaccgccagatcgacaagcattcgcaatacaagctagtgtttatactggcctcgtcgcatcacagttatttcaacggcgcatcggtatattgccacggcgattacctgatgccgtatggagcagagaaggtggacagggaagtcgggaaaaagcttgtggaggaacaccccggacttttcacggacgaccccaacccccacatgaaagaacactccatcgaagtacagcttccttttttgcattacacactgaagaacccgtatgccattgtccccatcatccttggcacgtccgatgtcagcacctgccaacgccttgcacaggcgctaaaaccttttctcacaaaagacaatttgtttgtcgtcagcaccgatttttcgcattaccccgattacaacagcgcaatctcggtcgatgctgccacggagcaagccatcctgaagaatgatccgcaaaaacttatcgagacattgttcgaaaataagcagaaacaaatcgacaacctggtcaccagcttgtgtgggtggacgtcggtgctcacgctgctgcacatgaccggcaacaacccgcgttatgcgtaccacggagtggattaccgcaattcgggcgacgagaaaacgtatggcgaccggcatgaggtggtcgggtattgggccatcgcagtgacggagaacaccgcttcagcaaagaaagaattttcgctcacggaggaagacaaaactgcgctgctcggagaagcgcgcagcacccttgaaaagcattttaagagaagggaagcttcctcacccggtttaagcggctgttccgatgcggtgaatgcaccttgcggtgcttttgtcacccttcacaaccgggggaaactccgcggatgcatcggaatggtatctacccacgagccgttgttgaagacagtgcacgacatggccctatcagctgcgaagagcgactaccggttttcgcccgtaactgcggaagagttggacgagattgagattgagatttccgtcttgtcgccgatgacaaaaatcaaggatgtttcggaaatcgagctgggcaagcacggcatatacattgtacagggccgctcaagcggtatttttctcccccaggtagccgaagaaacaggttggaacctggaagactacctcggccactgtgcccgtgacaaagccggcattggttgggacggctggaagcgcgccaccgtgtacaccttcaccgcgactgtttttggggagaaagagaacaaggcataacctcggggtatcgcgacctcactgccagacgccggcaattgcctcgccgcaaatatggcatttccctgccgccagtctgtttgatgtcacatcgaacccctgccgttccaccagcaaggtgtggcaatgagggcaaaacgtattttcaccctggagatgcggcaagttaccaatatacacgtattttattcccgcccgttccgcgatctcctttgcctgtagcaacgaccgttcgggagtagcaggcctatcggtcagccggtaagtgggaaagaagcgactaaaatgcagtggcgtatcagaaaagttgttttccaccagccacgcacacattttttccatcatttccgtgccatcgttgtagccggggatcaacaagctggtgatctcgagccagatatttttctccttcagtgttttgagggtttccagcaccggatgcaggcctcccgaagtcaactgcttatacgattcgttgtcgaagcattttaagtcgatgttggcagcgtcgagatgagggcaaaggtccagcaacggttcccggttaatgtaaccgtttgagaccatgaccgtcttcaccttattcttgtgagccagcaccgcaatgtcgtacatatactcgtaaaacaccgtcggttccgtgtaggtaaaagcaataagcctggtatggtacgccagcgccttatcgattatttcctgcggactgaaccggtaatgcggcaactcttccggtgatgcctgcgatatttcccagttctggcaattggcacaccggaagttacaccctgcggtagccagcgacaagatattttcgcccgggtagaagtggaaaagcggttttttctcaatcgggtccatgcttaccgagcacggattgccgtaggccatggtatacagtatcccgttcaggttctttcttgcatggcacacccccgtttcgttctccttcaacaggcacacgtgcggacaaagaagacaacggacagcaccatccgccttctgttcctgataacgcgctggcatgtacacatctgcagaatccgtctttttcatagctcccatttttactacccttcggaaccatccgcataggagttcaaatttacataattatttcatggcttattgttattctactctttgatttccatctttagtaaccagtgataaacattttgatttgattcagtaacaatatatgcctgaacaaattcccatcccagggtacccatgaaattcatcgcatcaaccatagagttgaagttaactggtttcccgttttcatccttgtagcgtctatccggcgcccagaaactaacggactgtccgaaatcaatatcaacgttaatttttgtgctcagaaacttcgcttggcccagtaattcgcaatagatgaattttttgtgttcaataaattgtggactgttctcttcttgtattacctgatcattattctcctgtgcaaacgctgttgtgcacacaaaacccaacatcaaaacaattaaaatttttctcatatcaattaatttaaacattaaatctccatattttccctgtcttgtcatcttgaaccatgatcctgccacctttaccattgtatttgttggcataataaatggcattgagtctcaatctagaaatactgttcgcgtgaatatatcctattggattattattccccatgttgaagacgtaagcattgtatttgtaatccatgatatccaaatatttagagagtccaaatatcagcataactttttaggtgacaaagaaataaagtttattcctaaggaattgatagaaattgagtaatacgtgaatgctcaattaatctcatttcataatgaaaataagtttcgacttatagtcaactagtaccaagagaatcggatttttacgagaattcgttaatgatgtaatttacatgccgtgaatataaaaaagcgacccaaaggccgctttaaatgttttcacaacggaataatccttattgtgaattgctttcatttgcaaagatatgaaatatttttacagaaaacactactttatgttaaattttcatatctttgatttttacaataagttggattataataaacttaaatactatgagcaaaacaattttgggtcttgaccttggaacaagttctatcggatgggcgttggtaaaagaatcagacgaagctgattacaattctgaaatcgtaaaactaggggtacgtgtaatacaatacgataattttaatgtcgtggaacgggcaagtggtaaagttaaagattcgagggatccagtgcaagattttatagctggtaaaggtttatcaccaaatgctaaaaggacaaaagatcgtggtgcccgcagaaacttacaacggtttaaattacgacgtaaaaatctaattagaatattaatagaaaatggaattattaatgaaaatactcctctgacagaaattgggaaaaacacaacacatcaaaccttatggttacgtacacaagcagcacacaataaaattaaaatagaagatctcgcaagagttttgctttcaataaacaaaaagagaggttataaaagtagtcgcaagtcaaaaggcgaagaagaaggattagctgttgatggtatgtctattgcaaaaatattatatgatcaaaaactaacaccgggtgaatatgtttttcaactactgtcagaagggagacattttatccctgacttctatcgttccgatcttcgaaatgaaaagataaaaatctgggataagcagtccaaattttatcctgatcaattaacaaatgatctttatcgtgcattagaagacaaaaataaaggtacaacctggaagattcttgaaggtccctggagtttaaaggggctaaaacaaacgggaacgagagatgaacaaagattggagaggtacaagtggagaaaacaatcattatcagaacagatcgatttagagaagttggtaatcgtattgcaagaaataaacggggaactttctaattcaagcggttatcttggagcaatatccgataggagtaaagagctttatttcaataaaataactgtaggtgaatttctatacaatcaaatcaaaaaaaatccacatatttccctaaaaaaacaagtcttttatcgccaggattatttggatgagtttgagtgtatctgggaaacgcaagcaaaatattaccccaaaattctaaccccaaaattaaaagaagaaattcgtgacgtgataattttttatcagcgtaaattaaaatcacaaaaagggcttattagtttctgcccgttcgaaagtcggcacgttgagtatattgaatcaactaccggaaaaacaaaaaccagaataattggccagcgtgtagcgccaaaatcctctcctgtttttcaagaatttaaaatttggcaaaatttaaataatgtcgttttcatacatgagatgagtggtgaaattattgatctaaaaaggttagatgatgctgcacgcagtgatatttttgtagaattaaatacgagggggaatctaactccaaaagacattattcaaattatatcaagacatctatatattaataaaatatcggattggaaatgtaattttgaaaaaattgaagggaatagtaccaataaagcactttttgacatctatcaacaaatagcacaagctgaaggatatgggttcgattgggcaaaaaaaacagctaccgagataagagaagaactgacatcaatttttccacttgtaggaataaacaaagacatattaagttttgatattaatttggagtccaaagattttgaaaggcaaccctgttatcaattatggcatctgttatattccgcagaagacgagagcaaatcatctgaagaagatcgcattacctatggaaataatgatactaaattgcgaaaaaagctccatgaaaaattcggatttaaaccggaatatgccataaagctatcgaatatacctctgcaacaggactatggaaatctatcaacgagagcaatgcgtaaaattattccatacttgcaggcggggcatccttatgctaagggtagcgataacgatactgaagtgggtgcatgtgagttggctggatacaaccattcaaaaagcgtgactgcagaagaattgatgaacaaaattctgaaagaaaaattggatattcttccaaaaaacagtttacgcaatcctgtagttgaaaaaattctaaatcagatggttaatttagtaaatcaaattatcgatgaatacggtaagcctgacgaagtaagaatagagttggctcgagaactaaaaaagacttcggaagagcgtgagaaaatgagtagggaaatcatggatgcaaccaaacgcaacgatgatataaagaagttaataataaaagagtttcaaataccaaatccaacaaaaaacgatatcgtacgatacaggttatgggatgagctaaaggatagaggctataaaacaatatttacagataagtacataccgaaagaaaaattattttcaaaagagatagatattgaacatatagtaccacaggcactcttatttgatgattccttctctaataagacacttgcttttaagagtgagaatttacagaaaaacaatcgcaccgcctatgattttatctatcaggactataattcgaataaaactacttacgaacagaacgtggaagcatggtataataatggaaagggatctatttcaaaagcaaaaagaaataaacttctaatgccttataaagatatccctgaaggtttcatcgaacgagacctacgtaatacacaatacatctcaaaaaaggctcgccacatgttattggaagtattcaggactgtcgtacctactaccgggagtatcactgatagactaagagaggactggggattggtaaacatgatgaaagagttgaacttacctaaatacagggctttgggattgactgagtttgaggatcgttttgatataggattagaaaaaccaaagaaagttgaagtaataacagattggacaaaacgcaatgatcaccggcatcacgcaatggatgcattaactgtggcttttaccacacataatcatatccaatatataaacaatctaaacgcacgaagggatactaatcacaaacaacattatgccatttgtgctattgaaaacgtgatcactcaaaaaagaaatggttcacgcatctttaaagagcccatcccaaatttcagaaatgtcgcaaaggaagcaattgaatcaatacttgtttcatacaaagcgaaaaataaagttgtgacaaataacataaataaaacaaaattatcaggcaaactacgatataaaaaatccttacaaacaactccacgagggcagctacataaagagactgtttatggtaaatcacttcgtccagttgctaaaccaataaagcttaataaccgttttagtcaggaaatggctcagttaattattgatagtaaagagagggaagccgttcttcaacatatgtcgaaatatgaaaataatagtaatatagcttttgccttaaaaacactaaaaaatgatcccattctactaaataatgaacaattaaatgaggtcgggtgctttgaagtaattttcacaatccgaaaaccgattacttcagatttgcaactggacaaggttattgataatggaatcagaacagtacttgaagagagattgaataagtttaatggcaattccaaagaagcattttcaaatttagaagagaatccaatctggcttaataaagaaaagggtattgctattaaaaatgttacaatcagcggcgttagtaatgccgtaccacttcattttagaagagatcacttgggcaaagagatcctgggtaatacaggagaaagggctgattcggattatgtacagaccagaaataatcaccatgttgctatttacaaagatacagatggtaatttgcaggagtctgttgtatccttttatgaagcggttgagcgggccaatcaaggcttgcccataatagacaaagctttaaacaggcatttgggttgggaatttcaattcactatgaaacagaatgaaatgtttgtttttcctgcttctgattttgatccttctgagatagatttgactgatcctgaaaatgcaatattaataagtaagaatctttttagggttcagaagcttagcactaattactatacgtttcgacatcatcttgaaacaagtgtgacaaatgatttagattttacatacagaaggattagaactcctaatgggcttaagggtataattaaagtacgagttaatcatattggaaaaatcgtatgtattggcgaatattaatattgaatatacatgatcaagaaaactttatatttcggcaatcctgcataccttagtttacgaaacgaacaattggttataaagctgcccgaagtggaaataaacggctcaataccggaggagttgaaaaaaccttcacaaaaaacaattccaattgaagatattgggattgtaattcttgataataatcgtataacaattacgcaggggttgatcgaatcattattagagaataacacagcattaattacatgtgacagctcacgtatgcctctaggattaatgctgccactatcaggaaacaaaactcaaacagaacgattcaaggatcagattaatgcttcacttcctctaaaaaagcaactctggcaacaaactgttcaggcaaaaatacgaaaccaggcctatttattatcaaataaaaacaattctattattgacaacatgaaagtttgggccaatgatgtgaaaagtggtgacccggacaactatgaagcaagagcagctgtttactattgggctaatctgtttaacgaaatagaaggtttttctcgtcatcgcgaaggaattccaccgaacaacttacttaattacggatatgcgattttacgagctgtagttgcccgatcattggtggcaagtggtctattaccaacatttggcattcatcatcgtaataaatacaatgcttactgtcttgctgatgatattatggagccttatcgtccctttgtggataaaatggtttgcgacatcgttgcagagaaaagaaatattgatgaattaagtcaggatataaaattcaagcttctcaatattccggttctcgatgttgttattgatgatcagagaagccctttaatggtggctgtgggacaaacatccgcatcactttataagtgttatgaggggagccttcgaagagtaaagtatccctctttcgagtagtttggttatggaacggtttagtgaatatagaattatgtggattttggttttttttgacttgccaactgatacgaagaaggatacaaaaaattacaatatcttccgtaagaaacttattcaggatggatttaccatgttccaattttcaatttacctaagacattgtgccagtagagagaatgctgaagtacacataaaacgagtaaagagttttttacctccaaccggacaggtagggattttgtgtgttacagataaacaattcggaaaaatggaactgtttataggaaagaaagagacagaagttcaaaccccataccaacaacttgagcttttttagaatctatactagaaaaaaaatcctgccctccgacaggatttttctgtttgtaacaacaacaaattttaattgtaatttcagcactaacctcctgataatctaacaaaaactaacatccagttgttactgataccaaaggtactgaataatgaaagcaattcacaacagtcatgtattttatcgcgaattgaacgcggttgttactgataccaaaggtactgaataatgaaagcaattcacaacaaacggattgtgtaggttttcaccgaaattgttgttactgataccaaaggtactgaataatgaaagcaattcacaacttctgagtagtttagttttcatgatcatttgttgttactgataccaaaggtactgaataatgaaagcaattcacaacagttggctgcctcaatcttgttccgggatcgttgttactgataccaaaggtactgaataatgaaagcaattcacaactccattgacgtatatgcctgctattgcattgttgttactgataccaaaggtactgaataatgaaagcaattcacaactatattatcaagggacatgtgtaccgctttgttgttactgataccaaaggtactgaataatgaaagcaattcacaactgacaccaaacaaccagcttattactaaagttgttactgataccaaaggtactgaataatgaaagcaattcacaacctggtttcctcatcagtatcaaggtcatctagttgttactgataccaaaggtactgaataatgaaagcaattcacaaccctttcgtttcaaccctgtagagatattctgttgttactgataccaaaggtactgaataatgaaagcaattcacaaccatcatgccgttatcatctttacccgaaacgttgttactgataccaaaggtactgaataatgaaagcaattcacaaccacttgtagaggagctccgcaagaaacttgttgttactgataccaaaggtactgaataatgaaagcaattcacaacaacctaatcattgcaggcgataacatcgttgttgttactgataccaaaggtactgaataatgaaagcaattcacaactctgtattccatcagcataataaagggtatgttgttactgataccaaaggtactgaataatgaaagcaattcacaacatgtcctagttcagtcacgaaaaagtgcttgttgttactgataccaaaggtactgaataatgaaagcaattcacaacttctatgaacttcatgccccatttttcgaagttgttactgataccaaaggtactgaataatgaaagcaattcacaacttgtactgcttttcatcccagttaacattggttgttactgataccaaaggtactgaataatgaaagcaattcacaactgatcagcatcttgtttgttgatatattttgttgttactgataccaaaggtactgaataatgaaagcaattcacaacatcgaagatggtttcgatcacagacatgtggttgttactgataccaaaggtactgaataatgaaagcaattcacaactaccatgaatatataaagcttcgcaaaagggttgttactgataccaaaggtactgaataatgaaagcaattcacaacaatactgcaggaacactataatcagagttagttgttactgataccaaaggtactgaataatgaaagcaattcacaacttacgtatgtttcttttgtttctgatccttgttgttactgataccaaaggtactgaataatgaaagcaattcacaaccaactgcctcgtttgttcgctcacatctgtgttgttactgataccaaaggtactgaataatgaaagcaattcacaacaatactgcaggaacactataatcagagttagttgttactgataccaaaggtactgaataatgaaagcaattcacaactgttaccataaaacagcatgatggaatagtgttgttactgataccaaaggtactgaataatgaaagcaattcacaacttcccgattcttcggtgctcaactatgttagttgttactgataccaaaggtactgaataatgaaagcaattcacaacacgagtacagagagggttttacacacggagttgttactgataccaaaggtactgaataatgaaagcaattcacaactagtttacgacgaccttacggataggtactgttgttactgataccaaaggtactgaataatgaaagcaattcacaactatctttgccataattatatttcgttatatgttgttactgataccaaaggtactgaataatgaaagcaattcacaacactggggaagagagtttataaaatttatgggttgttactgataccaaaggtactgaataatgaaagcaattcacaaccgtgctaaaagtcttgttctggtgtgttcagttgttactgataccaaaggtactgaataatgaaagcaattcacaactattgatttaccattacaaggaaatcaaatgttgttactgataccaaaggtactgaataatgaaagcaattcacaacggaaggaaacagacagtcccgttcaccgttgttgttactgataccaaaggtactgaataatgaaagcaattcacaacagcggaaagggaaagatgtttctatgaatcgttgttactgataccaaaggtactgaataatgaaagcaattcacaactttcaacatgttttattctaatctgattacgttgttactgataccaaaggtactgaataatgaaagcaattcacaaccttcgtggcaggggagttaaggcattcctggttgttactgataccaaaggtactgaataatgaaagcaattcacaacatctcatcgatggaggcaccatcgacgtaggttgttactgataccaaaggtactgaataatgaaagcaattcacaaccctgtcacccaatgtatctcctgtccaatagttgttactgataccaaaggtactgaataatgaaagcaattcacaacatgtccctggtgtgatgtcttttgccttcagttgttactgataccaaaggtactgaataatgaaagcaattcacaactttgatctcctgatcgaccttctctgttacgttgttactgataccaaaggtactgaataatgaaagcaattcacaactcaggtcttcactgctgtatgtctcaatgtgttgttactgataccaaaggtactgaataatgaaagcaattcacaacccccaagctttggcataagatggggagattgttgttactgataccaaaggtactgaataatgaaagcaattcacaacgatgcaaacggtgtgtctgttttttcagtggttgttactgataccaaaggtactgaataatgaaagcaattcacaacaatagccaccttatatttctctgccgcgaggttgttactgataccaaaggtactgaataatgaaagcaattcacaacaattacgatattctgaaagagttacttgagttgttactgataccaaaggtactgaataatgaaagcaattcacaactacgtcttggatgaatcgccagtagcttaggttgttactgataccaaaggtactgaataatgaaagcaattcacaactacccgcctcattacttgatggtcatatagttgttactgataccaaaggtactgaataatgaaagcaattcacaactatattgatctgttttgtggtgccggaggcgttgttactgataccaaatgttctgaattgtaaataaatctaaacctgaataaacgacgtaattacttttttaaaaaaagttacaaacaggcaaacccatttttttcctgttataaaattttaatattttatattattgctacctttgtcttttgatgaatgaatatctgagcacatatcaaccctataatatcgatcgatatccacggacagtgcgtagggacatctctggtattcccttatatattccttatatttcgcttatgttttaataaggataacataacctatataccgcgaagatggaagcaaatatcgagcgcttaaacagattcaatcagtgaaatacgcataacctaattttgaatacaatggcaagatttaaaaaatccattcccgatggattaagcggaaaaattggtccggtagtaacgtatgtgagagatggcgtacaggtagtgcggtctctccccaaacgcaatgatccgaaaacagagaaacagctggcacaccggatgaagttcaaactggtcagtcagggtctttcgccgctgaacaatgcaatcaaacagggttaccaaaataaaaaggatgcctacagaacgctgttcagcaaggtttatcacgaagcgattgcgggtgaatacccccatttcagactcgattacggcaagattcacatagcggaggggcggttgctactgcctccgaatatcagggctgaaaagggtgccggagagcaaacggtcctcttccgatgggatagccagactgtaaaggcgtctgactggagccgtgacaacgaccgggtccgcatcgtttatctgaatgaatcgcttgcggaagcgcatcagtcgtcgggcgctgcaagtagggtcgatggcactgtctcgctgcatctccccgatggctggaggccggaagatacgctcttctggatttatttctactcagccgatcagcggcatcattctgacagccttttcgttgaagttacacccgagtgaggaaaatacttacccatatcaacaagatgaaacaaaaaaaatacagtagacgcaactttatcaaaatatcgggattggcaacgattggaagtgtgttgtcgaaccgacttacggcgaatgagaaaatagaaattgacccatctcaaaacaggattgctatcgttgaggagacaaagcttgtctcgaaggagcctggcaaataccagattgtgaaccagatgatagatgacaatggccatgcgaaggcgtcggatccatttctggaacccaaccgctacttgggatggcccacaattgccaaaaaagaggatggagagctgttgattgcttattcgggcgacagggattcacacgtatgcccatggggtaaaacgcaactcattcgcagcagagacaacggaatcacatggagtgaaccggagactgtaaacaacactcccctcgacgacagggatgcgggaatcattcaaaccgacaaaggaaccatactgattagttggtttacttcgcttgcttatgccaatcccgactataaatgggctcatcaaaaatatgcacgggtagcagaaaaaattcccgaggatctgaagaagcaatggttgggaaactgggttcgcagatcggaagatggcggcaaaacatggctcaaccccacccgaacggtgggctcggccccgcacggacccattcagttaaaggatggacgtcttctttatgtgggtaccgcaaattgggagggaacctattctgtcgtcgtggaagaatcgaaagacgacggaatcagctggcaggtgatttccatcgttccaacattcacaggaaatgccaacaatatgagtgaaccacatgtggtggagacaaagagtggcaaactggtggccatggtgagaaatgaaccgaaggaccgggaaaaatgttttttactgcagtcggagagttacgacggaggctttacctggacgatgctccacgaatcacccatatggggatatcctcctcatctgctcgctttgaaaaatggctggctactggtggtatatggacacagacggtcgccctatagcgaacgtgcatgcatcagttacgatgaaggggaaacgtgggacatgcaaaatgagattacacttgccgaagcatacaacggagatctgggctatccggcgactgttcagctgaacgacgggactcttctcactgttttttatcaacaggatgttagaaatgagccaacgtctatctttaccactcactggaaattgaagtagcattgtttgaactgttaaatattacactttgtaaatcaactaatatgaatcgaatgaaaaattttattgtatcactactaattgtaacgctatttcatgcaggcgcggttgcacaaaagcgttattcactggtttctcccgatgggaaactaagcaccgagattacggtgggaaaacaaattgaatatgccatttcccacgagggggaccagctgctggtgaactctccgctgtcgatgcagcttgccgatggcacgcagcttggcgtggatgccagggttgcaggggcgaagcagaagtcggtcaacgacgaaatcaaaacggtcaactacaagaaaaatgtagtggccgaccagtacaacgagctggaaattcggtttaaaggaaactaccgactgattttcagagcctacaacgagggcgtggcgtatcggtttgtgaccgacatgaaaaagccttttgaggttgcttcggaacaggtgcagtttaatttcccgggcaacccgaaggcatatgttccttacgtgaacaaccagaacggggcaaaagacacttttacaaagcagttctacaactcgtttgaaaatacctatcagcacatcagtttaacggattggcagaccgggagactggcatttctgccgttggtggtcgagggtcccgccggcaaaaagatctgcctcaccgaggccgacctgctgaattatccgggcctctacctgtcgaatcaaaacagtgccaacagcctcaccggagtgtttgcgccctaccccaaggagatcaaacagggaggacacaacaacctgcagggcgaagtgcagtcgagcgaatcgttcatagccaaatgtgaggggcagacagcgtttccgtggcgggtgatcatcgtctcgaaagatgattatgaactggccaacaacgacatggtttacaggctggcatcacccaaccgcctcgcagatgtctcctggatcaagccggggaaggtggcatgggactggtggaacgactggaacctgtatggcgtggacttcaagacgggcgtcaacaacgagacgtacaagtattatatcgactttgcatcggatcacggcattgaatatgtgattctggacgagggatgggccgtaaacaagcaagccgatctgatgcaggtaatccctgaaattgaccttcccatgctggctgattatgcgcgcggtaaaaatgtgggattgatcctctgggccggatactgggcgctgaaccgcgacatagagggtgtctgcaagcactatgccgacatgggcataaagggtttcaaggtggatttcatggacagggacgatcagctgatggtcgacttccaccgcaaggcggcggagattgcggccaagtaccagctgctgatcgattatcacggaacgtataagccgaccggtttgcacaagacctaccccaatgtcatcaattttgaaggggtacacggactggagcagatgaagtggtctcccgcaagtgtggaccaggtgacctacgatgtcaccatcccctttatcaggatggtggccggccccttcgactatacgcagggagccatgcggaatgcgacaaaaaataattaccggcctgtcaatacggaggccatgagtcagggaacgcgttgccgccagctggcgcagtacgtgatcttcgaatcgccgctgaacatgctgtgcgactctccctccaactacctggccgaaccggagtgcacgacatttatcgcggagatacccaccacatgggacgagaccgtggctgtgaatggcgagattgccaaatatgtgaccctcgcacgccgcaaaggggacacgtggtacgtgggttccatgaccaactgggatgcgaggagcatggagcttgacctgtcgtttctgggtgaaggcaattatacggccgagctcttcaaggatggcgtgaacgcccaccgtgtggccaaagattacaggaaagaagtgatcgatatacccgccaaccggaagctcaccgtgaatctggcacccggcggaggacttgcattgaagattacaaaaaaataattcccttttttaccggtcgcagatttgcgaccggtttttttatgtcctattttcgttttgatgaaaaactcatttacctttgttacgggttaacttatcaaacaataaatctgaacatagaaaagaatcgtatgaaagtaatagaaagaatttgtataggggccatcctgctgaccgtcatactcacatcgaacctgcatgcacaaaacaccggagcgcaggaccgtacctattggatagaggtcctgactcaaattgccgatcctgtcctgatcaacatgagtcaggataaacttaaagctacaatgcccgtagaaaccttggcgggtggagagaatcccggcaatgcccggacaacccacctggaagcattgggccgattattagccggaatggctccctggctggagctcggtcccgatcagacacccgaaggtaagcttcgggagaaatatatccaactgatgctgaaatccattgaacatggttttgatcccaaatcttcggattatttgaactttgaggttacacgccagccattggtcgacatggctttcttttgcgaaggtttgttgcgtgcacccagtcagatttggggaagactctccgacaagacaaaaaaggacgtggtgaatgccatggagaaaat

SEQ ID NO: 2158 - DNA, 24242 bp, synthetic construct
  misc_feature 1..24242: note = Synthetic
  source 1..24242: mol_type = other DNA
cttatggccaagatgatctataaaatcattaataccccaaagccaaggggacattataaagttggggaacctttacaaaaattctccattgccctaaagcggattcttccggacaaattatatgagaaaatcttgctaaagcattataaattgtaattttgcaacgagtaaacataaccataatttatttaaacacaacactatgaaattttttattgatactgcaaaccttgaccagattagagaagcccaagatctaggggttttagatggggttaccacaaacccgtcgctcatggccaaggaagggatcaccggaaaggacaatatatttaaacactatagaaagatatgtgatattgtagatggcgatgtgagcgcagaggttattgcaacagattatgatgggatcatcaaggaaggtgaggagttagccgagttgcacgagcaaattatagtgaaagttcctatgattaaagatggtataaaggccattaaatattttagcgataaaggaattaaaaccaattgcaccttggtgttttctgcagggcaggccttattagctgctaaagcgggagcaacctatgtttctccatttatagggaggctggatgatatttctactgatggtttaaacctaattgcggaaattagattgatctacgataattacgaatttgaaactcaaatcttggcagcttctgtaagacataccatgcatgtgatagattgcgcgaaattaggagcagacgtcatgacggggccattgtcgtctatcgaagggctgttaaaacacccacttacagatattggtttggctaaattccttgaagattataacaaagggaattaggtttaagcatattatgatttaagaaaagcctgaacaatttaatgttcaggcttttttaatgatttttattgaagtaaagtaaacggagttactgttgacttataaactccaagatcttattttccagatctggcgtgtttatttgaagatctcctcgggcaatcgtgcctttggaatccataaaaattaatttgttcaggtaatactttagtaaattttcatctacccgaattttaatggcctgaaattgtaatttaggatcgaaggaattgtttttaataacttcgatccatttatcggaaccgtccatatctaggttaataccaataaaagccacttctggatatttaaattgtaggtccttgataattttctgttgccatttataatgcgatggagaagaacttttccaacggtaagtgatcatgggctttcgagtaaaacttttaagtttaactgtatccttgcgtgtatttatatagatcttctcgccaagtgaattcccaggtagaaaatctgattggatcttggccatctgggctattccttttttcatatttccagaataatccatctttttcaacaagttcaagatcaaatctacattttctgccttttgggaataaataattccttgggaggccaatctatccaaaaacgtattttttatattcttattctgaattaaggaatccaccaattctatctggtaccttatattctcgaaactatttaaattagtgcaatttttatcgtatggtttggttttagcgcaatcttctaaagtttttgttcttaaaaaatcatctataaaatttaaatagacataagaatcctctaaagccacataattaaaggaaacctcatttctgtactcatgaaaatctgctggtatcttacctattaaactcggattgtattttcgaattaaaaaggcatagcgttccctaagatcgtaatactcatagttgatactggaatttgcaattgcataaaaatcctgtgaaatatcgcttttttctacaagatccatcagtttctgctttctattagcccttatggaatctgtttttttggcaaattcagatggatctgacttatagtaagataaaattagatcgttgtcctgttggttaaggagataaagatcggtgaggaaattacttttttctgaaccttttccgctgaaattcaaagattcatcgaaggccaaggtgtttaaccataccatcgtactatcgcccggctctaaatatattatttgattctctggaggatgtctaaattggtacaagccggctttaatgcccttaagagtaccttgaaactggttgttgttatccaaacgcaacgtatctatatctaagttgtttttggaaattatcacatattcactgcttggattggcaatttgacctttaagaaaaacctcagaagttttatttttcttgtcacaagagagaataaataaagaaataaatagtattagggataattttaatttcattcggggtaattctgctatgtccttttaatcaaaaaatagtatgcaatgaacaaatatagattttgagatatttgcctcgtgttaaccactcgttaaaaggattaattaaaacgttaatgttttatcaggtggacaataatggttatttttgcaaaaatttacagaaagaaaatataaaaatatgctatcagtttctaatttatcggtacaatttgggaaacgaatattatttgatgaggtaaatactgcctttacacaaggaaatatatatggaattattggtgccaatggtgccgggaaatctacttttttgaacatcctttctggaaaaatggatcccactagcggtcacgtgcatttggaacctggcaaaaggatgtccgttttggagcagaaccataacctgtatgatgaaaatacggttttggaaacggttataatgggaaataaaccattgtataagatcaaaaacgaaatggatgccatctatgccaaagaagattttaatgatgccgatggagagcgggtaggagtgctacaagtggaattcgaagagatgaatggttggaatgccgacagtgatgctgctgctttactttctaatttgggaatcaaggcagaccatcattatacgttaatgaaagatttggatggtaaacaaaaagtgagggtattattggcccaggctttatttggaaatccagatgtgcttattatggatgagcctaccaacgatctggattatgaaacaatcttatggttggagaatttcttggccaattacgataataccgtaattgttgtttcccacgataggcactttctagatgcggtttgcacccatatttcggacattgattttagtaaaataaatcattttagtgggaattatactttttggtatgaatcttctcagttagcagcgagacaacgttcacaacagaacaaaaaagcagaagaaaagaaaaaggaattagaggaatttattcgaagatttagtgcgaacgttgcaaaatccaaacaagcgacttcgcgtaagaaaatgatcgataaactgaatatagaaggtattaaaccttccagtagaagatatcctgccattatttttgaaagggagcgggaagccggggatcaaattttaaatattgaaggtttagaatcctctatagatggggaaataatttttaaaaatgtagatatcaaccttaaaaaaggggataaaatcgttgtctattccaaagattccagggcaactacggcattttatgagatcctaaatgggaaacaaaaagcagatgcaggtacttacaattggggagtaactacttctcagtcttatttgcctttagataatgcagagttttttgataacgattatactttggtagattggttaaggcaatgggccaagaccgaagaggagcgtgaagaagtatatattaggggatttcttggcaagatgatctttagtggggaagaagccttaaaaacttcgagagtgctatctggaggagagaaggttagatgtatgttaagcaggatgatgatgatgcgcgctaacgtgctaatgttggatgaacctaccaatcacttggatcttgaatctattaccacttttaataattcgcttaagaattttaaaggaaccgtattgtttacgacccatgatcatgaatttgcacaaacggttgcaaacagggtaattgaattaacgccttctggtgttatagacaggtatatgactttcgatgagtatatggaagataaaaagatcaaagagcaacgcgataaaatgtatgcggtagaagcatgattttaaacacattaaaaataagaacctcgaaaaatagcttttttcgaggttcttattttgttcagatacctttataatatttatagagatcgtagattccaaacgctataaagccaacagcaataacatacccaaaagtattctcttcttgagtagtggtaagggtatataatttatagcatccgtataaaaaaaacaggattcctaataccaggtgccagatatttcgattttttgggatactattttccatctttgaattcttctgggaatgtggatttggcaatttctaaaccttcggctaaatgtgaactgatcacaaacaattgaacttgccctggtagacccccaccaaaaccagctctaagaccagaatcaaaatcatttctcaccatattggataatcccgctttattaaaaagttcctgtaaatattggacatttgtttctggtcctgtatatacatgttcataaccttgatcttcactcatactattggatttataacaactaagttagttatagaaaattaaaaaatatcagatttatcaatttttatgcaattaggcattataaaacttacttctccaaattgcctcgctaaaattcttgccttttttaaacccaaaaaatatggtcatacctgccaaccatttgaacataaataaatagataatgagaaattctgcagttgtgtggtgctggccaaacattcctgggggaacaacagatgtaaaagcaagactaactatcaataacaaaacaactaggttttctatttgcttaaaaggccacatcattaattttctaaaagggtggaggtcctttccccaagaatggatcaaataataatattgatttccaatgggtgcaaaaagcaaggggtcgtctgcattttctaatttgaatagttttgccggtgccattattttaaaaccctccagcttggtgctatggattttttcaaggtgttttattttagaaatcgcttcgtagggaagttctgctttaaaataggaagagtttaagaaccgtaacctgtaatctatgcaaattctttcgatatcggtcaaatgataaatttttgaagtttccaaaaactctaattgtaggacattggtttctgcttcaattccttgtttaagcttttgcagaataagatcttcttgtacctgttctctttccaagacctcttgtacttccttcaataaatgttcttcagaaatccttttgtttctgctttctagtatcttatccggaatatgagtgccttgcagtgccatctactaaattattaggtttgtactaatttaactatttgacattaaactaacaacgcatatttaaactttaatccctcattaagggtttaattattacttgcttgtaattaattgtttgacgtttttgtctcccggagcgaagtcggagggaacgaccatagatttaactttccagcgtttataaggtctatgcgggaggttacttttattggtcaccgaattggtcccgctttaacatattttaacgtttgaattgccttaacagtttaaaatgaagcaaaacacatcaaattatatttttagtgatttatagttcctgaattagtgtaggtcggtattcacagtcatatttcctcaatactgatctttctattttgaattatcaatgcttttcatgaccaagtgctaaaaatatctatttttcatggtcagttaatgtttttcatgctattaggagatcaggatattaatatccttgaagaaagttttgaggagatatttatgaatgacatacatatactaatcgtggttataaagacaaagctggctcctcttaatttcattctcgggcacctgtcgtctgtgagtttataaaacgtttttacagtaaatagagattaagcgacataatatgttggctataaattacctggactttaggagtttgatctttcagtttaattcaaaaatattcagttaagaaatgctgagtaattcaaatagaaaaatcctaattttacctaaacctttctcagaaaaagtaaatcgatatgaccttacaacagctggtgcaatgcaattcctggttaagcatttctgctatactcttggaaatatatccggatgaagaaaaaagcctcgagggctacgagacggtatttgaaaaattgctgatgatggcctccgaagaaaccgatatgacgattgtgataaaggctgtaaaagatgcctttgacgaagaggaatatgtagatgtttccgggaaatacaaccaccctcaaaatgaggaacaatcattttctcaagcaatcgaatttacgtcctggaaaaaatggttaggaatggacatttgtaaagaaagtttaaaagatttttcagaattggaaatcctcgctcattgcctttacgaaatgacctttgtaggttttgaagagaaagggatacagaaagaattgaatgatcttgaaaaaactgtggaggactatgaaacaatgaccgaagaagaaaaacagaaaaacaggatttcattagaagatcttttagatgaattaaatgaaggtgacccggaaaacgaacatttataataaaacatattaaatagcaaaacatgattaatctcgatggcttggaaggttttgataatttggaagacttgaataaagagttgcaaaaaagggcaaatgcctataatgagagtggtgtggatgattttgacggtttaactcccttgcagatgggagagcttcaaatttttcccgggggcgaaggacctttgatattgaacaagctttcagaaaagcaacttaaaaaatgccccttgctcatgcaagtacgctttctcattgataaaatgaagggaggcgaaggattaaagctcaccaaaaccggggctttgcctactaaattagtcaaagaaatttacggactgggataccttaaaaacgaagcgattgaaaaaggtattagcaagttatataaagaaagtgaagttattgaaattaatatcacccgtgttttattggaaatttcaagtttaatcaaaaagagaaatggaaaattaagcttaaccaaaattggggaaaagcatgcagatgatggaaattttatactgaaagaaatcctgagtgttttgttccataaactcaattgggcttactatgatgggtttgactctgatgccataggtcgtgtaaatcctgccttcagtcttttcctgctcaaaaaatatggaagcaaaaaaagatctgcctatttttatgccggaatgtattttcaagcctttccgcaaattatggaggaaaatgactattcgtttagatgttactcactaagaacctttgagcgctattttacttttatgggctttgtgcaggtagtgaaggaggactacttatcgccggcagatgttaagaatacggaattttttgatcagcttttttcacttgaatcgaaataaaccttaaaaataaatttttcttaagttttccatcttgtattttaatccctcatcgagggtttaattccccgaggcttgcctcaaatttttaaaaatagtttccaatgcatacctcgtgggcttgccccgaggttcttgattccatttcggaatttccgataaattgtaaagttggagggaaagatcaggaatcttcattttcaatggtaaaatgtcttgcaagagcatctaaactaatgggataccgaattagtgctcctataacaacatttaacttttgaattgtttttaatgaatttaaaatgaagcaaaacacatcaaattatattggtcattgttctaagtattgattatctaaccaaacgttcttcgaggatatgtaaagtttttatgaatccctttacacaaaagaataatgtgtaaaggattcggcaattgtctttacatataatttaaatgtgtataattttgtcatttatttatacatataaaggcgatgtgtaaagaaaatctaattatctttacatattatcaaaagcgaataaaaattaaggaatgacttggaaacttcaaaatttgccctatcctaaagagttagaaaccctgaaagttctaaaacttttacctgaagcacatagggctttggctgaattaaagggtgttgcacaatctattcctcgacaagatattttaataaatacactggccatacaagaggctaaagatagttctgaggtagaaaacattgttactacccatgacgaaatttataaggcaagtatgggtatcggcaagcttacctctagtcaagccaaagaggtgcagaattacatattagcaatgaaaacaggttacaaaatcgtagtcaaacacaattttctatcaattaatcacataaaacaaattcagcaaatactagaaaacaataatgctggctttagaaaagtacctggaacaacgcttaaaaatcaaaagacagatgctgttgtctattcgccaccacaaagcaatgcagagatagtaccgttaatgcaaaacctggaagagtttataaataagccagaatgtttgtctgtagaccatcttattaaaatggcattatttcattttcaatttgaaagtattcacccattttatgatgggaatggtcgtacaggcagaatcttgaatatattatatctcatacagtataacttgttagatacacccattttgtatttgagtaagtatatcattcaacataaaaatgattattacagactgctacagcaggtacgcgataaaggggagtgggaagagtatctttgcttcatgctcaccgctgttgccgttacagccaaagatacattagagaaagtaaaaaacataaaacaggcaatggcagaatttaaggtgctcctacgggaaaattataaattctacagtcaagatctacttaaccatttgtttaagcaaccttacacgaaaatagaatttttacaaaaagagctgcatatctcacgcatcactgcagctaattatttaaaccaattggcagaagatggtcacctgaccaaatttaaaataggtagaactaactattatgtaaatggagtcgttcttaatgcattgaaataaatatttccttccatactaacaccttgtttcaatttataaaataattaagccaaataggtgaaaacctttttaagccccctaataagaactatttactttattaaaaaaaaactatatcttggaaaattactcccattgtgaaccggtgtttaataaaggattctatttaattgagaactcttttttgagtgaagagatgcaagccaattataaccatattttgaactctcgatttgaaatttttaataatgataacggacaataaaaggattaatattgtaagatctgttttcgaaatttcgagcactatttaaaaatcgcttaaactgatttattaaataatggttgctttttatcgataaattaacattatagttgtggttctaattatttataattaaatatgtattggaatcttacaatccctacttcgagattctccaaaaaaacatattaaatcaacgattctaaagcatgaaaaataagaaagcgacccgtgaaggctgccttaatgttttagctcacgtcttttatatattcataaagcggagttcatgaaacataaaaacgaaaaatgccccacattggaaggtgaggcggcttaaatgttttcacaacggaataatccttattgtgaattgcttcaaaattgtaagacaatattaaggattaaaattgaactatgcaatgtgggattccgtaaaagattaatttttagatatcatatatttaggttaaaaaatacaatatgaaaagaattttaggacttgatttggggacaaactctatagggtgggccctcgtaaatgaagcaggaaacgagcaagaaacttcatcaatcattaagcttggggtacgtgtcattcaatatgataatttcagcaaggttgatgcttctgggaaagtatctgaatcgaaaaaccctactcaggactttgctggaggaaaatccttgacacctaacgcttctcgaactcaaaagcgtggtgctcgccgtaatctacaacgctataaaatgcggaggaaaaacttaattgaaatcttaaaattcaatggttttattgatagtgatacggctctaaccgaaataggaaaaaacactacgcatcaaaccctttcattacgggcaagcgcctcagcaaaaaaaattgaactggaagatctagccaaagtttttctcactatcaataaaaagcgtggctataaaagcagtcgtaaagctcaaaatgaggaagatggacaagctatcgacgggatggcagttgcaaaaaagttgtacgatgaaaatctaacgcccggcgaatatgttttgaccatattaaaaaaagatggaaaatatattccagatttctatcgctctgaccttaaagaagaatttaaaaaaatatgggacactcaaaaaaaaatctatccgaacattctctcatctacactttccgatgaactgcaggataaaaataaaagtcaaacttgggctatctgccaaaagccttttgatattgttggtataaaacgaacaggaactgcccaagaaaaacgcttagagaattatgagtggcgtgtcaaggctttgactgaaaagctagatcttgaacatctggccatcgtattgcaagaaatcaataacaatatcaataaatccagtggttatttgggtgccatttccgaccgaagcaaacaactatatttaaacagagaaaccgtaggtcagtttctttataaacaactgctcaaaaatccgtatacatcattaaaaaataaggttttttatcggcaggattatttagacgaatttgaaactatttggagcacccaatccaaatatcacagtgaacttactgaagcattaaaagaggagataagggatgtcatcatcttctaccagcgcaaactgaaatcccaaaagttgcttatcagtttttgtcagtttgaaagctgggagcaggaatatatcgagcaagaaactggcaaatctaaatcacgcagggtaggtcgtcgtgtgattccaaaatcatcgcctctttttcaggaatttaaaacatggcaaaatctcaatcatcttgtttttaccaatccagagactaaatcccggatagaagtaaaagacctagatgcagaaattcggcaaaaattgtttgaggaattaaaccttcgtggagacatgacttataaggaacttttgaaaattctttcagaggagatggatataggcaaacttagcaattggaaaagtaattttgataaaattgaaggaaatagaacaaatgctgcactgttcaatgtttttcaaactatttcagaacgagaaggttatggtatagactggaaaaaagcatcagccgctactattaaggaggagcttaaaaatacgtttccatcaataggtatttcaaaaaatattttggattttaaacctttggaggatgattttgagaagcaagcacattaccagttgtggcatttgttgtatgcaacagaggaagatgataaaatttctgaagaagaccgcctaatttatggcaattcgagtgtggcacttaagaaaaaactacagaaaaagtttggctttaagccagagtacgcaacacttttgaccaatatttcattttctcaagactatggaaacgtttcggccaaagctattcgaaatatcctgccttatctagaagatggcgatttgtattctgagtcttgcgctagagctggttataatcactctaaaagtctcaatagagaagatttaaagaatcgcgaattaaagcccaagttagaaatacttaaaaagaatagccttcgcaatcctatggtagagaaaatccttaaccaaatggtcaatgtggtcaatcaaattatagatacctatggcaagcctgatgaaatacgtattgaattggctcgcgaactcaaaaaatcggctaaagaacgtgctgaaatgaccaaaggaattactgatggcacgcgacgaaatgatgaaatacgtaaacttcttacacagaaattcggtattcccaatcccactaaaaatgacgttatccgatatcgcctgtatcaagaattggaatccagagggcacaaagacctatttacagacacatatatagcacccgataaaattttcagcaaagaaattgatattgagcatatcattccaaaggctttgttatttgacgattctttttctaacaaaacacttgcctttaaaaaggataaccttaaaaaagcaaaccgtacggcctatgattttatatcacaagactaccatttgggattagaagcttttgtggagcgcattgaagcaatgcacaaagatggtaaaatcaacagggcaaaacgtaataaactattgatgccattagccaaaattcctgatgggtttatagaacgcgatctacgcaatagccaatatatcgcaagaaaagccaaggaaatgttgtttgaagtagttgaagatgtggtagctaccactggaagtattaccgataaattgagaaatgattgggatcttatcaatgtgatgaaagagcttaacttgcccaagtatagtgccttaggcctcaccgaatttgaggaacgattaaacaaaaccactcaaaagttaaagaaacatgaagtcattaaagattggactaagcgcaatgatcatcgccatcacgcaatggatgcgcttgcggttgcttttaccactcgcaaccacattcaacacattaataacctaagcgctaggaaagactcgactcaagataatcatccactcattaaaaatatagaggcaaatattaaagagcgtaatgagaaagggaaaagtgtttataaaagcccaatgccacgttttcgcgaaagcgcaaaacaacatattgaaagtattttgataagttttaagaacaaaaataaagtagttacccagaatattaataagaccaagacaggtaaggggcaaattaaatctaaaattcaactcacgcctagaggacaactgcacaaggaaactatttatggtaagtccaaaagaccacttgaaaaacccaccaaaataagcaagcggtttacactggaggaagcacggctaattattaatttaaaagaaagagaggtagttctaaatcaccttgcacagtataacaataatcctcaggtagcttttgataccaaaatgctcaaaaatgattctataactcacaatgggggacttttgaaagaagtgctatgttttgaggaaatttttaccataaggaaagatcttaattcagataactttaaaaacgcgaaacacatcgataaaatactggataatactgtgaaaaacgcacttaatgccaggttaaaggaatacgggaacgattacaaaaaagccttttctgatttagacactcatcctatttatttaaataaagaaaaaggtattgtgattaaaagggttaggatcacaggagtgagtaatgcccaatctttacatacggcaaaaaaccatttgggagaaagtatttttgatgaaaacggtcaagaaataccagttgattttgtgagtactggcaataatcatcacgttgccatttaccaagatgaagatggtgaattggatgatgatgttgtaccattttatgatgctgttattcgtaaagaccaaaagctgtcaattgtaaaagaaaaaaatcaaaatggatggcctcttcttttcagtttaaagcaaaacgaaatgttcatttttccgaatgaaaatttcgatccgctcgaaatagacctgttagatccaagtaatcagaatttgatctctcctaatttattccgtgttcagaaaatatcaaaagttgaatatggaaattcagcggtacgtgattatgtttttagacatcatttagaaacagaagttaatgatgtaaaagaattaaaagatattacctggaaacctattaaaagtttaggccatctagatggaattgttaaggtaagattgaaccatttgggaaatattgttcaaactggcgaatattagaaactatgatcaaacgcaccctctttttcggcaatcccgcttacctgagcaccaaaaacgaacaattggtggtttcttatcctgaagaagaaaaggaggcaaagactgtatctatcgaggatatcggggtgctaattctggaaaaccctcaaattaccattaccaatgggttgttaaccaagcttatccaaaataaagctgctgtggtaaactgcgataaacaacatttaccttgtagtatacttcagcctttggttggccatacccaacagacggaacgttttagaaatcagttgaacgccagccttccccttaaaaaaaatttatggcaacaaaccgttacttccaaaattggcaatcaagccaatcatttattgcgcaggggaaaaaaccataaaaaactattgaggtgggctggggaagtgaaaagtggtgatactgaaaatcatgaagccatttcagctgcccattactggcaaaatatatttgatattgacggattcaacaggtatcaaaaaggaatcccacctaacaatcttctcaattatggctatgccatattaagggcggttactgctagggcattgataagtagcggcatgttgccttctgttggtatttttcaccgaaacaaatacaatgcgttttgcctggcagacgatattatggagccgtatcgcccatttgtggatgaactggtatatgaaatagtggaaagcggggaaaatatagaagaactcaatacttttttaaaaagtcagctgctacaaatcccggcaatggacgtaaagatagatgataagttaagtccgttgatggttgcaatgagccgtaccaccaatagtttatatgaatgctttttgggcacgggaagaaaaattttatatccggtgtacgaatagaatcttgactgcactggatgtgaaactcgttatgtcaccttgggcggagtcgaaaggtatttagctataattatgaaagatcgtttttcacgtttaaaccaataccgaagcatgtgggtactcgtattttttgatctgccaaccgaaacccgaacagaacgtaaagcagccacccgtttccggaaaaatttactggatgatggctttgggatgttccagttctctatttatagccgcttttgtccaagccgggagaatgcagaagtacatataaaacgaaccaaaaatgccctgccaaaaaagggaaaagtggcggtaatgcaaattaccgataagcaatttgggatgatcgagttgttccatgggcagaaagaagctgaagtggaagtaccagtacagcagttggaacttttctgaaattacttgacatcccccgaccgaaaggtgggttgtatgagatttctcactccacttcgctgcgtgtcgaaatgacatactacttccacattgatgttagaggaaaattttatttgtccaggttagaaacaaaaaaggaatttgtgagggagtcgttacgattaaatatctcctcattttttaatcctaataatgcagctaagaaacaggataccagctttttatggcgggtatcctgtgaatcctagttaaaaatacaattctgaaagcaattcacaacttaccacgatgattgtgtaaataaacacttcctgtgaatcctagttaaaaatacaattctgaaagcaattcacaacgaactacgctcgattctttttcaaaacaacctgtgaatcctagttaaaaatacaattctgaaagcaattcacaactctggccgtgtgcattattgagccgaaactcctgtgaatcctagttaaaaatacaattctgaaagcaattcacaaccaaaaacttggggtaaaaaaaagcttcgccctgtgaatcctagttaaaaatacaattctgaaagcaattcacaacgtactttacagagattaatttaaaaaatgacctgtgaatcctagttaaaaatacaattctgaaagcaattcacaacttctcattatcaaggcatccatcttgtctgcctgtgaatcctagttaaaaatacaattctgaaagcaattcacaacttgccagacaaatccgaaggaacatcaacccctgtgaatcctagttaaaaatacaattctgaaagcaattcacaacataaagaaagaacaactaaaataaacaacacctgtgaatcctagttaaaaatacaattctgaaagcaattcacaactggcaaaagaaggtattaaaaaagcatttgcctgtgaatcctagttaaaaatacaattctgaaagcaattcacaacttgtattggcctgtccaggcaatgatatgccctgtgaatcctagttaaaaatacaattctgaaagcaattcacaactaatcgtttaagacaagagtataaagatgacctgtgaatcctagttaaaaatacaattctgaaagcaattcacaactatgaggatctattgatttttcctgcataacctgtgaatcctagttaaaaatacaattctgaaagcaattcacaactataagctttggttgaagcataatttccttcctgtgaatcctagttaaaaatacaattctgaaagcaattcacaaccttggagcagaaaaagaacttttagaccaacctgtgaatcctagttaaaaatacaattctgaaagcaattcacaacccccaatctcacgtgcttactcttgcgtgccctgtgaatcctagttaaaaatacaattctgaaagcaattcacaactttggaaggttctggggatttagattcatacctgtgaatcctagttaaaaatacaattctgaaagcaattcacaacatggtagaccagttcttttgattaagattacctgtgaatcctagttaaaaatacaattctgaaagcaattcacaacctaaaccattcgcagtggtaaagaggttttcctgtgaatcctagttaaaaatacaattctgaaagcaattcacaacatgttttatgtaatgctgcaccgtttggcccctgtgaatcctagttaaaaatacaattctgaaagcaattcacaactaacggtagctgcagtaatagaacaaccccctgtgaatcctagttaaaaatacaattctgaaagcaattcacaactgccttattggtttttagataaaaaaaaagcctgtgaatcctagttaaaaatacaattctgaaagcaattcacaactattggattcatattatacgtcgttagagacctgtgaatcctagttaaaaatacaattctgaaagcaattcacaacctatgatacaactaccaaacaactgcagttcctgtgaatcctagttaaaaatacaattctgaaagcaattcacaactcctctgggctcagttttttaatgggcagcctgtgaatcctagttaaaaatacaattctgaaagcaattcacaacgacaaagaagatttagatgcgctaaacgagcctgtgaatcctagttaaaaatacaattctgaaagcaattcacaactacccattgtagtgaaatttgcatctacagcctgtgaatcctagttaaaaatacaattctgaaagcaattcacaacatatgccacaccaatactaccttcaataatcctgtgaatcctagttaaaaatacaattctgaaagcaattcacaacatatctgggttcgttgccatcatgttgaatcctgtgaatcctagttaaaaatacaattctgaaagcaattcacaactgtcaactgcaacgccccacgccctctaaacctgtgaatcctagttaaaaatacaattctgaaagcaattcacaacgcttaagccatttcataaagcgtttataatcctgtgaatcctagttaaaaatacaattctgaaagcaattcacaacgtccagcgatatcttaccggcaaccattaacctgtgaatcctagttaaaaatacaattctgaaagcaattcacaacagataccaaagcaactagatacggaagcaacctgtgaatcctagttaaaaatacaattctgaaagtaattcacaacatgcaattagaaacctgcaaagattaatttcctgtgaatcctagttaaaaatacaattctgaaagcaattcacaaccaccacaactttcgctgtatatgattagtgcctgtgaatcctagttaaaaatacaattctgaaagcaattcacaactactatttctgaatccattaatatttctaacctgtgaatcctagttaaaaatacaattctgaaagcaattcacaacttgagaagatacaaaacaaaaggctttggacctgtgaatcctagttaaaaatacaattctgaaagcaattcacaacggataattatgataacaacctatttaattcctgtgaatcctagttaaaaatacaattctgaaagcaattcacaactatcaaaatggaataacgcaatagaaaaaccctgtgaatcctagttaaaaatacaattctgaaagcaattcacaacttcattgggctggggttatatttgggtttcctgtgaatcctagttaaaaatacaattctgaaagcaattcacaacatatctgggttcgttgccatcatgttgaacctgtgaatcctagttaaaaatacaattctgaaagcaattcacaacatgaaagcattttatcaagatcaaacaaatcctgtgaatcctagttaaaaatacaattctgaaagcaattcacaactttcaagcatttctgcattcgcaacccttacctgtgaatcctagttaaaaatacaattctgaaagcaattcacaactaaatttcctagtcctgtaatggatatagccctgtgaatcctagttaaaaatacaattctgaaagcaattcacaacttctagcaagtaagtctgctacattttatacctgtgaatcctagttaaaaatacaattctgaaagcaattcacaacctatgttagattattcatagaatcacttagcctgtgaatcctagttaaaaatacaattctgaaagcaattcacaacctacggttatcgcattaaaaatagcagatgcctgtgaatcctagttaaaaatacaattctgaaagcaattcacaacgggggattaatgattaataaataaaaaggacctgtgaatcctagttaaaaatacaattctgaaagcaattcacaaccgtgtgggacatcggatgaaatcacgatttcctgtgaatcctagttaaaaatacaattctgaaagcaattcacaactcaaaatcgtatttgccaaaccctcctaggcctgtgaatcctagttaaaaatacaattctgaaagcaattcacaacataattgaataatatttgatttctttatttcctgtgaatcctagttaaaaatacaattctgaaagcaattcacaacaagcaactttggaagcggatgttgatgtgacctgtgaatcctagttaaaaatacaattctgaaagcaattcacaacaaatggatctaaatctaaatctgtttgatcctgtgaatcctagttaaaaatacaattctgaaagcaattcacaaccttaatgaaaatgctatctcctttacccagcctgtgaatcctagttaaaaatacaattctgaaagcaattcacaaccctccaagtgccttggtatttcccaaagtcctgtgaatcctagttaaaaatacaattctgaaagcaattcacaactacagtttccagcgacagccttgttatccccctgtgaatcctagttaaaaatacaattctgaaagcaattcacaacaatcaataatatggaattggcacttgtaagcctgtgaatcctagttaaaaatacaattctgaaagcaattcacaacacattattaataactataaacattaacagccctgtgaatcctagttaaaaatacaattctgaaagcaattcacaactagaaaatatggatgattctatgaaacaatcctgtgaatcctagttaaaaatacaattctgaaagcaattcacaaccaagaatggctcgaaacaaacgcccgtggcctgtgaatcctagttaaaaatacaattctgaaagcaattcacaactaaacattatggcaacaaaagctaaagaaacctgtgaatcctagttaaaaatacaattctgaaagcaattcacaaccacgatattgttgatgcgtcagttagaactcctgtgaatcctagttaaaaatacaattctgaaagcaattcacaaccccgatagtaggctacaaagacccgaattccctgtgaatcctagttaaaaatacaattctgaaagcaattcacaactcttctgggtacactcctaacataaatctacctgtgaatcctagttaaaaatacaattctgaaagcaattcacaacctacacgctaacaatatcaatttagatattcctgtgaatcctagttaaaaatacaattctgaaagcaattcacaacctattgcgttgctggcaaattcgatatctcctgtgaatcctagttaaaaatacaattctgaaagcaattcacaactactattaatatttcctttttaaaatcaaacctgtgaatcctagttaaaaatacaattctgaaagcaattcacaaccttgcatatcctctggtaattcagattcaacctgtgaatcctagttaaaaatacaattctgaaagcaattcacaacacatttaaggacgattccattaatttattacctgtgaatcctagttaaaaatacaattctgaaagcaattcacaactgccaaaacatgagcattttgtatgctgtccctgtgaatcctagttaaaaatacaattctgaaagcaattcacaactgccaaaacatgagcattttgtatgctgtccctgtgaatcctagttaaaaatacaattctgaaagcaattcacaacctggaggaggtgttctagaaccccttcagtcctgtgaatcctagttaaaaatacaattctgaaagcaattcacaacttatccaagccaacgcaaaacaactaaaatcctgtgaatcctagttaaaaatacaattctgaaagcaattcacaactactggcttcattgctgatagataccagggcctgtgaatcctagttaaaaatacaattctgaaagcaattcacaacaacccattgatggaggtaagtaaggtgtgacctgtgaatcctagttaaaaatacaattctgaaagcaattcacaactaaggcttcatcgtaagaagagaatacttgcctgtgaatcctagttaaaaatacaattctgaaagcaattcacaacattacccaatctgctctactcaattttattcctgtgaatcctagttaaaaatacaattctgaaagcaattcacaacgttgccaacgtacttgtatatggtatgttcctgtgaatcctagttaaaaatacaattctgaaagcaattcacaacaaattcagtgatgttactcattggaccaaccctgtgaatcctagttaaaaatacaattctgaaagcaattcacaacccgtttgctatgctatatcttttccacaaacctgtgaatcctagttaaaaatacaattctgaaagcaattcacaacccttggcagtagatgtggattacgatgtttcctgtgaatcctagttaaaaatacaattctgaaagcaattcacaaccgtttgctatgctatatcttttccacaacctgtgaatcctagttaaaaatacaattctgaaagcaattcacaaccagcagaaactaaaagagcagctgcagcttcctgtgaatcctagttaaaaatacaattctgaaagcaattcacaacctataacatatcctgcaccaaaagcagctcctgtgaatcctagttaaaaatacaattctgaaagcaattcacaactcgtctgtcgcgttaattacataggcatttcctgtgaatcctagttaaaaatacaattctgaaagcaattcacaactaacgaaccctttaataacagtagctttaacctgtgaatcctagttaaaaatacaattctgaaagcaattcacaacataggaacatcattccactcatatagagttcctgtgaatcctagttaaaaatacaattctgaaagcaattcacaacgtaccgcattttgttttgcttaccgaaatgcctgtgaatcctagttaaaaatacaattctgaaagcaattcacaactcacattgaacagtgcaatgggatattcaacctgtgaatcctagttaaaaatacaattctgaaagcaattcacaactatgaaaggatgaaagacaaattaaataatcctgtgaatcctagttaaaaatacaattctgaaagcaattcacaacgatcagcttagaggggaaccaaagcctgaacctgtgaatcctagttaaaaatacaattctgaaagcaattcacaacaccaaaatcgaaaaggtttcagtagaaaaacctgtgaatcctagttaaaaatacaattctgaaagcaattcacaactgtggtacctaataattgaaacctactatccctgtgaatcctagttaaaaatacaattctgaaagcaattcacaacgaacgagaacgcggtcaattaaaccgcaacctgtgaatcctagttaaaaatacaattctgaaagcaattcacaactaccggcagcggcaaagctgcaacaatcagcctgtgaatcctagttaaaaatacaattctgaaagcaattcacaacccctgccgccttagcggcacactacgtaatcctgtgaatcctagttaaaaatacaattctgaaagcaattcacaacatagttgtctatgtttgtttcatcgatctccctgtgaatcctagttaaaaatacaattctgaaagcaattcacaacttattggggatggttctaatcatgtaaaccctgtgaatcctagttaaaaatacaattctgaaagcaattcacaacataccaatcagcactaaaagaaaaattgccctgtgaatcctagttaaaaatacaattctgaaagcaattcacaacatatatactattgataaagtagtatatcatcctgtgaatcctagttaaaaatacaattctgaaagcaattcacaaccctttgaggagcaaggcttccagcatattcctgtgaatcctagttaaaaatacaattctgaaagcaattcacaacggtgtagcacaaggtgcttcatggacggtacctgtgaatcctagttaaaaatacaattctgaaagcaattcacaacagctgcaggcacctttattcgttcctaagtcctgtgaatcctagttaaaatcaattgcatgtcgataaatatataaaatttcgacatatatttgtaatatgtcgatgctctcgacataattgtttttaaatgtcgatgctatgtataatcccgaagaaccaaataacaaactaccactattgcctccaaattttgatgtggaaacaaaaaatattttaaaacaggcaatagcttccaataaaattttagcagaattaaaggggcgtgcaaatgaaatccctaaccagtcgatgcttataaatgccattacgcttcaagaagcgaaagacagttccgaaattgaaaatatagtaacaactcaagatctactatataaagctttatcttcaaatatttcttcaactgatgcacaaacgaaagaagttttaaggtatcgtcatgcactttgggagggctatagtaatttaactaaaagaccactatccaccaattcttttattgagattgtacaaataataaaggagaacggatctggtataagaaatgctccgggaactaccatcacaagcaataacaaaacgatttatactccgccagaaggtgaagaagtaattcgaaatttattaaagaacttagaagactttatatatagagaagatgatatagattctcttattaagttggctataatgcactatcaatttgaagcgatacatcctttttttgatggaaatggacgaactg

SEQ ID NO: 2159 - DNA, 24233 bp, synthetic construct
  misc_feature 1..24233: note = Synthetic
  source 1..24233: mol_type = other DNA
aattatggacgataccgatcccgcactgataggcgccagaaaacagaataccccttttcacagcgccaatatctggcagaaatacagctttggagactcttcttttctaaaagatattgcggtaggagtgggcattcagtacagtggcaataaagtgccgatgtataaccgctcatttttggttcctgaatacaccctctttgatgctgcggtgtattataccccaaagcagggacccgtgagaatatctctcaatatcaacaacctttttaacacgacttactggctgggcgcacaaaattatctccgtctgtttcccggagctccgagaaatgcaatgctcacagcaatctataaattttaaatctatgaatatgagaatacatattatacgtctgatttccatacagctttggaaacagtcattacagaacagagcagtgatctttcttctgttcattctgagtgtgctgtttgcatttgcagcctacacaggctggaaagattataaagtgcaggaagatatcagagttaaacatcaggtagatgtgcgccagcagtgggaagaaaaaccggacaaacatcctcaccggatggcccattacggttatttgattttcagagcaagatatcctttaagcttttttgattatggtttggaacggtatatgggaaattcagtatttctggaagctcataagcagaataccgttaatttttcagaagcgggattttcatccggcatgctgcgtttcggggaggtaagtacggcaatgatcctacaaaccctgattcctttatttatatttttcctggggttcagctgtatttcggcagaacgggaaaacaatacgttgaaagtattgctcagtcagggagtccgatggaaagaactgctggcggggaaaatactgggacttcttggactggtcagtcttgttttcgtacctgtcatgatgctgtctgccgttatgtggttttctctgatgggttttaaaagtaccactgatgaatttttacgccttttttggatagcaacagcttattttatctacttttttattgtgtgcagtgtctgcgtaatggtttctgccataagcaaaacttcaaaatcttctttagtcaggctgattggtttgtggcttttgtttatcgttattattccgagaactgcgcaggctttcgggggatatctgtatccggctccgtcaaagatcgattttgacaccaaagtggaaaatgagctggtaaaaaccggagacagccacaatccgaatgatatctattataaaggaataaaagattctcttctgcaggcttatcaggtgaaaacagtagaagaactgcctttcaattatagcgggtatatcatggcggaaggagaaaagataagttcaggaatttataataaacactggcaaaaacagcttgatatttatgaacaacagaacagcgtgaaccgttcactcgcttttgttaatccttttcaggccgttaaagacctgtcaaccgcccttacgggatcagattttaattcttatatcagctatcaggaacaggtggaagactacaggtaccaactggcccagctgatgaataagctgcagatggaaaatatcagcaataaaaagcagcaggcagatgataagccctataccataagcagagatcactggaaagagcttcctgatttccgttatcggttcattagtcagacggatctgtttcagaatgaaatcgcatccgtgctttcccttctggtatgggttgtagggcttcttattatccttcattttatgtctaaaacattaaaaataaattaatcatgtaccttttattatttaagaacttcattcgttcccagtctgcctatctgggaatgctgttcctgttattatcaggactcgtcagtatttttgtgggaaggcagtttgtagataagcagaaagccaatattgagcaaacagcagtgtatcagaaggagcatattcagagatatacgggatatatagaaaaagatctgggacttttgctgtattatctcaaatttggattggtcaatcatacagatcctttgaatgcattatcaatcgggcagagagatgttaatccttccatccggagtttgaccatccgaaatctggaaggacagaagtatgataccgatcttcagaatcctgtcagcctgcttttggggagcttggatcttggttttgtgatcatttttctgtttccgctggtgattatttccttctgctataatttgctgtcggaagaaaaagaagaaagtacatggattctcctgtctgtacagtcacaaaagcctttcagaattctgtttaaaaagtttgtggtccgttttaccgctattgccggggttttgctgttgctgatcattctggcggttcctcttttgaatttaactattaatggagcactggcaggttttgttttagtgtcgctcttctatattgttgtatggttttctttaagtttctgggtcgtttcctggaataaaagttccagagcaggggcagcaggtcttttgtctttctggattaccctgacgattatccttccggctgttctcaatcattttattttaagccgatacccgattccggaagcattggataccgccatcgggcagagggaagcttatcatgaaaaatgggataccgatcagaagccgactttggaaaaattttataaacactatcctcagttccggtcttatggctttccgaaagaaagtttccactggctttggtattatgccatgcagcagatgggagatgatgaatctaaaattcagtcggatcagctgaaagccaagctttggaaaagagaagaaatgagccggacgctttcttactttgttccggggctgcacgtacaggttcagttgagtgatcttacgggttccggactggctgatcagttgaggtttatacaggcagcagaaaggttccatgaaagtaaaagacttttcttttatcccaaaatcttctcgaatgaacctacgcgaagcatcgattggaatcaatttcagctggaatattataatgaacgtagcacaatccattggttggcgatgctgggtccgctattgctgttcagtttgttgttttatttcatgggaagcatcaatttcaggaagcagacggttttgtaagattgtcggtttgaagcatacttttttgtattttaggaggtatgaaagtcaatatactgttagctgctttattcccggtttttattttcggacagcgatatatttatggggtggaatgtgtttttaaatcgctgaaaaccacctgtattaataatgagaaattgatttctgagatcaaatttcccagctctgataatgggtttgtgatataaaaaccagttgccatatacggaagatttgaagacctggaaagaatccggttgccccgattttttgaagccaatacagttgattttaaatgtgaggaaaaagtgcagtttgaaacaagctatgacggaaatttttattatgcacagaagaaagaagataacagaaagctgtatttcattaatgatggactgaatccggtatacagaggtacagaaaagatagaaagtttctctcccgataaagtcagccccgatcctaagaataagtatctttccttctacagaagcgacaaagaaaatgatccagactatgaagttcggtattatctaaaggataaaaacggtgatgtggcttattctttccaccagagaggaaatgaatttgatgaatatacctacgaatacacagaacacaattacgatcgggtactctcgtcagtttataaaaacgatattctgtttgaagaatatcagtattttgatggtgatgaaagttataaacaagtgataagtcaatatagtgttaatgaatcttaccggttggataagaagcggcatccggttttaaaatcttctgcattttctgacccgcaaaaggcctgcagctgcaatgagggatatatgacggtcatagaattttggaataagaataaatgtacaagacaaatggatgatataatccttgaataatccttataaagagcgaccaggtctaataaaagatcggaatttttaacataaacgtaaaaaatgacggttcggtggaggaaaaaaagaaaaaaatagcatttggaaccaaaattttttatccggagctaggctggaattaccataaaacctatatttgcaccctaaattttaaaaataatgaaagaactaattgaaaaaatcaacgctgaattcgaagcgtttgcaagtgaggctaaccaacaagcagaaaaaggaaacaaagctgcaggtacaagagctcgtaaatcagctttagaacttagcaaattgttcaaagaattcagaaaagtttcagttgacgaagctaaaaaataattcgttctccagccggctcagtgagccggcttttttttgatctgatcttcagtaatcattcgttgtaatttttctcttgaactctgtatttaaagagccactgtgattttttacatggagccacaacattccattatcaaatcaccaaatttccccttttaacgctccgttttcttcttcattcccacaaattcttttatctttaagcattcaatatatgttatgaagataaatagattttttgctgttccggcagttgtgctggctgcccagttctcatgggctcaggtgaaagtagatccgaaagaaaaacttgaccctattgtaaaaagctttgtagatgaaatcaacaacagttctcagcttgaaaatatggcgtatgagcttcttgacggtatcggacctcgccttgtaggaactccggagatgttggctgcgaatgaatggtccgctgctaaactccgttcatggggaatagaatccagccttcagcagttcggaacatggaaagggtggcagcggggtattacgcatgtagatatgacgtatcctcgtgtgaaatcattggctgcaacacagcttgcctggagccccgccactaaaaaagcagtggaagcagaggtggtagtacttcccaaagtttctactaaagctgaatttgatgcgtggcttccttccgcaaaaggaaaaatagtacttatcgcacaataccagaaaataggacgttctgacgagcagatcaaagaatttgccacgccggagctgtacgaaaaactgaaagcagaaaaagaacaggcttccaaagatttccgcgattatgtgaaaaatatcggctatgataataatacgcttcctgaagcattggaaaaagccggagcagccggaatagctatttccaactggacgggaattatgggtgccaacagaatttttggggccaaaacctcaaagatcccaatgatcgacattgaggtagaggattatggaatgctttacagaatggcagaaaatggagctaagcccaagattaaagtagaagcacagtctaagattcttcccgatgcaaaaaactttaatacgataggaatcatcaaaggaaaggaaaagccggaagaatatgtgatcctttctgctcaccttgattcgtgggacggagcgcagggcgccacagacaacggaacaggtacccttaccatgcttgaggcgatgagaatcctgaaaaaatattacccgaacaacaagagaaccatcgttgtaggactttggggcagtgaagagcagggattaaacggatcaagaggcttcgttgcagataatccgcagattatgaaaggaactcaggcggtgttcaatcaggataacggaacggggcgcgtgatcaatatcagtggtcagggattcgtagattcttatagttatattggaaaatggctcaatggagttcctaaaaccgttagagatcagattaaaacagatttccctggaatgccaggtggcggaggttctgaccatgcttcatttgtagcctcgggagtaccgggattttctctgagctctctgaactgggggtatttcggttatacatggcacaccacaaaagacacttacgacaaaatcgtttttgatgaggtgaaaaataatgtggttttaacggctgcattggcctatatggcctcagaagatcctgaattgacaagcagagaaagaagagtaatgcctcaggacgataaaggcggaacggtacaatggccggaagctaaggaacctaggagggattctaaggagtatagatagtggggatagacgttaaatactagacaccagatatgagacattgggtttgagactaagattaatgttgagattgataggatgattgacccgtaattctgcttttgttataatcctttataatataaaaggccgtacagattattattgtacagcctttgttttttgtaggtaaaggagatttcttatttcctgccttttattttctttaacgatgtaagtcttacagattttgttgttgatattcatgctgaaatgcatctcagtaaattctttttcccatgcatgattggctggtgggacataatctataaacacaggccagaaattggcgagacacaaaaagtttctttttaaagataataacaggctgggaaagtttccaaaatcatcaattacctttattttaaatatagcctttcctaaagtcgttccccaataccattcgcatagactccccgaaataatgacacacggaatggaatacagaaagctgatcattgctatttttccaaacagaaagaagaaaataagaaagaagggcaatatatcaataagcttagcgaaaagtctttctctttcgttgcctttataagtcgtttcgtagggaaaatcatattcaaaagaattataaatcctgtatccaaattcatcaaactgacgggttggcctgtggattattcttctgtccttgagttgtgatattttcatagttctgacgagttcccgacttaattttattaagattcagaaatagaagattaaacacaaaattccagatcagaaaactttgaaacggaaggtttgtaatcttctgtactcagctttccgaagccgtattcacagaaaataaaaggtaggctgttggcttttgcagaatcgtaatcggtctgcgtatccccaatataaactgagttttcaatgcttaaatgatttctttccattatcagccgaatgttctctgccttcggctttttagtccgtccgtgggattcaatgtctgtcaacagatcgttgaactggtagtattccaaaaatgcttcgatatagccgtcctgacaattgctcacaataaaaagttggtgatcttttgctaaattctttaaggtttctgccactccgtcatagagaataccaccttcaaggtgcagggttttgttttcatgttgaatgatttcggaaagaacttcatgaacctgctgatcggaaatgccgggaacgatagctcttaaaatgttatcggccagtaatcccatgtactggtccatatcttcaggcttcaaatccttatcgatcaattggtatttatttaaaacctgattccagattttaatgatggtagctctggaatcccagagcgttccgtctaaatcgaaaattaaatttttatagctcaaaatgtattgttttgggtttattatatttgatcaggtgtgacttacagaatcatgcttagttggactctttttctggcttcgtctacttccgtcacttttacgtgcacatgctgatgaagcttgactacttcattcacatcagagacaaatccgtccttcagttgagaaatatgaaccagcccgctttctttgattcccatatctacaaaacacccgaatgcggtaatgttattaacaattccgggaagaatcatgcctggtttcaaatcccggatgctttttacgttaggatcaaattcaaacactttggccgcttttctggggtctaagcctggtttttcaagctcctttaaaatatctttgatccctaaaattccgatctcctctgtggtgtatttttcaggatttaccaaagctgttttttctttactggcaatcaattcattggttttaatgcctaaatctttagccattttttctacaattccataagcttccggatgcacggcagaattgtccagaggatttttggcattggcaattcttacaaacgctgccgcctgctgataagctttttcacccagtcttggaactttcttcagttgttttctatcttcaaaagcaccattttcagtacggtagttaacgatgttttccgccattttttctccgattccggaaacatagctcaacaatgatttactggctgtatttaaattgattcccacggaattcacacatttcatcaccgttgaatcaagttcgtttttcaaccgggtttggtctacatcgtgctgatattgccccacaccaatcgatttggcgtcaattttcaccaattctgccagcggatctgacagtcttcttccgatagaaaccgctccacgcaccgtcacatcgtaagacggaaactcgtctcttgcgatcttacttgcagaatagaccgatgctcccgcttccgaaaccacaaaaacctgcaaaggcttatcaaaagcaatttttttaatgaaaaattctgtttcacggctcgctgttccgtttccgatggatatggcctcaatatgataggcattcaccatagaacggatttttttcatcgccattccactttcgttctgcggagcgtgagggtagagggtttcattgtggagaaggtcccctttttcgtcaatgcagaccactttacatccgcttttgtaacccggatcaatggctaaaatccttttttctcctaaaggcggagccagcagcagctgactcaggttttcagagaatatttcaatggcctttttatctgctttttctttggcttcctgtaaagcctcattggaaatagcaggttctaaaagccttttgtagctgtctttaatggccatagcgatctgttccgaactttcattattggacttaatgatggctttttctacaaaatcaacggcttcatctttatcaataccaatattcactttcacaaagccctcagattcggctctgagcattgccaaaagcctgtgagaagggattctgttcagattttcttcccattcgaaatattgtgagaatttctgggcatcttcttcgtcttttttagccttgacagctttagaggtgatcacagccttgcgctgaaacagtcggcgaaggtttttacgaacgtacatgttttcattgatccattccgccatgatgtctcttgcgccctgaagtgcttcttcttcagatgaaacgtcactgttcaggtatttggaagccagaaacggcagatcattgcttttctggctcataataatccttgctaagggttccaaacctttctctttggctgtatccgctttggtctttctgcgttttttgaatggaaggtacaagtcttccagctccagaatatcgaagctttcttcaattctctgcttgagttctggacttaaggcattctgttcttcaatcgatttcaggatgctttcctttcgcttgataatttcttcaaactgtttgctgattttagagatctgctcgatctgaacttcatccagatttccggtcttatcctttctataacgggagataaacggaatggtgcagtcttctgcgagtaattgaagggtattgttgatgctcttttcgggtatatcgagctgttgctgtataaaggttacggtcgtcattattttgttttcggatggctaaaatagcatttttggaatgaaaaaaggcgagttgccccgccttgaatgttttcacaacggaataatccttattgtgaattgcttttcaaaattattgatacaaatataagagaaaaattatatagttgatttacggaaaacctcatttttaataatttttttcttgttatttttatttgctttaaaaaactgatacttatgattagaaatattttaggattagacttgggagtttcatcaattggctgggcttacgttcaggaggattctgaaaattctgaaaacaatacaattatcaaactgggagttcgtgtaaatccattaactgttgatgaacaattaaattttgaaaagggaaaaccgattacaaccaatgccggaagaactttagccagaagtgcgagaagaaatcttcagaggtttaagttaagaaggtccaaccttattgatgttttaaagaaaaacaatatttttagagaaaccgacctccttgcagaagttggcaaaaactcaacatttcaaactcaggaactaagagcaaaggcagcaaaagaaaaaatagaactttcagaattggccagagttctgcttcttatcaataagaaaagaggatataaaagcagccgtaaagctaaaaatgatgacgatggacagatcgtagacggaatggctgttgccaaaaaattgtatgaagagaatttgacacccggagaatattcatatcaacttttacaacagggcaaaaaacaactgcctgatttttaccgttcagatttacaggcggaatttgataaagtctgggattttcagaaacaattcaatcctgaaattttcacaaatgaactttatgaaagacttagaggtaagaatagaaatgcaacctggaaagaattagagattccattttctcttgtaggcattaagcagaccggaacgatgcaggagaaaaaatcagaaaaatacttttggagaagtgaagcggtaagaaaacaatcagattttgaaagtctggctgttgtttttcaggaaattaacagtaatctgaataattccagtggttatctcggcgcgatcagtgacaggagcaaagaattgtatttcaataatcagactgttggagaatatttatatcaccagttaaaaataaatccacatacgaagcttaaaaatcaggttttctacagacaggattatttggatgaatttgaaaaaatatgggaaattcaatcaaaatatcataaggaattgaccaaagagttaaaggaggaaattcgggatattgttattttttatcaaagaaagctcaaatctcaaaaaggattaatcagtatttgtgagtttgaaaacagagaaatcgaaatagcagaaagcggaaaaacaaaaaagaaaacagttggtttaaaagtagcaccaaagtcttctccgttatttcaggagttcaaaatctggcaggttcttaataatttacagtttcaaaatatagaatcaaaagaaatttttcctattgatttagattttaaacaatccattttcaatgaagttaatactaagggaagactttcagcaaaagaagttttagatattgttgggtactccggtaaagaatggaaaactaattttaaagatattgaaggtaataataccaatgagaatttatataatgctttcctgagaattatagcaaatgaggggattgaatttccaaaagaatttaaattaactattgacgatgaaattaaggtggctaagatcaattcttctgctgaaactataaaactattcgtcaaagaaaaactatcagaattaggaatcaatacttctattttggattttaatcctgaattggatggaagtgattttgaaaagcaggtttcctatcagctttggcacctattgtattcttatgaaggtgatgattctccttctggaaacgaaaaactctatgaattgttggagaagaaattcggtttgaaaaaagagcattccaaaatattagctgaaattggttttcctcaggattatggaagtctgagttctaaggcgatgcgaaaaatttatccttacattaaggagcataaatatagtgtggcttgtaattatgcaggttatcatcattctaaaaattcattgaccaaagaacaattagaaaatagagttttaaaagagcaattagagattcttccaaaaaattctttacgaaatccagtcgttgaaaagattttgaatcaaatgatcaatcttgtaaacttcttaattgatgagtatagtgagaaagataacgatgggcatattgttaaacatttcaaatttgctgaaatcagaatagagcttgcacgagaactcaaacttaatgcggaagagcgtgctacgatgacttctgaaattaacaaggctactatacagcatcagaaatattcggaggttttgcaaagggaatttgggataaaaagtccttcaagaaatgatattatccgatataaattatacttagaattagcaaataatggctataaagatttatacaccgatgtgaagattgaaagagaaaatttattcacggagaaatatgatatagaccatatcattccacaatcccgattctttgatgacagtttttccaataaagttttagttccaagaggagcaaatcttaaaaaaggaaatttcacggctttcgattatcttgaaattgaaggaaaggaaaaattagaaaaattccttaatattatcaaagagctgtatgataaaggagttattactaaagctaaatatgaaaaactccagaaaaaaggcatcgaaataggcgatggttttattgaaagagatttgcgcaatactcaatatatcgctaaaaaagctaaagaaatactttttggaattaccaattctgtagtttctacttcaggaagaataacagataagcttcgggaagactggaatcttgtcaacacaatgaaggagcttaatctggagaaatacaagaaattaggtttgaccgaaacgatcattaattcaaaaggagaagagaaacaaagaattatagactggaccaaaagaaacgaccatcgccatcatgcaatggatgctctgactgttgcttttactacgcatagccatattcaatacttaaattatctgaatgcaagaaaagatgaaaagcataaggaacatcaaaatatttttgcgattgagaacacaattacaaaagttattgaaaagaaaaacggttcaaaagaaagaagatttattgagccgattaaaaatttaagagttgatgctaaaaggcacttggatgaagtactgatttctcataaagccaaaaataaggtcgttactaagaacattaataaaattaagaaaaagggaagtgtagttgcaaaaacagagctgacaccgagaggacagcttcataaagaaactatttatggacgttcaaaattccttaaaacaaaagaagaaaaaatatccggaaagtttgatctggaaactattcataaagttcagaatgaaacattccgaaatgctttattaggaagattgcaggaatttggtggagatcctaaaaaggcatttacagggaaaaatgtgatttcaaaaaatctgatatttcttaatgatgataaaacagaacaattgcctgaaactgtcagtttagcttggtatgagacaggttatacaatcagaaaagtggttaatcctgataattttaaagattacaaaaatattgaaaaggttactgataaacgaattcgtgatattttaacagaaagattaaaagcgtttaacggaaattctaaagaagctttttccgatttggaaaagaatccgatttggcttaataaggctaaaggcattgttgtgaaaacggttacaattaccggaattaataatgctgaggctttacattataaaaaagatcatttaggaaaagagattttagacgaaaatggtaaaaagatagctgcagactttgtaagtacaggaaataatcatcatgtagctatttatgaagatgcagatggaaacttacaggaaagagtggtgagcttctatgaagccgttgagagagtaaatcaaggccttaccattattaataaagattataaccaagatttaggatggaagtttctttttaccatgaagcaaaatgaaatgtttttatttccgtctgaagatttcaatccaaaagaaattgatttgtttgatgataagaatttgagtttgatttctaagaatttgtttagggtacagaagtttgggtcattactttctgggttttggtttagacatcatttagaaaccagtgtagaggttaattcaaaattaaaagatatatcatataaagtaattcaaagttccaataatttgaagcctattgtaaaagtaagattaaatcatcttggaagaattgttcaagtaggcgaatattaaaattgataaaaatgatcactcgctcaatttatattggcaatccagcctatctcaatctcaaagatgagcagatgaaaatcctatgtcctgaaaccaagacagagaaggggagcgttcctgttgaagatttgggattgctgatgttggatcattttcaaataacaatttcacataaattaattcagaaaatgatgggaaataatgtggtggtaatcagttgtgacaatcatcatttaccacttggaataatgttgccaatttatggacatacagaacattctgatagggtaaaagatcaactggaggccagtgaacctttgaaaaaacaactctggaagcaaaccatagaatgtaagattgaaaatcagaaaaatgttttagtgaaattaggaaactatcacgaaccaatgattgaatatcagagaaatgtaaagtcgggtgatatgaccaatatggaaggaattgctgcacagcattactggaaatatcttattagcctggattttttaagacaacgttttggagattcccccaatcagtttttcaactttggatattcagtgttgagaagtattgtagcaagagcaatagttgaaacaggtttactgcctgttctcggaatttttcataaaaataaatataatccttactgtcttgctgatgatttgatggaaccttatcgcccatttgttgatgtattagtgatgcaatggcttcaaacaaatcctgaaacagaagaattaaataaagagttcaaagcgcatattcttcaaattgcaacgaaagatgtgaagattgatgacaaaataagaccattattggtggctgtaaaaacaactgtaacttcgctttatagatgttacacaggagaaaagcgattaatctcttatcctgaactgatatgaacgccgaaaggtttaatgcttaccgaattatgtgggttttagtattgtatgatttaccgaccgagactaaagctaatatgaaggatgcgaatcgctttcgtaaggctttaatcgatgatggatttacattgtttcagttttcgatgtatgtccgccattgtccaagtcgtgaaaatgctgaggttcatattaaaagagtaaaattcatgttgccaaaagcaggaaaagtggcaattatgtgtattacggataaacaatttggcgatattgagattttctttgccagaaataaagaagaaccgcctccaaccttccaacagcttgaattattctaaattttaaatcctaaaaacaaaaacaatctgctgattttcagtagattgttttttgaggctgtgactaatcacgaagataataatttttgaaagcaattcacaacagaggtgcaaatcttagaggtgcaaatcttgctgtgactaatcacgaagataataatttttgaaagcaattcacaactaaagatatttggctttaattcagtctccagctgtgactaatcacgaagataataatttttgaaagcaattcacaacacgttggaagaaagctttcatttgcgctgggctgtgactaatcacgaagataataatttttgaaagcaattcacaactttccatcgtgtgccagataatttgtcaaagctgtgactaatcacgaagataataatttttgaaagcaattcacaacatttccctgatctggataataccttcaggagctgtgactaatcacgaagataataatttttgaaagcaattcacaaccggtttgattgttaaattctttgattaactgctgtgactaatcacgaagataataatttttgaaagcaattcacaacagttttttaattgtgggtgtgaatcaaccggctgtgactaatcacgaagataataatttttgaaagcaattcacaacgttatctataaagcgggcccagttttcgtagctgtgactaatcacgaagataataatttttgaaagcaattcacaacgttcctacaactgagttgttaggaatgcctgctgtgactaatcacgaagataataatttttgaaagcaattcacaacattacttttggccagaattccaaaatatcggctgtgactaatcacgaagataataatttttgaaagcaattcacaacttaatagcttttatgattgtttggtcgagggctgtgactaatcacgaagataataatttttgaaagcaattcacaacagcaacgtataagtgagtcagcagcccgaagctgtgactaatcacgaagataataatttttgaaagcaattcacaacgtaagtctgcaccggttcatcgcaggcaaagctgtgactaatcacgaagataataatttttgaaagcaattcacaacgcaccactaagccttgcttgctacccgtctgctgtgactaatcacgaagataataatttttgaaagcaattcacaacgtctgatggatttggatttaatcattccacgctgtgactaatcacgaagataataatttttgaaagcaattcacaacaaaatcatcgatgttcaattagaaaactaagctgtgactaatcacgaagataataatttttgaaagcaattcacaacctacatgccggagaacctggcggagtgtgagctgtgactaatcacgaagataataatttttgaaagcaattcacaacggcttggactggctggaagaaaatggtaaagctgtgactaatcacgaagataataatttttgaaagcaattcacaacctacatgccggagaacctggcggagtgtgagctgtgactaatcacgaagataataatttttgaaagcaattcacaacggcttggactggctggaagaaaatggtaaagctgtgactaatcacgaagataataatttttgaaagcaattcacaacaagaaagttttgaatttctttcagatgtttgctgtgactaatcacgaagataataatttttgaaagcaattcacaaccatgcaatcaaattcaccctccacaatagtgctgtgactaatcacgaagataataatttttgaaagcaattcacaacaaaaattcttcaattgttaatttattgtatgctgtgactaatcacgaagataataatttttgaaagcaattcacaaccctaaagtatatcctgatctactcaacatagctgtgactaatcacgaagataataatttttgaaagcaattcacaactattaagtacttttcaaactttgacggccggctgtgactaatcacgaagataataatttttgaaagcaattcacaacaataatataagcaaatcagcaactccaatagctgtgactaatcacgaagataataatttttgaaagcaattcacaactatagagtttaattatgaagacacgttttagctgtgactaatcacgaagataataatttttgaaagcaattcacaaccggtagactaccgaatactattgacgggcagctgtgactaatcacgaagataataatttttgaaagcaattcacaacataaatactgaacataaatactgaacataagctgtgactaatcactaagataataattttggaaagcaattcaaaataaatatcactcttactctgcacctaaatttatttgattaaccgtagagctatgatagatgcaaatagctaaaatacgcaattttagagaggattgaaatgctatagattttcttttttctcaatatttcatattgtataacggaaggaaaatatgaaaaattctatttcttgatgtatggtaaggtgataattggtgaggtttttatatttttgaatcctgaaatttagtattttaattaaattttttaaaacaataaataatatgaaaaaacttagtgtaattgcattagtaggagtaggattgcttgcagcatcatgtaataaagacaaatcagcaggaactgcatctacagctacggagcagacagtagctgaaagtaaaggtgaagtattgccagtggatgttgctgcttctgtagtaaactggaaggcttttcacaaaggtggaatggctcctcgttggggaacacttaacgtaaaatcaggagatttaagcgttgaaggcggtcagctttcagcaggaaacttcgtgattgatatgaattctatcaaagtagatccggcttcagtaaccgaaaaagataaaaagcccggagatttagaggctcaccttaaaaatcctgatttctttgacactgcaaagaatccaacttcagatttcaaaattacaagtgttacagatttgaaagatgcgcctaaagatgctgttgcaggagctaataaaacagtaagcggaaatcttacattatcaggaaaaacaatgaatgtaactttccctgctaaagtagatgttacagatacttcagcttcagttcaggctaaatttacagtaaacagagccgattgggggatcaagtttggtacttcagaaacggatccagcagaatggatgatcagcaaggatatcgaaatcgctgttgacgttaaagctaaaaaataattgttagatacaaatacagagagctgttttcttatgaaagcagctttttttatgaaaattaaggtattgtaaacgggtaaccaattcactatttttgcatcaatgatctatattttacttatcataaaccttttcaccttcgttatttttggctgggacaaaagactttccattcaacataagagaaggatttcggaaaccacacttttaggattggcaggtattggaggaaccggaggtgcgcttttaggaatgcttattttcaggcataaagttgctaaaaaatcttttttgctgaaatatgttggagtggttttggttcaagtgtttctgatctattgttattttaatgtttcatatatttaagataaaaaactcccgaaagggagtttaataatgcttataaagcatatactttgctttcaaggaaggcctttgcttcaatagagtggtcaaattttactacctgataggctgataactgtaattcaaccggggcgaaagcagaaacatccagaaagaattctaagtttggattattgggatctgcaaccgcataacacactactgtctgccatttatttttgacggtaggttgatactgcatgacctgatattgatttctgtcccataagaacaatataggatctcctgaatttacttttacatcaaaggtgatcacataccaaccaccagcactgttatttgtactcactacactgttttgtaatcccatatattttatttcatagtttggatctccacccgaaggaagagtagggaaagggatgttaaacttgttggaagacccaaaaattaatgcatcatttacaagagttccttgtatgggtgggaaagatcccgttagagtttcttcagtttccattgttacagattttatcttgtttttgatgtctgtaactttgttaaatcttgctgtactgatagcaggtcttataagagaagcgttggtgtcactgttgatatatagttgtctgttgtaatcataactatctgccataatgacattatttcctgtaggaagaccaaatatggtgatgggacgataaagtatcagatagctgttattgccaacagcacttgactgcgcagcccctacaccttggctacattccgtatagcagttggttgctttcacaattatattatccccgttgatataataatcagaaatccatgaattgtaaacgttgcaggtaaagctttttccttcaaatatatgagtatggggaggaatcatcttttcgccttttgttgtaccggaccaggtatcaatagtcacgggattagaataggttgaacttccagacgcttcattccagcacgaatcaataacaattggaatgatagagttattgtcattgtaaacatacgtattgatgtaattaaactcaaatatcacattgttaaacgtaaccgcaccaaatccctgagttgtattatgaatataaatgcccacttcatttttagaaatttcaccgctatagaaatatttatttcctgcatgcatagtttgggaatcattaccaaatttattatcaagaaagtacattccatatttgttatcatgtattcctacagaataaaaatcaatcccaatattgccgaacaggcactgcaggcctttattcaattttttaaaatctacatttctgaaagtaatgttactattattttcatcgttggcctcatattctgacgtcttagcttttgccatactgactccgcatcctttttgatcttctcctaaaaatgttaattcttcaactattgttgcatattgccagaatggatccaggtttttgcttaagatcataatgggtttgtcttcattataaggtctcaaaaaagtagccccactgcccgcaccaaaaattttagctttatgttctacattaatattaatacggtaaatgccggcaggaaaatagatgttcttttttactccacatgctttttgtaccgccatactgtcatcaacactggctaatccttctcctgttgcaccaaaccacttaacgtttaccgtatcatcaatcaatactctacgataaaatttattgtttacctgcttataaataatatcatcacaatcactcgctgtgatcggtactggtgaagtaaaaggattgatatcatcatacttatatacctcttcttgaaaaacagtccattctccggtatactgatcatttaattcgattgttgtcatttttttgttttttgatgttaataaattttgtttcctgcaggaaaactactgaagcaaagataaatgcgggtaacgacagaacttgacgtatgttattttatctggtttttttgatgactttacttaaatttctcattatgaatttgttaattaatatatattcttgcttattattcattggaaatcactatttttgcacccgtaaaaatcattcatgcaaaacattagaaatattgcgattatcgcacacgttgaccacgggaagacgactttggttgacaagattattcatgctacaaacattttcagagaaaatcaggaaagtggagaattaataatggataataacgatcttgaaagagaaagaggtattaccattctatctaaaaatatttctgttacttataaagacgttaaaattaacgtaatcgatactcctggtcacgccgattttggtggggaagtagagagagttttaaaaatggcggacggagtaattttgttggtagatgcctttgaagggccaatgcctcaaacaagatttgtacttcagaaagctcttgaattaggacttagaccattggtagtaatcaacaaagtagataaaccaaactgtcgtcctgaagaagttcatgacaaagtatttgatttgttctttgcccttgaagcgactgaagagcagttggatttcccaacattctacggttcttctaagcaaggttggttcaacacttcattagagcaaacagaagatattttcccattattagatggtatcttacagtatgttcctgaaccgaaagtggcagaaggaagcttacagatgcagattgtttctcttgacttctcttctttcttaggaagaattgccatcggaaaagtaatcagaggagagatcaaagaagctcagtggatcgggttagctcaggcagacggtaaaatcctgaaaggaaaagtaaaagaattgtacgtctttgaaggattagggaagaaaaaagtgtcagaagtaaaagcaggagatatctgtgctgttgttggtttcgacgcgttccagatcggtgattcattcgtagatcttgaaactcctgaaccattgccaagaactgcaattgatgagcctacgttgaacatgacgttctctatcaacaattcacctttctttggtaaagatggtaaatatgtaacttcaaaccacctgaaagaaagattaactaaagaattagagaaaaaccttgcactaagagttgaacaaactgatgatgccaacactttcttagtattcggtagaggtattcttcacctgtctgttttgattgaaacaatgagaagagaaggatatgaaatgacaattggtcagccacaggtgatcctaagagaaattaatggtgaaaaatgtgagccttatgaatctttggtagtagatgttccggacgaatatgcttctagagtgatcgacttagctactcagagaaaaggtgatcttcacgtaatggaaactaaaggagagatgcagcacatggaattcgaaattccttcaagaggtttgatcggattgcgttctcaaatgttgactgccactgctggtgaggctattatggcacaccgtttcacagaatataagcctttcaaagggactattcctggaagaagtaatggagtattggtgagcaaaactcaagggccggctacagaatattctatcgctaaactacaggatagaggtaagttctatgtagatccgggtgaggaaatttacggaggtatgatcatcggtgagcaaaacaagcctggtgacttggtcatcaacatcgttgaagcaaaacaattgaacaacatgcgtgcttcaggtaaagataaagataccggtgttgctccaaaaatcttattctctcttgaagaatgtatggaatatattcagggtgatgaagcgatcgaggtaactccaaactttatccgtatgagaaagaaaatcctttctgaagaagaaagaaaaagagtagaaagatcagcgaaagcttaagaaattcttatatcatagaaaagcctcgaatttttcggggctttttttatcttaaaaaaaataaaatttatattgtgcatgatttaattgatttctaagaatgatttttatttttaatgataatatggtgatttttttttatttaacaccttaatcataggtaatttatattttttaaaataaatgcttatgctagctattagttaatttagttgttaaattgtttgcttaagttaaaatagtttatatatttgtaatctaatcctaaaatttgttacaaatatgaaaaatttaaaaaaaatttcgagaattcaattaaaaaacattactggtacaggaggagatcttgatgaagcttgctgtgaaggtagtgatggcggaggtagtggctgtaagcagtgtgtatcttgttctaacagacaaggaagccaatcttgttatacagatccaaatggggattgtccaaaagcgttgagcatggcacgtgcattatgttagaatagtaatctactaatgtttaaatactttattttttttctttttttaattcaatattcttattctcaagagtatagggtgatttataatttcagttataaaacagactcactgaaagaaggtagtgatagtatcgaaatggttcttgatttgcagaaggattattcaaggttttattacaagaaattaattaaactggattctttggtgaaaggaggagctataatttcttatgcttttcccatacagcaagtaataaaaagaaaaataggttcttttaataatgaaaacttcgtgagtttagaagacaaatattataattacccttctgctgatgatatcaagtggaaaatattatctcaaactaaattctcaaatcattacaaattacaaaaagctgaggccaaatggggtggaaggaaatgggaagcttggttctcttcagaaataccaattcctgaaggaccatataaattcaggggattaccaggattaatatttgaagtcacagattttaaatataattttagttacaaattaatttctattgataaagttgtatcaggatatgatactgccaatattgttgaatcaaatctcggggtaaatccaataataattactttaaaacagtatcagaatttattaataaataattataataatccgtatagtgaattttatacgatgaaagaagggacttggggattaactatttttgataaacaaat

SEQ ID NO: 2160 - DNA, 24233 bp, synthetic construct
  misc_feature 1..24233: note = Synthetic
  source 1..24233: mol_type = other DNA
acggacaaaatgttgaaaaaacggttgccaacagaagcgatcaggtgggaagaaacctgatggatcatatggtaatgcttacttggggattatttccggatcctgtttattcttacagaggtcccggttccacaaccaacatttcgtctttccgtgacggaaatttcagaagcgaattttctgcgtggatttctcctcttgacaactggggatggagctggccggcttcttctcctggatcagatctttcagattttttaaatgacgggcttttcggagaagatctgaaggaagccttaacacacagactttccagacaggtgcttttccattttgagatcgagcagcttccgaatccggataacagagtaactattaacgaccagtatctggatgtattgggaattccgcgtcctgttatcaattacgggcttacagaatacgaaatgagagcaatggagcaggcaaaattagcttcagaccaaatgtttgcaagactgggtattgaagatttcaccaaatacaatgcgacagacaataatacttttgtatataataatgtaagatattcttataacggagccggacatattgtaggaacccacagaatgggcgacaatccggacgattctgtaacgaacagctattgtaaatcgtgggatcatccgaatctatacattgtaggagccggaaatatgacaactttgggaacttccaaccctactcttaccttatccgcatttaccatccgttccgtagaatctattctgaaagatctggaaaacatattaaaatagaaaacatgagacaaagactaatcaataaaacagaacctcaggaaaacagcagtcttctaagaagttctttagataaaaatatcatcgtagacgaagccatttctttgcagtcattattatttgacaatacaaacagtaaagaaaactggattgaaggaataaaataccacagtaaaaatgtaaccaatcttttgcttaacaaccagattgatgcgtttaacgaatatattagatcacaatttggcggtgaagttccggaaattaatcctaccgcagatttctccggagaaaaggcgtttcaggtaaaaaaaggattagagaatctggattaccgcccgattttacaggatttgcttcagactgcgattttaatcgagcattccacaattcctccgtatttaacggctttatattctattaaagacggaacgaatattcttccttcacagatcatccgaagtgtagcggttgaagaaatgcttcacatgattatggtttgcaacgtcatgaacgcagtaagcattcagccttcggtaaacagaccgcagaattatcctaattacccgatgaaactgccattgaatgtggatttctacgtaggtctggaaacgttctcatccaacagtattgctacatttattgccatcgaaagtccgagtaatcctttggtaaaagcaccgaagtacgattacgatgcacaaccggaagccatgttttcaaaaagtgctgttcaggaggataatttctggactctggaaaacatgaaggatttcatcatgaaaaatgttcatacgattggagaatattatgacgtggtgttcttttacattgtggtgttccagatcatcgcctattataaagcaaacggaaaactaccgcagacttttgaagaattaaataaaggcggaatttttaccggagatcccgcgaaacagatccgtccggaacaatactatggaagcggcggaaaactgtatcctgttgatgcattagaaggcgttattcttgtttttcaggaaattaagggacaaggagaaggcgcggatgattctattttcgatgtagatccttcacagtttgaggaaggtgcggaactggctcattatttcagatttaaggaaatttttcatgaacatttttatttagggggagattacagaccgttcaccgacgaaaacggaatgatgcctgtaaccactccaccggttggaaaaccgcttcctgttgactggaacgcagcctatccgatgaaaccgaatcctaaaatgtcagattaccagtcgaatccgcagttatttgaacagggaaaacaatttaatattacgtataaaaagttattggatgcaattcaggctgctgtagaaggacactctgaagaactggcaaaatccatcatgtatatgtatgctttgaaagaacaggcaatcggattgatgagtcagccattgacttcccaatacaatgcaggaccaacttttgagtatccttctaattaataaccccaaaaaactaatatatcatgttaaaaagaaaaaaagacggacttgaggaaggtcaacttttaagaacctcagcagaaagtacaaaaggctatttggcaacgcttatggatgggtattccaaacttttgatagacgatccggtaagaccttttagagaagaaaatttagcagaaattgccaataatgttgattatggaattttagcagctctggaaggaacatgggtgagctacaatgccaattataatcaggacataaaaagaccatcattaggaagcggaattcatacaacgattatgccttctccgggaactgatcaaaatacaattccgggaaaattcagttttgatacggaagaatacattgaaaaactgactttcgaaatcgttccgggtggtgttcgtaatcgtggaggcgcgagtgaattgttttgtggtgcggtaaaatatgatcaaaccattaaaagtgtaaataaagttgaagggaaaccggatttagaatacgcaggaattcacgaagaaaacggaatgtatctttggctaagtgatgtgtacaattatgcagcaaccagagaaaccatagaaaaagaccgtggtatacatgctttttcacaggaagattatcaaaaatacggctataaaggagaatacagaaatgagccattggttcaggtaaaagatgataatggaaatgtaagttatattcttttaagcgaattaaaagatggtcaggaatattttgaaattattccggcgcaggaaataaagccgggagacggcattacaggtccttattttatcccggattattctatctcaagaagtggcgttattccccacggaagcaccattactttattgggagatattgcaccgagcggaccgaattatttaatcagtggtgcgccgcaatttccttacggtgatgcgacttggcagccggatcatcttgcgatttcgccaacgatgggcggagccggtgcaagtgttacaaatcctatcaatcttgatcagccagctccggcttgggttcatgagatattgacggatgaaaacgatcctggttccaataaaatctacactcaaagaattcttgcgaacgatctgtatccttattgcgtaagacccgatatgcgattaagagatacattgagcggacaaaacgttgcgaattatgttttgattcagatgtcgtcaaaaatgaaaaccggagcgcagggagggattttaaatgttccttttgttaacagatttgttcctactgttgaagtagatttcagaatgtggatagaaacggtgatagaagacggaaaagaaatccttcagctgcaatatgagcagattatcttttttgaatttgatttcggaaatgacggcggtactacaagctggccgcacattcaggtgaatacgcttcgtaagattgaagatattcctgcagatcagagaaaaattattgaagagcagtttttcaatgctccttccggaatgagtatgacaacacctgcttctaatgcggagcgtactgtaaatcctcctgcaggatgcccgtatcataaaccttagattttataaaggtctgattcagtatcatttaattcattcaataaaaagcgtcacttgttttaagtggcgtttttgcgttataatcgatattgaatagatcatactattttccagatgattctgttgaggttattttgaatcatatctaaattttaaaaatacttctattgtattgtattttacgtaagcaaagactactgcaactacgggatgaaaggatggaaaaactttcagatttgttcaaaaaaaatgaattttgcaaacggtaattacaaacaatattatcttgtttcagaaaaagttaagactgctgcaactacaggatgaataggtaaaaaaacttttctaagagcaaaataatgatcaaatttgaactctcaaaaattcggatagtcattgacttcaaaaaaaatatatgaagagatcaggcaaaaattgtcgcagataaaaatgtgaaattatattgctgatttcaatataaaattttttaaaaaaacagggttgattgatcacaactctgtaattaatccagaaccataaagaaaactgtattcatagcgattggcttatgaacagggagagaattttctcaattatcaatttatcaacactaattttcaaaaagcaaatgagtacacctacaccattaaatacgatcttcagttggtttgaagaaggtgatatgcctacagaatatcaatttaagcagaccttttcttcattccgtcatttggatgataaaatcaaaatgagcgatgtggcaggattaaatgaagcttttacaaatcatcaggaagatcaaaacgctcatcattcggtacttgcaaagcttaatgcatcaaatcttactgctgcgaatgtagaagaatggaaagaaaagttaaagatacatttagcagctactgttgatggcgaccaagagacaggaaatgtctatacaaaagagcaaatccaggaaattctgaatgtattccacataaaagatgaggaaatgcttgcagatattgccaaaattaatgcaatcctaatttccaatgatgtaaacctcgatgaattacaaaaaatagtagactacatcaaagaaaacagacagcagatagaattgcttaaagagactggtcttggaaatagttcagacgataaaattaatcttgttggaagttattcaaactggggtacagttagttatcaaaataaattcaatgatttggtgtatgataagattaaaagaatcgaagacgcagccaattccgaaaaaatcaggcatgaagaaaaagttaggggcgactcccgaataaagcatgatcttaatacattaagttttgtcattgatgcttatgacacggttaccatgtttacagtgcctcttaaggtaaaaagaatagacacaaatactattgatgtgctattcgattctttaccaccaaatatgattcagttaaccattaaaaaaatataattatggacattaaatacgcttattacagaagctctgttggttacaaaattgaaggaaaaacagacagcgaagttttaacagccggcggtggcacaaggtcaatcagtacgttttggcatgatggaaatttgaatcctttagattacgtacccaaaacacgaacactaaccattaacggtacagcttatgatttgtcggcaaaccgatcattcacaacgcctgatactattacccgtttaaaaggtggtgcatcaggttctttagtttcgggagatgttacgcttgctgcaggttctaatatgacaatcagtcagtcaggaaataccattaccttagcttctacagataccacctatagtgcaggaaatggtttgacattgtcgggaactacattctctttgccggttaccacttcaggtacaggaaatgtagttacaggaattactcaaactgctaacgggattacggtatctctaggctctttgcctacatctgcagatctggctaattatatcccggtatcacaaaaaggtatagcgaatggagttgctactttggatgcatcgggacaggttcctgcaacgcaattgccgtcttatgtggatgacgttttggaagggtattataaagttgccgatggaaaattttataaagaagctgcatatacaaaccttcttgctggtgaaacaggtaaaatttatgtatcgcttgataccaacaaaacataccgatggacggggacaacgtttgtttatatcacttccggagctgtagattctgtaaacggattaacaggtgttgttgttttaaataaatctcatgtaggtttaagtaatgttgataacacggcagatgcatcaaaaagtgttctttccgctacaaaatggactacagctagaagcatcgctctttcaggagttacttccacagcacaaaccatcgatggttccggaaacgttacaattcctgtaactgcggttccggcaacattattaacaggaactgcagcaatcaataccaccggatcatccgcaaaactgaccactccaagaacaatttcagcgacaggcgacgcagcatggaatgtttcgtttgacgggtctgccaacgttacctcagctttgacattagctgcaacaggagtgacagccggaacgtacgatgaggttacagtagattctaaaggtagagttatcgccggaagtaatattgtgaaatcatacagtacttctatttcaggaactgcaagtgtggtacacaacttaggtactagaaatgtagacgttgctatgtacgatacagtaacattctacaaaattgatggcaggataaaattaacagatccgaataaaatcgatattgaatttgattctgctttaccaaacactgtagctataacagtaacccgtaaagatatttaaacatggatattaaatatgcatactataacacctcgaaaggctatagggtattgggcggtactgccgcccaatttttaaaagcagatgggagtattgacagtaaagaatatattgacaaatattcggaacaaaatatagactctactaaaactataggttttcaaaatactatatattcaggatgggacaaatcatctgtggttaatccacagatgggtccattctctttacttaatcttgcgttacaaggagcttatcctttatatggagatgaagaatttaggaatggaaccaatggaataggagtttataataactatggcaatggtaatgtaactatgactagggaggctgcttccaatcttccaaacagatcaggaatacagttgagattcaattataatggtaatggggctactcccggtttaggcggatttatattagggtttaacgccagagctaacgctgtttttattcaaaagtttacggctaaacttccagtaggatattcattttataatgctgaaaactatatgggagaaaatgcttccgtgaactggttaacttcaagagcaggaacaggaaagtgggaaacttatgttcgtgcagttatgtgcggaactggaaccagttttggaaatggaggtcatgtatatatttcaggtccgaatactgtagtggaattttatttagcttttgctgaaatttatgaagtaaacagttctgtattttctagaataaaagaagctttttatgctaagaacgaaacgattcattttaatggagctatatctgatttaattactgttggagattcatatactcaaaaaaaattactatctacatcatgggatggaactaatggagatcagattctattaagagtgccaggaagtcaaaataacggagcgtatctcaggttttctcagaacggaactttaaatggaagtttaggattattaagttctgataatttaactggaggtcagatattaaattctcaaggtgatagtctgtatctgggaaatttatcattacccaatattgcacttcaaactactactaatgctcattttaattttgcaggagttggtaatctctacacatttaatgtaaatggagcttatttaaatagaaatattaattttaatcaagataactctggtgttaatttctatgaaggaggtaagatttataagaaatcagggggtggagtttatattaatagaggaactaatggactcgatccaagaattgaaaatgctgatggatcgcaatcatggacgatatttcatgaaggaaatcacaatccttttaaaaatttaaaaactggaattgctttagaagatatatcagaatcaggaatttacagacaagaaaacccaacatcaggatttaattacactactactttaaatctaaactcttctgatggaagacagcaactaactattgaaaggggtggaaaaggaatgaaattcagggggactactactggctcaggaaattctggctggtctggttggaaagaagtttaccacacaggaaactttaatccggcaagttatgtaacacaatcatctttaaacacccaactgggtaattatgccacactgaatggtgttcagacttttacaagtaccaatacttttctgcaaagtcctgtaattccaaatggaactttaggaactcatgcggtaaatgtaaatcagctaagtacaaaagctaatggtcaggaaaatgctaccgcagttggtttctcttctggaaatatacctaccgcagatggaaattcatttccgtatatgtatcataattcaggattgtatgtagcattggcaacccagtcgtatgtgcagtcaaattttttgagtacaccgaatggtacatctgttatcatatcaggttcaaatttaaataattatcttaaaacaggcttttatagaggttcaggattaattaatgcacctttaaacaataatggttggtggtacgtgactattgaaactcacgattctacttgggtaaaacagacggcaacgtcatttggctcaggtaatacttctaatgtaacttatcaaagaactctaagtggagggagttggtcagcttggcagcagatttggtctactcaggattttaatactggaaacattcagcaatggaattatatggctcagtatggtctgcagctcaactcagactttacagtaaatacaggatctggtttactcattgcagatgattatttcggaggtgaatctggaatgattgatcgtagctatgacagattcgtttcagccaaacaagagggttattataaatacggttcacgttacggtacttttgacgggctaaactttaactttgagtcaaggctcttcggtatgggaagagaatctaacaaggaagataaattgacagtggaaggttcggttaaagccagtaaaaacttcaaatcggaagaggaaagacccgacaccatatttattcccaatggtaatgtagccagtcttaaagatgaaattgtaaatgatgaatctgaatatgcaatcagactagatcctcacgaatatgagatcgatccttccggctatttggatgtagatgatagaaaccgactgattcatattattggagagcaggtgaaaatgattgttaatttcaaagaaatttatccgaagcaacagattgttatttataattttgataaatctggcggtgcgatgacggttaaaatttatggcaaagacatctataatattgaaccaggatctttcctgaggctgtatgtgacaagatcacgcagagtaattgcagaaagacaattgccatgtgagtttgtttggtaaaataaaatacaatttttaactaacctaaaccctacaattggagaatgaaagtcttctgattgtggggttttttgtattgatgaaaggcttgaattaatttgagaacacaagatgaatatataatagttcttaatttaataaagttgatttccgatagatatttttagtgtcaaaaaaataagctgaaaatgaagagttttaaacaataagctattcaggctgtatgcttataaaaaaaaagcgagttgccccgccttgaatgttttcacaacggaatattccttattgtgaattgctttctgttacaaatgtagaaaaatatttttttagttggtttacggttttccgtattttaatgaaaaatattctttttacatttatacaatttcaaaaactcaataattatgactaaaaatatacttggattagacttaggagtgtcttcaattggatgggctcttgttcaggaaaattctaaaaatcctgaaaataataaaatagtaaagttaggtgttcgtgtgaatcctttgactgttgatgaacaaatcaatttcgaaaaaggtaaaccaattacaaccaatgcaagtagaactttagcaagaagtgcaagaagaaatttgcaaagattcaaattgagaagagcaaatcttattgatgttttaaagaaaggcaatattctgaaacaaggagatttgcttacagaaattggtaaaaattctacttttcaaactcaggaattaagagcgaaatcggcgaaagaaaaagtagaactttcagattttgtaaggattttacttttaattaataaaaaaagaggttacaagagcagccgtaaagccaaaaacgaagatgaagggcagattatcgacggaatggctgttgctaaaaaactttatgaagaaaacataacgcccggagaatattcttataaacttttacaagaaggtagaaagcaattacctgatttttaccgttccgatttacaggcggagtttgataaaatctggaattttcaaaaacaatttaatccagaaatttttactaatgaactttacaaaagacttcaaggtaaaaatagaaatgcaacctggaaagaattagaaattccattttatcttgttggcattaaacaaattgggacgatgcaggagaaaaagatagaaagatatttttggagaagtgaagctgtaaaaaaacaattagattttgaaagtctagctgttgtttttcaggaaattaatagtaatctgaataattccagtggttatcttggagccatcagtgacagaagtaaagaattgtatttcaataatcagactgttggagaatatctatataatcaattaaaaataaatcctcatacaaaacttaaaaatcaggttttctacagacaagattatctggatgagtttgaaaaaatatgggaaactcaggcaaaatatcataaaaaattaaccaaagaattaaaagaggaaattcgtgatattgttattttttatcagagaaaacttaaatctcagaaaggattaatcagtttttgtgaatttgaaaacagggaaattgaaatcacagtaaacgggaaaaccaaaaagaaaacagttggtttaaaagtagtgccgagatcctctccgttatttcaggaatttaaaatttggcaaagattaaatgatttagaatttaaaaatgtagaaactaaggaaatatttcctttagaattagagcataaggaaattctatttggtaatttaaatatcaaaggaaatttatcgtcaaaagaattaattgaacaactaggatatccttcaaaagagtggaagtgtaattttaaagaaattgatggtaacaaaacccatgagaatttatatacagctttcctaaaaattatagccaacgaaggaatagaatttccaaaagaatttaaattaagtattgatgatgatattaaagtttcaaaaattgatgtttcttctgaaaaaataaaagaatttatcaaagagaattttttgaaattaggaattaatacttctattctggattttaaccctgaacttgatgggaaagattttgaaaaacaagaatcgtatcaattatggcatttgttgtattcttatgaaggcgacgattctgcatcaggaaacgaaaaattgtatgaacttttggaaaagaaatttggttttaaaagagagtattctaaaatattagctgatgttggattttctcaggattacggaagtctcagttcaaaagcgatgcgaaagattttcacttacattaaggaaaataaatacagcgaagcttgtcatttagcgggatacaatcattctaaaaattcattgacaaaagagcaattagcaaacagaattttgaaagagcaattggaaattctacctaaaaatgcacttcgaaatcctgtagttgaaaagattttgaaccaaatgatcaatctggtaaacgaagtgataaaagagtacggaaaacccgatgaaataagaatagaattggcaagagaactcaaaaaaaatgcagaagagcgtgcaaatatgacttccgatatcagcaaagcaactttgctccatcagaaatatgccgaagttttgcaaaaagaatttggaataaaagcaccttcaagaaatgatatcattcgatataaattgtatttggagcttgctaacaacggttataaagacctatatacaaatcaaaaaatagaaaaggaaaatatttttacagacaaatacgatatcgatcatatcattccgcaatcgcgattttttgatgacagtttttcaaacaaagttctagttccacgatgtgcaaatcaagataaagataattacacagctgttgactatattgaaaaaaaatatggagaaagaggaaaagaagattttttgaacagaattcatttggtttttaaatctaaagaagcaattgctggaaagtctgaatctcaaatatctagtatgaacactaagtttttgaaactacagaaaaaaggaagcgaaataggagaaggtttcatcgaaagagacttaagagatacacaatatattgctaaaaaagcaaaagaaattcttttcggaattacaaattctgtaatttctacttcaggaagaattaccgataaacttcgggaagattggaatcttgtcaacacgatgaaagagcttaatttggaaaagtatagaaaattaggcttaacggaattaattgcaaattctaaaggagaggagaaagaaagaattattgattggacgaagagaaacgaccatcgtcatcacgcaatggatgctcttacggtggcatttaccacccataatcatatccaatatctgaattatttgaatgctagaaaagatgaaaagcataaagaacatcataatatctttgctattgaaaacataattacagaaattgtagaaaagaaaaacggctcaaaagaaagaagattcaaattaccgattaaaaatttccgtactgaagccaaaaaacaattggaagaagttttaatttctcacaaagcaaaaaataaagttgttaccaaaaacatcaacaaaaccaagaaaaagggtggagtagtttcaaaaattgtattgacaccaagaggacaacttcataaagaaaccatttacggaagtgcaaaatttcttaaaacaaaagaagaaaaaatatctggaaagttcgacttggaaacgattaataaagttcagaatgaaaaatttaaaaacgctttattggatagactaaaagaatttaacggagattcaaagaaagcatttacagggaaaaatgtgcctgcaaaaaatccgatttatttgaatgaacaaaaaaccgaacaagttcctgaaagtgtagttttggcttggtacgaaacgggttataccataagaaaagctgtaaatgcggataattttaaagactataaaaatcttgaaaaaataattgataaaggagtaaaagaaattttaaaaaatcgtctgaatgcatttaatggaaatgcaaaagaggctttttccgatttagaaaaaaaaccgatttggttgaaccagtctaaaggaattgccgttaaaacagttaccataactggaattaataatgctgaaactttgcattataaaaaagatcattttgggaatgaacttcttgatgaaaatggtaaaaaaatacctgtggattttgtaagtacaggaaataatcatcacgttgctatttatgaagacgcagatggaaatttgcaagagcgagtggtaagtttctatgaagctgttgaaagagtaaatcagggactttcgattattgataaagagtataaccaagatttaggatggaagtttcttttcacaatgaaacaaaatgaaatgtttttgtttccgtcagaagattttaatccaaaagaaactgacttgtttgatgaaaagaatctcaatttgatttctaagaatatgtttagagtgcagaagtttggttcactactttcaggattttggtttaggcatcatttagaaactacggttgatttaaattcatcattaaaggatacatcttacaaagtaattcaaagttgtaacaatttgaaacttattgtaaaagtaagacttaaccatttaggcaagattgttcaaataggagaatattaaagtttaagatatgatcacccgctccatctacatcggcaatcccgcttaccttaagctcaaagacgagcaattaaaaatcctctgtccggaaaccaaaacggaaaaggggagtgttcctgtggaagatttggggttattgatgttagatcattatcagattaccatttcgcaccatctgattcaaaaaatgatgggaaataatgtcgtggtggtgagttgcgatgcccatcatttaccgcacggaataatgcttccgctgtatgggcataccgagcattccgatcgcgtaaaagatcagttggaagccagtgaaccgctgaaaaaacagctttggaaacagacggtggaatgcaagatcgaaaaccagaaaaatgtcctgatgaaattggggaattactatgaaccgatgattgaatatcagagaaatgtaaaatccggcgacattacgaatatggaagggattgcggcgcagcattactggaaatatctcatcagtctggactttttgaggcagcgttttggagattcacccaatcagttttttaattttggatatgccgtgctcagaagtattgtggcaagatccatcgtagaaaccggactgttacctgttctcggcatttttcataaaaataaatacaatccgtattgccttgccgatgatttaatggaaccttaccgtccgtttgttgatttactcgtgatgcagtggctgaaaattcatccggataccgaagaactgacgaaagaatttaaagcacatattctccaggttgcgaccaaagatgtgcgtatcgatgacaagacaagaccactgctggtttcagtaaaaactacggcttcgtcgctttacaaatgctacacaggagaaaaacggctgatttcctatccggaattgatgtgatttttttatggcagctttatccgccctccgttcccgcttttttgcagatttccaaccgcatttttccagcaccaaaatctggaaaaagagctccactcaggtcgggctgcaaacgttacgacaaacaaacaatagtcaccaaaaatgaacgccgaaaggtttaatgcatatcgaattatgtgggttttagtattatatgacctcccgaccgaaacgaaagcaaatatgaaagatgcaaaccgttttcggaaagctttgattaatgacggatttactttattccagttttcgatgtatgtacgccattgtccgagccgggaaaatgcagaagtacacatcaaaagagtaaaatttatgcttcctaaagccggaaaggttgccattatgtgcattaccgataaacagtttggagacatcgaaatcttttttgccagaaataaagaagaaccgccaccgaccttccaacaactcgaattattctgaattttaaatcctgaaaacaaaataaaccctctgaaaaacagagggttaaattttgaggttgtgtcatatctcaaagatactcaaaaatgaaagcaattcacaacaatgatatggtaaatagaaagaaattctttgttgtgtcatatctcaaagatactcaaaaatgaaagcaattcacaacgtgattcggtattgaaaaaagcatttctatgttgtgtcatatctcaaagatactcaaaaatgaaagcaattcacaacaattttacgaatgagaatttttcatttattgttgtgtcatatctcaaagatactcaaaaatgaaagcaattcacaacaacttcttccaacgatcgcctttctgagacgttgtgtcatatctcaaagatactcaaaaatgaaagcaattcacaacatacgtggcggtgcaacaactaccacacgagttgtgtcatatctcaaagatactcaaaaatgaaagcaattcacaacaggttactgttagcaacttcattcgtgcaagttgtgtcatatctcaaagatactcaaaaatgaaagcaattcacaacatggaaagcgttactcctaaatataaaaagttgtgtcatatctcaaagatactcaaaaatgaaagcaattcacaacgtagactcataaattattactatcttcgtagttgtgtcatatctcaaagatactcaaaaatgaaagcaattcacaactcaaacaaataaactcccaactcttcacatgttgtgtcatatctcaaagatactcaaaaatgaaagcaattcacaactataaccatcattgtgattataattcctgcgttgtgtcatatctcaaagatactcaaaaatgaaagcaattcacaacattggcggttctgtagttaacgttggaggtgttgtgtcatatctcaaagatactcaaaaatgaaagcaattcacaacctaatcacttcttttttgtaccattgcgacgttgtgtcatatctcaaagatactcaaaaatgaaagcaattcacaactgggcggaaatacaactccagttctcattagttgtgtcatatctcaaagatactcaaaaatgaaagcaattcacaacacctttaccccgttattatagacaaagaatgttgtgtcatatctcaaagatactcaaaaatgaaagcaattcacaacgaaaacatcaaaccggaatcaatcgaaacggttgtgtcatatctcaaagatactcaaaaatgaaagcaattcacaaccgattgccaatagaaattaattccatttaggttgtgtcatatctcaaagatactcaaaaatgaaagcaattcacaacatcaatcttttgcagatggtttttcttgaagttgtgtcatatctcaaagatactcaaaaatgaaagcaattcacaacgcaccatcaatgcgtgatcttcttacaagagttgtgtcatatctcaaagatactcaaaaatgaaagcaattcacaacggtcttgtcagattataataacagccactagttgtgtcatatctcaaagatactcaaaaatgaaagcaattcacaacggaaggcagttgcgttacaacaatggatgggttgtgtcatatctcaaagatactcaaaaatgaaagcaattcacaacatgacctctgacccatcgttccagatgcaagttgtgtcatatctcaaagatactcaaaaatgaaagcaattcacaacgcaccatcaatgcgtgatcttcttacaagagttgtgtcatatctcaaagatactcaaaaatgaaagcaattcacaacacaaaagttttaacgaaattaaaaattatcgttgtgtcatatctcaaagatactcaaaaatgaaagcaattcacaacggaactgggaaattcctttacaaaaggggtgttgtgtcatatctcaaagatactcaaaaatgaaagcaattcacaacacttttctataattgcttacataaaaatgggttgtgtcatatctcaaagatactcaaaaatgaaagcaattcacaactaaaataacatacaaaggaaaaacggtacagttgtgtcatatctcaaagatactcaaaaatgaaagcaattcacaacaaattaccaacattgtttgccttgtttttggttgtgtcatatctcaaagatactcaaaaatgaaagcaattcacaacgtagattcctaaattattactatcttcgtagttgtgtcatatctcaaagatactcaaaaatgaaagcaattcacaacattactgctatggcgtatactcaggcacaagttgtgtcatatctcaaagatactcaaaaatgaaagcaattcacaactagattatagtggaattcaaaacactgtgcgttgtgtcatatctcaaagatactcaaaaatgaaagcaattcacaaccatttctatttcggtggctctccccagaatgttgtgtcatatctcaaagatactcaaaaatgaaagcaattcacaacagataaccgtaagtaatttcattcgtgcaagttgtgtcatatctcaaagatactcaaaaatgaaagcaattcacaactacataatagaatatgtaaaggcaagacctgttgtgtcatatctcaaagatactcaaaaatgaaagcaattcacaacgtatccgataaatatcagttaaatatggctgttgtgtcatatctcaaagatactcaaaaatgaaagcaattcacaacagataaccgtaagtaatttcattcgtgcaagttgtgtcatatctcaaagatactcaaaaatgaaagcaattcacaactcaggagttacgcaggctcaactggactatgttgtgtcatatctcaaagatactcaaaaatgaaagcaattcacaacatgagagacgaggagttcaaaaagcttaagttgtgtcatatctcaaagatactcaaaaatgaaagcaattcacaacttgcgtggcggtgctacaacaactacaagagttgtgtcatatctcaaagatactcaaaaatgaaagcaattcacaacaccgctcagactgcaaatcaaaatgcaattgttgtgtcatatctcaaagatactcaaaaatgaaagcaattcacaacaagttactgtgagtaattttatccgtgcaagttgtgtcatatctcaaagatactcaaaaatgaaagcaattcacaacagactattaaagttggtgatggtggtctttgttgtgtcatatctcaaagatactcaaaaatgaaagcaattcacaactaggcacattcaaacttaatataaaggcacgttgtgtcatatctcaaagatactcaaaaatgaaagcaattcacaaccatataattcaacaattaaatttttccaagttgtgtcatatctcaaagatactcaaaaatgaaagcaattcacaacaaaatcaatataatgtctttcaaaatagtagttgtgtcatatctcaaagatactcaaaaatgaaagcaattcacaactaccacggatatttaataacctctacaattgttgtgtcatatctcaaagatactcaaaaatgaaagcaattcacaactactcaacgtatgattactacgatgttaaagttgtgtcatatctcaaagatactcaaaaatgaaagcaattcacaacaaccgacagatagagttagcggtaaagctggttgtgtcatatctcaaagatactcaaaaatgaaagcaattcacaacatgcgtggaggggcaacaactacaacacgagttgtgtcatatctcaaagatactcaaaaatgaaagcaattcacaacaagcttggattcctggaaatcaatgcagctgttgtgtcatatctcaaagatactcaaaaatgaaagcaattcacaacctattctcaattctgacgctttcataacaggttgtgtcatatctcaaagatactcaaaaatgaaagcaattcacaacgttgttgttcctgatcttctcataattactgttgtgtcatatctcaaagatactcaaaaatgaaagcaattcacaacacagataataaacattgtctagattttatggttgtgtcatatctcaaagatactcaaaaatgaaagcaattcacaacaggaggttcttatgctcctacaatgcactagttgtgtcatatctcaaagatactcaaaaatgaaagcaattcacaacaatattatggcaaatcaagtaacagagagagttgtgtcatatctcaaagatactcaaaaatgaaagcaattcacaacatcaaagtaaattatcattcatcattcaaggttgtgtcatatctcaaagatactcaaaaatgaaagcaattcacaaccacttctatttcggtgggtctccacaaaatgttgtgtcatatctcaaagatactcaaaaatgaaagcaattcacaactttagcgttaggtaatataagatcatggaagttgtgtcatatctcaaagatactcaaaaatgaaagcaattcacaactgtagatcaaataaaagcagattactacgcgttgtgtcatatctcaaagatactcaaaaatgaaagcaattcacaacactacacatttttggtttgtaccacttagagttgtgtcatatctcaaagatactcaaaaatgaaagcaattcacaacatgcgtggtggtgcaacaactacaacacgagttgtgtcatatctcaaagatactcaaaaatgaaagcaattcacaacttgtatgtattgaaaatcaacacattaaaagttgtgtcatatctcaaagatactcaaaaatgaaagcaattcacaacaaatcgattcaaaacatcaagaagtaacaggttgtgtcatatctcaaagatactcaaaaatgaaagcaattcacaacagaataaaaactaatacaatcaaaataattgttgtgtcatatctcaaagatactcaaaaatgaaagcaattcacaactataaagctaatattttaaacgttccgaacgttgtgtcatatctcaaagatactcaaaaatgaaagcaattcacaacccttcttaaatcctgccagttctgcaatttgttgtgtcatatctcaaagatactcaaaaatgaaagcaattcacaacataacagctatggcatatactcacgcacaagttgtgtcatatctcaaagatactcaaaaatgaaagcaattcacaacgaccttactgaaatcaagtcaattattaacgttgtgtcatatctcaaagatactcaaaaatgaaagcaattcacaaccattgttataattgatgaattgcctgctttgttgtgtcatatctcaaagatactcaaaaatgaaagcaattcacaactatattcctgttctgttattttaaggtcttgttgtgtcatatctcaaagatactcaaaaatgaaagcaattcacaaccaatgtttactacttatgacgggaacactagttgtgtcatatctcaaagatactcaaaaatgaaagcaattcacaactaccctctttcaacttcgttccactttccagttgtgtcatatctcaaagatactcaaaaaatgaaagcaattcacaactcaaaagactacgtaaaagacaggaaaaaagttgtgtcatatctcaaagatactcaaaaaatgaaagcaattcacaacaatcgtcaggcataatggattcaacattgtgttgtgtcatatctcaaagataatcaaaaatgaaagcaattcatgtgagtaaatgaactactaagccattcaaataaatagtttcatataattatattgtcattagcaattgctgattttcttcttgttgtcttcttgcccaatattgatggtcagtccagcgtgtctcttttcggtagatggctgaacgttgctctttatataagctgaaagctaatcggatgttttgatcgtaatgatgtcctgcttctgcattaccgttcaattcatttttggcagcaatacccacatcaatcccactacgcagagcgaaagcgataccatgtgacgataatggatcaaacgcacaggctgcatcacccgccgctaaccagccttcaccagcataatattccagatgttggcttcctgctgaggtatattgtataggcaaagcatatttgtaccgatttacagaaacacgatgttttacaaagcgcgtttgcgtactcttcctgcaccaatacagaggatcgagccaatctgtgcggtcatgaagatcaggatctgtaaaaaagatgcgtactacttttccttctccgccatcacaaacataccaccaaccgtcggagactgcttcaataagactttgttgactttttaaaggattagcagaagtcagcaaactgaccactgctatctgattatccctgcgaatacgtttgataccaagttgtctgctcagccagctattcctaccgcttgcatcgattactgtagtcgcttttatgtttaaattaccttcgctgtattgccagtacatattttctcttattaacttaaaggcacggttcgtctcgatgaacctgactcctgccaatactgctttttgaagaagcatagactgaaaagccttgcgattcacataccatccttgcccgaatgatgattggataaaatcatagaaaaataacctgtcatctccccaacaggaagaattgccatagcatggtgaatgttttgctgctaaaaattcatcccataagtcaagctctgtaagcgaatatcgggcagaagctgcaaggctttcacccacccggattgtatgtgcatcggcggaccgatgcactacaacaaccgatgcacaatgctgtcgtaaagtgattgccgaagctaatccggcagcaccattacctattatcagcacatctgttatcatcctctctttctcttttctgcacgttctaccatccataagtaaccagaatcttctgatgatttttcctgcactgaaccagccatcagcattttgtccgaaacaacctgattttctcctatcgttcttccattctctacccacattttatctgggaaattgggatcaccaatgccttctttctggataaggatacctacatcaggccattgagtaataaaatcattgatacctttggtataaggacttacatttaccggaggatacccatattgatacacgatacctcgcaaccacttaacacgattgctaaaagcagcattcttttcttccaaggtggaattctcattcatcattatttcataatcagcttcagtaagtacatcgtttggcaccctcactggccaaaaagttggtatatactgacccataatgccaacataaccactcagacagcttgaagtatctgtctgccatggtacagccatccatttggtaatatctcctgcggctgatccatcaagagggccattgatttccagcgcaatctgtgaattgagtatcggtccgtatgtaagtggatcatcaagtcgacgctttattctgaacggtgttgaatataatataggttgacgcatgggccatgtaaattcacatcccggatggaaaggtccgccgatagtttcatcaagggatgtacggtctaaataagcagcctgttctactggagtgatatcatcccagtttttagtttctggtctgtttcctacagtgaaatttccatttgcccattgctgaaaatattcatactggaacggcatcactgccatgaaattacgcggatctgtatcgctacttttgaagccctgcaatccatcgccgtaaacaggtgggaaaagttctgcctgcatcgttagataatcaggatttcggaactgacggaatatagactgacgcagctcaaaatactgattagaagtatctgaaagctttgctaccatttccggtgttgagagatcacccgggcttccccagccgttttgtttgaaaattcctgcatttacccaaccgttcagtggcatacgctccagcattggataaatatgttcccaaaactccggaatttctggcaacacagatttccccatatcgatagctgtttgtgctaaaagatcatagccggtgacaaacgcttgtatgcctggagaataatcgggtggtgcagtaagtatccatgctccaacagcttcgaatacttctcctgttttaagttttatcttcgcatcaaccggaccgtccgaagtatcgtcatgccatgtatcattattagcaaaagtaacagcactctcattagcataggatgcagacagaccataacctcctaagaataaaagggagccgttttcgtcagtgcgaagctcaccaaggtaaactggtttatcattaccgtccggtgaataaaaagtacccttgtcaaatgcaaagttttggtcatttccattggaattggtattaactccggagatcattaccgagcctccgtcaattacaagtctggatcggtcagcatcactgatcgttacattacgcaaagtgctttccacaggtggatatcctttgaaggcacctgtagcctgtggaatatccaaagcaagatcgaaattgtaccaagctgcctttttattagctacatgtacggtccaggtaatgtcgccatcttcagcagtaagttcgcggatga

SEQ ID NO: 2161 - DNA, 24233 bp, synthetic construct
  misc_feature 1..24233: note = Synthetic
  source 1..24233: mol_type = other DNA
ggatggtaattgatccataaactaaaatgacagaaacaatgaaaaaattcatttatatacttgggatcgccgctttctcaaccggtttatccagttgcgataaaagggccgacgatgttatcgatgaaattccggatacatatacgatgttgtatatgccgcaagctatcgatttaccgaatgaatatacttttaatagatccgcggcaggggatagcattttctacggcgcttacctgggcggcccgagatcttttgatacaaacatcgaagtacaatttgaaatcgaccaggcaaaggtggcggaatataacaagatgaactttaccagctacccggtgttgccggccgatagctatgaattcaccgaaacatcgaccgtgattccgaaaggcagccagcattcatcaacattgaagatgaaaatattatccgctaacctggacggtgtaggtaaatttttattaccgatcacgatgaaaaccagttcacaagtcaatgtaaaccccagtttggaaacgacatatttcttggtagatgcgcaatatttatcgaatcctttcccggtgatggatcgcgctgcttgggaaattgttgatttttcttcagaagaagcaaccggtgaaggtgccaacaatggtcacgcgatccatgcttttgatgatgatccggccactttctggacaacgcagtggaaaggcgccaaacccggcccgccacatcatattacaatcaatatgaatgctgatgaaaaagtgcatggtttcaaatttattggtcgtatcgacaataaaaccggggaagtacgcaccaccggtaatcctagggatatcattgttgaaaccagtatggacggtagtacttggaattacagcgaggctttccacctggataacgtattggaaaatacgatctacctgtcgtatgcacaggatgcaacatattacaggattacgatcaacagtagccaaagcgataattatctaacacatattgcagagttatacgcattttaatgtttacctaaactgtacctccaaaggccgggcttcttttaagaatgcccggttttgaacttgaaagaaaaataagaacatgagatattggattctaattttgtcaatcttatgcctggcctgtagcaagtcgaaaaattctaatggtggggatcctggagatccacccgttgaggagaaacccaaggtgaaggtaatgacttataacatctacggtgcgcgtgccagcagcggtaccccggccgatttggatatgatcgcggaagtaatcaagtcggagaacccggacttagtggctttgcaggaagtcgatgctttcactaccaggactggaaaagatgtgcatcaagcgagggatttggcaaagttgacaggaatggaatggtatttcacgaaagctatggatttgcaaggcggggaatatggagatgccgtattgtctaaattccctataaagaacgctaccaggtattccctcccggttgcaagcggcgtaggcggggaaacgcgctccgtagctttgatcacggttgaaaaggaaggtaaagaatttcattttgcatctacccacctggaccacctggcactggaagataaccgcattttgcaggccaacgagttaaagaaaatcattacatcattacaattaccgattattatcgccggggatctaaatgcgaagccggaatcggaaacgatgtctatcatcaagcaatatttaacaacgggttgcatcaagcaatgcccgaataccttcccatcagataatcccgatcgtacgatcgattatattctttacacacctatcaacaagttcagtgttcagtcctacaattctccaaatgggtacgtggcatcccaaagcgcttatgcttctgatcataggccggtggttgccatttttaccttgaactaacttcatgaatggtgctcactaacgacggcctgcctcatttcggggtaggctttttgccatttatgtatatgtgatgaattatattgaaatttaacctcttatattcaaagatttttcctagtttagaaatatctattcgtccaaggtcgcattgtagttagcaaggaaggctaatttttaggtcaaaatctggttacccggaagcataaaattgaattatgaaggcaaaaatcactgttacattattgttggctgctatcgccaccgttacgctttgttcattggcaatccctctccaggagcacaacgagaagccaaaaaatttgaaagtattacctaaaaaaattgatcctaaggagctgataagcatcatgaggggctttaatgcttcgttgggtgttaaatgtaacttctgccatgctaagagtgcggatgatcctaaaaagatggactttgccagcgatgccaacaaacacaaaggcattgcgcgcggcatgatgaaaatgacgactaagatcaataagaagttcttcggtggcgccgaagcaagggaagtaacttgttacacttgccataaaggacataaagagccggagaagatgacggaagaaaaagaatcctaagatatctttattgaacttatttataaaatagccaccggttccgatcggtggctatttttttacgaataaagctgttcgctgttaattttaatttataccaatttcatggctaggcccccggctcagtataatgaacgatgtcaatcccaataccgttgggatcttcgatcgcaaaatgacggtcgccccaaggttcatccctcaattcaattttgataggcactttcttttgttgtatttccttgtaaaaagtgtctacatccgctacctcgatcgtgaggtacatgcccctgccttggaatgccttttgaaataaagcctgctgcgacggatgttcgggcagcaagaagctgattaccggattgccctcgggatcagataacaatagatagaattcgttttcgaagaggacaccgaattgtaatacttcggtgtaaaactctttgctttctgccagtttggatgtaataatacctgcatttactttcatactgcgtgtttttgttggatgattttttgattgggccgctgaaacaatcgaaaagctaaccaagcaaaagatcgttaaaattgttttcatgatgatggatttgtaatacaaaattgtagaaagcagcggtgaaaacattgtaaaaaacggacaaaaaaccgtcacggattaggaatgattgcaggatttcacggagtttcaattttttttatggctttttatgggttgtttttggattgatggattggttaattggctggatgtgattatagaatattgatatgatatagattttgactatatattcatcgttaaaaataattttgtactaattggtaaaatattatacctttgggttgtcaaaggaaatgaacatggcaggcagaccgaaaatatatgatgaagatgcaatactggaaaaggcgttgaacgtgttttgggagaagggcttcgaaaatgcttctgctgatgatttgctcaaagccatggggattgggaaggggagcttttacctggctttcaaaggtgggaaacaggagcttttcgagaaaactatggatcgcgtggtacaccgccatttcgatgagtttagaaaaggggtacagtcatgtgcgaacccggtgcgtttagtgaaggattttttcttgtcgcttgttacggaacagtcgccggttggcgataaaggctgctatttcggaaatgctttggtgcaagtgagtgatcaaaatcttcaactaaagttgcaggcagttaagaaccttgacatcctggaagccatcttcaaggaagcgatggatcgaggtaagaaaatgggtttactggaaaccaagttatcatcgaaagaattggcgctctacctcgtgaatctttggaacggtatcaatatcaccaagcggatgcagcatgaacctaaagctttgaaacaactcatgcttttaaacttggacatcatagcataacttttttttatcattttttgtactaaatggtacataattaatttaacaataaaaacttatcatcatgaaacgtaaagcaattgccgtttggaatggcgacattaaatcaggcgcaggacatttaaccacgcaaagtactactttgaacaaaacacaatattctttcaacagtcgctttgccgatggtgtgggcaccaaccccgaagagttattggctgcggcgcatgcgggttgttttaccatgaaattggacctggatttaacgcaggccggttacactgtagaatcacttgaaaccgaatcggttattactttggataatggtaagatcactttatcggaattaacattaaaagcaaaagtaccggggattacggaagagaaatttcaagaattagccgcgggcgctgaaaaaacttgtcccgttagcaatgcattcagctttgaaattaaattgaatgctacgttgattgcttaattgattcaaaggccccggggatgatttttagaggattttgatgaaatagaaaccgtggtaggatattgttgaaaccggtatgccgttgctaggcagccggtttttcattttggcaatatcgatattcgtttcgtggtattgctaagccattttttccactactttttccctggcttgtttcctaaattcctttggactcagacctttttgcttcttaaaatatttattgaaatgactttcatccgtgaagttaaactcgtttgcaatttcagtgatccgtttatcggagtgcaataggcggtgaacaatcaattgtgttttataatttcctaggtattgctgcatggtttcacctgtatgctgcttgaaataacggcttaaatatgccgaggaaatattgaattgcttgcccaggtgatctgccttcagcttttcagggtcataaatgttattctggatataatgcaaaatatcaagggctttcgcttccgtttgttccgatacatccagttgttgaaacttagcaatatttctcgccacgacaacgatcaatgtattgaccaattgctgtatcaattccctgttgtaaatatcttggttgatcgtttcgcggataatagcctctactaccgggcgtaccaactgcttatcggttaggtttttcaggatgcaaccttgtttatgggatgcattttgcagtatatattccaagcgttgtatgttttcaccgggtatcccgctatccttcaaataaatattattaaacttcaggaaaaaaaacgtcgtggttgatttgatatcaaacgaatgacaatcttccggcgttaccaggaacatatgtccatcgtggtaatcaaacttactttgattaatacattgtgttcccgttcctgatataatatataccaattcaaagaaatgatgccgatgggcaggttcaggaccttcatctaaggttatataagaaattgaatacggagcatgtaataattcttgtttcatgctgtaaaagtacagaaatgtgtaaatattataccaaagataatacgagttgccggtataaatttgcaattacaaaatcattctaatatgaaagcaatattgttacaaaagcccggtggaacggaaaattttgaatatcaagacattcataaacctgctattcatccgggggaagtgctcatagaggtgaaagctatcagcatcaatcctgttgatataaaaacccggatggggaagggtgtttacgggcggattaaagatgaaagtccgctaatattaggttgggatgtttcagggttagtagtggaaagtttgtccgatgaatataaagccggtgatgaagtattcggtatgatccgttttcccggccatggaaaggcttacgcggaatatgttgcggcgcccgcggcacatcttgccaaaaagccggggaatgtcagccatgaagaggctgtggctgcaacattggctgcattaactgcttaccaggtgatcgtggaacaggcgcaagtaaaagatggacaaaaagtattgatacatgcagcatccggtggcgttggacattacgcggtacaggttgccaaaagtttgggcgcgtatgtgatcggcacatcttcagaaaagaacagggatttcgtgctgggtttaggcgctgatgaacatatagattatcataccgcggacctggatgccctgaaagatatcgattttgctctcgatgcattgggggatgccaatgtacttcgcaccatccctttaatgaagaaaggcgggacgattatcagcatcccttcgggcttggggcaggaggtagtagaagcagctaaagttaaccaggtaaatgccggcttttcgatggtgcagtccagcggcgaaaacatgaaagccattgcagatctcctggcaaatggaactttacgctcgcatgtttccacggcattttcatttgatgatattacgggcgctcaccaacaaattgaatccggaagaacggtgggaaaaattgtattgacattttaaattcaatatcttatatcaactatttttaaataaaccctgttttgatatgaataaaaccagttacctcttgttaaggttgggtgttgccttgagcatgttcggccacgggttagtacgtttgccgaagttgaatgcttttagcggctggatgatgaagagttttgagcagtcatggatgcctgcgcccgctgtacaggcatttagttatgccttacccattgccgagtttatagtaggattgttgttagtgttggggttattcacccgccaagcgcttgttgcaggagcaatagtaatgttgctattaatattcggaactacggtggttgaaaattgggaagctttgccggcccagttggttcacctggcattttttgcggtgttgctgcatttcttgtcctcgaatagttttgcgatggatataaagcggaatgtttcttaaagttttttagaaaaggttgtttggcagttccgggaaagcccgcgtgaaggatacggcaccccggagcagcccgacccgaaggggcacgcccggaaacaatatccctgtatttttgtaaatttagaacgtgtagaaacttgctaagaatatttatttaatattttctattcattcaacatgacactaaaagaaacgctggccaaattagaatccctgggttccgaaaaaatgcgcttgcagcataagaaggccggggcaagtgatcatcaatacggggttaagatgggcgatatcaggaaggtagcgcaaagcatcaaatccgatcatgaattggccttggaactttgggatacgggcatcatcgatgcgcaattcctggctatattaatcatgaagccaaaaaaagtgtcgaaagatgatatcaaggaattgatacgatcggtgcaatttgtaaatgttgttgattggctgtattcctatattataaaagctcatcccgataaagaggcgctccgcttggagtggatgaaatcaaaggatccggtagcggcaaggttgggttggagcctgaccagcggtcgtgtggcgcgcgaaccggaaggtattgatatagaagccttattggatcgcattgagaaagaaatgccgaaggccgcgccgcaagttcaatggacgatgaactcaaccctggcacagatcggtatttgtatgcccggataccgtgaaagggccctatctatcggggagaaattgggcatttacagggattacccggtgtcgaaaggctgtacttctccttttgcgccgatctggattaacgagatggtgcggcggaacaaccagggataaccttataatatttcttttataatccaatcaaattccaggtcctgcccctttaataaatcaatatcccggtaagttatcttttcatcaatatgtacgcctactttttgagcgggtgcgccgccaggataaaatatgccattgccggtaaattccaagctatagttgcccggcaaggccattctcttgatatcaccgtctgccccggcagattgttgtcctatggtaaccgatcccgggaaaatatattgaaggttcatcgtattccattcgctggcgcttaatgtttgcgggttgacgatgataaagactttaccattataagtatggcggcttttatttgttagcactggaaaatatatggcaggttgatccgcgtaaataaatgttcctatattttgatggtactgttgataatatttaccgaaataattatccttatcagcaaaatatttataaatataagtgtaaacaaatccgccccaatcgggatatcccctcatatcgaaaatgatcgctttctgttgagaagcagcgagtagcaggctgtccatcgtttgatcgatatgatcatctgctacgccggagataaacttgtaggtttgatcgatcctgaaataagcaatcccgggatgttccagtcgatgctgccttttgcgtttcgcttcatcgttcaggtattgtacaatcgaatcaatatgctttttatctgtaggtttaataaattctattgctgtttccactgtatccccggagttatttctttgaatagccagttttttaagcgccatatcatccggccagattagattgtcctggtattgagaaatcctgtataatagcactgacgggttggaagccgataataattcctttttagattgtatgatatcttggatgcttttaccattaaccgcaacaattctatcgcccgcatggataccggctttttggcaggcatcaggaatcatcaattttgttaccagcaggtaatgatcaaagacgctataatcgaaaggtgcatacagttttgtatggaagatatctttcgcaaaatgcaattgtttatagaaactaaaggcatgtgtatcttccaaaggcgctaccaacttggcaaggataatttcaaaatctttcctcgattggcaagtgatggtgcgagataataaactttcgaaataagcatcaaaatttttgttcattaattgcttatgagggtacaagtaatcgatacagccttgtatcttggccagcgccagtaacctgtattccaacgggagattttcttctttggggaaatcataaaccttttcatgcgggatatcagcttcatagccattgttagggatataataatgctgagggccggtaaaacgatgttggtaaatgttttccagtaattgtttatgacccttatcgatgccggccgactcccggaaccaactgaaatcttgattggattttatgacatcggtagcggtcgccttagctgctgccgtggagaaatgttgttgcaaattatttgtcaataaagcgatcacggcattatgatcggtcgtagcagtaattttttttacgtcctgtaagaacaaactatcggcattcagcttcccggttgcaaagtcggggtgataatacttaaggtaattccatgttttaaaaaataccgtatagctatttttttgtgcagaggcgcacaggtgtgtcatggatatcagcaagaagtaaatacatttcttcataagcatttgtagctgttggatgggttttcttggaaattccggtataggaaattacgatattaaaattgaatttggaagggatgcggaaacctggtgtaaatgcatgcattgctaggttcgctgatgagaaaggaagtataaataattgaaatacatatcatatacaagtttgtatattgacagtttacggtttcccgtaaaattttacgaatggaagaacctaacttttggacataaaaaaacccccgttaaagtcgagggaaacttaatgttttcacagcgggataacccttattgtgatttgcttcgatgtgaagatatatagatttattaaattttcctaaatttattttcctatccacttatgatcaggacttataaaaattttaactgtatagaacctgcgtgtgattgtttgttatcaattcacatcaattaacattctttaattccttaacctcaaactatggttaaaaatgtattaggaattgacctgggggtcacttctataggttgggctttcgttcatgaagataccaactttggagagctgtctaaaatagtacaggcaggcgttaggctagtagcgctttcaacggatgagcaactcgaattcgagaaaggcaaacctttatctatcaatgccaacaggacgcttaaaagaagtatgcgccgcaatttgcaacggtataaaatgcgcaggaaacaattgataaaattgtttaagcagtataatattataccggaagatgcgattcttgcagaggatggtaaacataccacctttgaaacttatgaattaagggccaaggctgttcatgagaagatttctttactccaatttgccagggtgctgctgatgcttaataagaaaagaggttataaaagcagccggaaagtgcaaagcgaggaggaagggcaggctattgacggtatggatgtagcaaaaaaactgttccatgataaaattacgccgggacaatattgcctggaactgttaaagaatgagaaaaaatccttgcccagtttttaccgatcagatctacaggatgaatttatgaaagtatggaatttccaaatggcattccatccttcaatactcactaccgatttgttaaaaaagctagatggcgttgggcaaaaagccaccgctgccatcttttataaggaattaaacattactacggctgaaataaaaggtaagagagacgaaaagaaattagcatcttatcagcttagaagtgatgctatccaaaaggagcttagcatcgaggaagtagcattcgttcttgcccaggtaaataatgacatcaatagttccagcggctatctcggagccattggtgacaagagtaaagaactgtttttcaataagcagaccgttggggaatatctttataaacaattaaaagagaacccccatgcacggcttaagaaccaagtattctacaggcaagattacctggatgaatttgaaagaacctggtcttgccaagcgcaatttcaccccgaattgacgaatgacctgaaaaaagagatcggggatattacaatattttatcaaagaaagctcaaatctcaaaagggattaatttccctttgccagtttgaacaacaaaaacgcctggttaccaaaaacggtaggcaaatcatcaaaaccaccgggtatagggtttgcccgaaatcttcccccttgttccaagagttcaaagtgtggcaaaatttacaaaacgtggaaataaaagccgatggggtaaagggtagattaagcgaagaacaaaaacagctcctctttgagcaccttaacatgaagggagaactgagtaaaaccgaagccctgaagttattaaagcttaatcctaagacggctgatatgaactttacaaaattggaagctaaccgaaccaataataccttgtacaatgtatattgtagaattttggaagatgccggatacgatttagcagatattttgaaagtaaaatcagataaagatcaaattaccgtatctgattccaccttacccgccaaggaaattacccgcataatagcagaaatattcggatcgctcggcatcaagacatctatcttggattttgatgcacaactcgatggcaaagcttttgagaagcaagattcttatttattatggcacatattatattcttacgagagcgatgattctgcctccggtaatgaaaaattgtatcaaacgctggaaaagaaattcggttttagtaaggagcaagctaaagtattggcaagcatatcttttgaagatgattatgccaacctgagcacgaaagctttgagaaaaataatgcctttcatcattaccaataagtatgacgaagcttgtgcattagccagttataaccattccaattcattgactaaagaagagaaagaaagcaggaagctggaggatagattagaattaattccgaagaacagcctgcgtaacccggtagttgaaaaaattctcaaccaactggtacatgtgattaatgccatcatcgaagatcccaacatgggtaaacccgacgaaatcaggattgagctggcccgggaactgaagaaaaatgctgccgaaagggaggaaatgagcaggcaaatagcacaggccgaccgggatcataaagcgatcagggataccatccagaaagagtttggcattgccaaccctagcaggaatgatatcattaaattcaaattatacgaagaattgagctttaatggttatcatgatttatatactaatgcttatataaataggaaggagctgttttctaataagtatgatgtcgatcatatcatcccgcaacagtcattattcgatgatagcttttcgaataaaacgctgacgccaagggatgtgaatcttaataagggtaaccgtactgcttatgattacattgaacaggtgcacggcgctgaaaaattggaagcatttaaatcaagggtacaggattatctcgataaaaacattaaggcaaatcccggtgccaaagctaaagcgaaaaaactactgatgcccgcttctgaaataggggatggcttcatagaaagggatttgagaaatagtcaatacatagcaaaaaaagcccgtacaatcttggaaaccatctgtagggatgtggtggctacctccggcagtattaccgcgcgcctccgggaagactgggacctgatgaatattatgcaggagctgaatcttcccaaatacagggccatcaattataccgaattaagggagcgtaaagacggttctcaaaaagaggtcataaaggattggacgaaacggaacgatcaccgtcaccacgcgatggatgccattacagtagcttttaccaagcataaccatgtacaatatttaaactatctcaatgccaggaagaacgaaagccataaaatgcatggaaacatcattgccattgagaaaaaggagaccgaatatatccaagataaagatggtaatggaaagaagcggttcaaatcgcctatgcctaatttcagggttgcggcaaagaaggctttagaagagatattagtgtcctttaaagcaaaaaataaggttgtaaccaataataggaatcgctacaaggtaaaaaagctgaaggaaggggttcaatatccgcccatacagcttacgccaaggggatcgcttcataaggaaacggtgtatggaatattgcataggtacaacactaaagaagaaaccatcggcgctaaattcaatgcggagcttatagaaaccgtggccaaccccaagtataaagcggctttattacaaagattggcagcaaatggccatgatcctaaaaaggcatttaccgggaaaaacagcccggcaaagaatcctatttatattaacggggagggctctgaggtattgccggcaaaagtaaaagtagtgaaactagaaccggaatataccattcgaaaagacatcactcccgaaaacttcagtgatgaaaagagcatcatgaaagtaattgatgttggaataagaaacattttgctcgaacgattaaaggcctctaaagatgcgaaggaagccttttctaacttggatatcaaccccatttggttaaacaaggccaaggatggagatccatctaaaaatatcccgatcaaaagggttaccattacaggggtgagtaatgcggaggcattgcatcataagcgggatcatttgggcaatcatatcttggacaaggaagggaataaacaaccagtagattttgtaagtaccgggaataatcaccatgtagccatctacagggacgcaaacggaaagctacaagacaaactagtatccttttatgaggcggttgaaagagccaatcaaggcttaccgatcatcgacaaatcttataaccaaggagagggttggcaattcttatttacgatgaagaagaatgagtatttcttgtttcccggagatgggtttgacccaaaggaagtggatttgttggatccgaaaaataagactttgattagtaagtatttgtttagggttcagaaattggcggataggtattttgtatttaggcatcaccttgaagcaaaggaagatgacaatttaacattaaaaggaatgacctttcataggttacaaagcttggaaccattggatggaatcattaaggttcgaattaatcacttaggaaacattgtgaaagtaggggaatactaaaaatggttgctcatgattaaacgtaccctctattttggaagcccggcctacttaaaaaccaatttggagcaactccaaattgagctcccgaaaactggagaaaccaaaatagcgccaattgaggatataggattgttgattctggatcatcaacagattacaattacacaagcattattagctaaattattagcgcaaaatgtggctgttattacttgcgatcatacccaccacccggtaggtttattgctcaatttggatgggaatacattacaaagccaaaaattcagggcacaggtagaagcatctgtgcccttaaaaaaacagctttggcaacaaaccgttatcactaaaatcagtaaccaggctaagttgatggctatggaaaggctggagcatcagcggttattgaaattagcaggcgctgtaaaaagcggtgattctgataattgcgaggcccaggccgctacatattattggaaaaatctgtttcccgattttttacagtttcgaagggaacggtatggtcctcccccgaataatttattgaattatggttatgccatattgagagcattagttgcccggagcttggtaggctccggcttactaccaactttaggtatttttcataggaatcaatacaatgcttattgcttggcagatgatattatggagccatacaggccctttgtagataagatcgtttgccatatagtaagcatgaacggcaggtttttagagatgacccctaggatgaaagaacagttattgagcatcccaaccatggatgtattagttcaaggacgcaaaagcccacttatgcacgcagttcaacgcagcaccgccagcctggcgaaatgttttgaaggatcagcgcgcaaaattatttatccggagcttatttaaagcccgaaaaagtatgaactcacgttatagcgcatatagagttatgtggattctagtattttttgacctccctaccgaaaccaaacgggatcgtaaaaattatgcgaagttccgtaaacaaatattatctgatggtttcgcgatgtttcaattcagtatttatatcaggcattgcaacagcaaggaaaatgcggatgtacatatgaaaagagtaaaggggatattgccacccaagggacatgttggcattatgtgcgtcacggataagcaattttctatgctcgaaatcttccggggaaaagtaggtatagacccacctccaaccttacagcaacttgaattattttaaaataggatgaaaaaaatgaagcctaaagccatttttttcatcctaaaatacaatctaactatattgttatcaatcaattagaaagattgtgttgtgttagcactaagctacagaaaaatttgaaagcaaatcacaactcaaggttaaggggattaattgcttttgcgttgtgttagcactaagctacagaaaaatttgaaagcaaatcacaacgtcctttgtgatggcacctatacgcaacttgttgtgttagcactaagctacagaaaaatttgaaagcaaatcacaacttttcagccacggtataaactaattctagagttgtgttagcactaagctacagaaaaatttgaaagcaaatcacaacgcaagccccttaaaatcaatttctagcaggttgtgttagcactaagctacagaaaaatttgaaagcaaatcacaactatgtctgtatatgcaattaatgtaagcgcgttgtgttagcactaagctacagaaaaatttgaaagcaaatcacaactgataaagtaaaggaagaaagcgataggtgttgtgttagcactaagctacagaaaaatttgaaagcaaatcacaactggtatggttagcggcgcattacggcagctgttgtgttagcactaagctacagaaaaatttgaaagcaaatcacaacaaatttggagcgttttcgggaacgaatttagttgtgttagcactaagctacagaaaaatttgaaagcaaatcacaacgagggagggcggcgatgaccagcccgatgagttgtgttagcactaagctacagaaaaatttgaaagtggaactgctacctttgagtggacatatagttaagctctttccttaactttgaatacaatgagtaaaaaagaaagaaggagttatgataaatccttcaaactgatggcagtagaattgcgcagaagtggcaagccagccgtaactgttgcaaaagaattgggtatagctgcggaaatgcttcgtcgctggaccagggagttcagtgtacatgacacccgtagttttcctggcaatggaaaacaggatctgacaccggagcaaaaggaaatccaggccctgaagaaagcactccaggaagcagaattggaaaatcggatactaaaaaaggcagtgagcattttctccagggaagacaacaaatattcaggttcataaaggaccatcaggcagaatttgatgtcgagaagatgtgcaaggtgttcaaagtaagccgtagtggctattatgcctggtcaataagaaaaccatcaaaactttccctgtacaggcaagtgctttgcaagggagttgaagatatctaccacaaaagcaaaggcagatacggcagccctaaaatagttgccgaacttaggtctatgggactgcatgcctccaggcccagggtggccaggatcatgaaggacaaagggtttcgcagtattattacaggcaagttcaaagtatgcacgacagattctaaccataaactggaagtgtcggccaatatcctcaatagagaatttactgccagggcaccatcagagaaatgggtttctgatctgacttacatccggacaaaaaacggatggctttacttaacagccatcatggacctgtttgacagaaggattgttggatggtccatgagtacaggtatgacaaccagggagactactgttgctgcctggaatatggcgattagaaatagatccgtggcacccaatatggtttttcactcagacagaggtgtacagtatgccagtgaggagttcagagatctgctaaaaggcaactctgtacaacagagtatgagtagaaagggcaactgctgggataatgctgtaatggagaacttcttcaagatacttaaatcagaaaccggccaccatactgtatatgattcagtagaagtcgcaaaaaaagagctgtttgagttcatcgaaatatggtataacaggcagcgaaggcattcaatattagggtatttgccacccgaagaatttagtaaatctattctaaaaaaagcagcttaataagttgtccatttttttgttgcaaatccaaaagcaaatcacaacccgcttcgcatcccgtaagatgccaggcaagttgtgttagcactaagctacagaaaaatttgaaagcaaatcacaacggtaaaatcaaggggttcgtcatttaaaggttgtgttagcactaagctacagaaaaatttgaaagcaaatcacaacaagcgcaagcctcgtcccacatctgagtcggttgtgttagcactaagctacagaaaaatttgaaagcaaatcacaacaaagatgtttttgatattttagacctaaatgttgtgttagcactaagctacagaaaaatttgaaagcaaatcacaactatctcatttatttgccttgatgataaattgttgtgttagcactaagctacagaaaaatttgaaagcaaatcacaacgctccattcaaccaatttgccgctttgctcgttgtgttagcactaagctacagaaaaatttgaaagcaaatcacaactactgagttcaatgaatatttcttgccaacgttgtgttagcactaagctacagaaaaatttgaaagcaaatcacaacgacaattaaatgataaaaactatgttagaggttgtgttagcactaagctacagaaaaatttgaaagcaaatcacaactaaccctgtaggtgatagacggttagttccgttgtgttagcactaagctacagaaaaatttgaaagcaaatcacaacctagctacgtggatttatgttacaaattgtgttgtgttagcactaagctacagaaaaatttgaaagcaaatcacaacggcgcctgtatttcctaaaataaaaattaagttgtgttagcactaagctacagaaaaatttgaaagcaaatcacaactatcataatgacaatgctttttaccagatggttgtgttagcactaagctacagaaaaatttgaaagcaaatcacaacagccgtcacgaagcagtaatcgctaaaattgttgtgttagcactaagctacagaaaaatttgaaagcaaatcacaacacggaagcatcaggcacgtctagtacaattgttgtgttagcactaagctacagaaaaatttgaaagcaaatcacaacaaagtttcgaattagaatcaaatgaccacgttgtgttagcactaagctacagaaaaatttgaaagcaaatcacaacaccatcatgtaatcatcttcaggtaccggttgtgttagcactaagctacagaaaaatttgaaagcaaatcacaacaatacgcagtagaggtatatccattgctccgttgtgttagcactaagctacagaaaaatttgaaagcaaatcacaactcacttggaatgttgtacgcctttccaaggttgtgttagcactaagctacagaaaaatttgaaagcaaatcacaaccaacgcctttaatgcccaggatgttaattgttgtgttagcactaagctacagaaaaatttgaaagcaaatcacaaccgatcgctgtgttggggtgttttcctatttgttgtgttagcactaagctacagaaaaatttgaaagcaaatcacaactaacgcggttactacgcgaggatgttcgacgttgtgttagcactaagctacagaaaaatttgaaagcaaataaggatcaagtaaaaatcttgtaggagcagaaaataaaaatgggaacaatacatttgactgtactattcccgcttttgtggaaaagggaggggaaatgtcgaatcttttggaggattttgaagcattaaacagtttggttaaaaatcaggttaggatcacttatagtctctattcatctcatatcgtctcatttcattgaaatagcttattctcgtactgtgttgcatcattcgcagtcataaaaaattgaaaccaatcacatcaaacctatcagttctatctataaccgtacctatgcggttgtcgcctctatgaaccatccataccttcactgaaaattaaattcattcattaacttccaaaaaatcagaaaccatgaacacgatgcaccagcgttcggtcaacattaacgtgttgaaattattaaatgacgaactacacagcctccaggatattttccaggaacaagtgtgtgaaatgctgaacctaagtcctgaagcattagcgcaaaagttggaaaatgaagcgatatgtttcaacctggcggaacaacaagccctggctgccattttcaacgacctggcggataatctatccaagtataatgcggattatatgttggaagattacattcaagatgccgtagttgcataaaggcctccaaaactcccggtaattgtagatatacctggcccgctgtatctacaattactggttacccacttcgcaattggcccgccgtaggtattttcagtatcgccgcagttttttcctgctcctggaagcataaattttttttgtccatattccttacaagtcatttttataaatgattttgtttcaatgacatatcaaaattaactatatcattctactttaatataaaactatatatcaatattaaatgaatgtttttcaatactatctaaacatttttaaatccttcctgttatttcaaaccatatacccgtatagttttgaagatgtaacccgatttttttaacctcgaataaattccaatgtcatgaagaacatgaacattttcaatgcagagattccgcaagagaaaatccaatctgctatcaacaaaatcgacgaggctttcaatgaattaaagccttacctgattaccctccagcccgaggaaagacaaatgttgcccaaaatgggaaacaagatgtttagctttgttaacaaggtgcatgaacttgccaaaagaaaccccgatttggctcccagctttttcagtatcgaagatctggaaatcgacgttgccggggcgcaaagcttggaacccttgctaaacgccgtaaaacaactttatgatggtatcgatgatacccgcatgaaatgcggcagcgaggcttataccaacagcttggccttttacagttctgtaaaagtggccagcaagcacagcgtacaaaaggccaaagccgtttacgatgatttgtcgggccattttatcaagggtgcaaataccgaatctgcccctgctgccgagaacaagccggcataattttatcgtattaaaaaataatattatttactaccccttgatgttaaataactaattcaaggggtatttttgtgtctccctgccaaggtattgcatgttttacccatctcggaagtacccctacccacttccgaggtacccccacccacttccgaggtaccccagggtacttaaaagcctcaagcgaggatctttttactccggttatcccccaaaaaaggtacccccacccacttcaaagctcctcgatcggagttccgaagtacccccgggtagttccgaagtgggtcacgattttttatttttccaagccagggtacttcggaagtgggtaggggtacttccgaagtaccctataccttaaaaaaggtcctcgattggagttccgaagtaccccagggtacctaaaagctggtaaatcggggtttttaagtgggtggatgggcttctgaagtgggtaaatggataattctaagggaggaatcgtgaaataacttgacaagacgggtaataaatgaggtcggtttattgatggcaggcttgaaaataatatagttgagatgccaatttgttacaaattggtagttttttcctttaaatggtatcatgattccagataatcgcgcattttttgttacgaaaaatcatatttcaataatatgaagtagatttgtaacaaacaaaagtagaatgacaaatgcagataccataattagaactttaagggagaagtttggctatagccaggaggtagtagcgaacttcctgggcgtgaagcgggaaatgatcagttactatgaaacgggcgcaagggaagcgcctttagaggttttagaaaaattggccgatttgtttggagtagatttagatatctttttttcagatactatggaagcggcttccacggaactggcttttgcatttagagctaatgaattcaatgaaaaagacctggaaagcattgctgcattcaggagggtcattaaaaattatcaacggataaccaacctggagggaaaaaatgcttaaagaaagatatttagaattcagggcgaataaatttcgtgaagaacatggcttgactccaacggaacccgcggatgtatacaagctgttagcaaggctgaacgttattacggtattcaaagaaataactggtaatttttccgggatggcagtcaagaacggtactggcaatttcatgatggtgaattccaatgatattttagcaagacaacattttacgataggtcatgagctgtatcatttgattatccaggaaaatttcaaaaacaggatttgtgaagtcggcacttttgataaaaaggacagtgaagaatacaatgcagattggtttgcttcttatctgctgatgccggaaggcggcatttttgaattgttacccagggaagaattgagccttaataaaataagtttgaataccattgtaaagatggaacaatacttcggggtatcgagagccgcgcttcttaacaggcttatgtttattgacctggtaagtaaagcaaaaaaggatgaattgcaaactacggggagcattaaaagaagcgctttactaatgggttacagtagcgagttatatgaaaacggaaatgcaggtaaagttatcggggattatggtgaaaaagcaaaaaaactatatgataaggagttgatttctgaaaccgatttttatgggttaatgctggatataggaatagacctggatacaaaatttgaggaagatgacaaaacagaaaggtgatccgaagatattactggatgccgatgtagtaatacatttcttaaaagcaggatatcaaatgatgttacctgccatttttcctcataggcttgtaatgctagataaggtaaagcaggaattgataaaaagaaaatcggaggccttgggaattgaaaatttcctctactggtgtaaaatacccgttgaacccatgccgaaggatttcgagatattataggagtacgcggctttaaagaagataagaggggagggagaaagcgcttgtatggcagtggcaagatttagaaatgaatttattgccagtagtaatgtaaaggatattaaagattattgtgaattatatggtatcgtttattttactaccatggatattttagaagtggccattacgaatagcattatgactgaatcccagtgcgacagctttatttatgaagtaaagcaaaaaggcagcaaacttccctgtgatacaatggctgcatataggaaaaggaatgaaaaatgggtaagtctccagttgctgaacaggtacatgtctcgaaattttattaatacattttccacccccggtttttccccgtgctattaataattaacctagattgctttcaaggcagaaattttaattgttttttattcccgctatatcgacaataaaagcattcagccgaagtatttcctttcctccattttttgtttatttttggatatcatgaatgttcgataaatgcattggattgtcgagttttagtacatataccgatctacagcttcttgaatcactaaaattcagcgaagaaggcgccttcacggagatatacaaccgctattgggaaaaactatacaaatcggcttacaataaattgaacaacggcgaagatgcaaaggaaatcgtgcatgacgtgctgctggatatttggaaaagaagggccgatctgtctatagagcacctgcccgcttacctcgaaaaggccgtccggttcagggtcatcaatcatattaacaggaaaaaaagtacggcgctgatagattccttcgaatcggtattgcaatctcctttcaaggccgacagcgaagtgaatatgaacgaatttatcaagctcctcgaagcatggatcgccgtgttgccgggaaagcagcgggagatatttgttaaatattatttcgataacctctccacgcaggaaatagccgtagagatgaacttatccaggaaaacggttcaaaacaatttaagcattactacccaatacctaaaggcaagatttaagcacctttctatcctattattattgttgacaaacccaccccactaaattttttttaaaaaatttctgattccttcgggaagaagctcattcttttgtgactatagttgtaaaggacgattgtatgctttctgaaaaggacaaaatatatctaaggcaagtactcgaaaggtatgaaaccggacgcgcaacgccggaagagatccactttgtagaagtgtacatggactatttggatgaacttcataaagatgtggatcccttgcataacttgggtgcggaaggcaagccgggtattgaacaggagataaaagaaaggttattcgaaagcatacataatacacctgttccggttattaacatacaccgcaggccacgctttacttggcaggcagcggcagccattatttttgtcatcctcggcgctgctaccacctggattttatataaccagtataataaacatccgtcaattgttgccatggaagat

SEQ ID NO: 2162 - DNA, 24227 bp, synthetic construct
  misc_feature 1..24227: note = Synthetic
  source 1..24227: mol_type = other DNA
aagaagcctttctctacacacgcttgtttacgcattgtgtattcatagtaagtctcgatataatactctttatcaaaatctcctaacttatgggggtaacttgctaagacagcctcaataaaagcttgtttactctcatgtgtttgtgacaaatgcttaaattctctttccataaatttgtatagtgcttgcacatatttccaaccactaaagtttgtcagcgaaccagttaatttatacttgtcacctattcgatcaaacatagaaaaagattcgtagggattattgggctcgccttcctctgcaaaccacaaaccattatgtgaaacaatatggactgtttctgtggtttgatcgcctttccattgaaactgtaaactacacaaggggtaataaaaacctaaacactgctctgtaacaaatacctctgtataagctggaaacaatttaatcttaatactatcagttgctatataggtcaatgtatcactgcataattcacgccattgcaaactgcgctttaaactgtgatcttgattacacgatagacacattcgagttccattgtgaatagtactaacaccataaacaaccttatgacatacctgacactgttcagtaatcatacctttggcacataaagcacacataccatcgtttttttttgctgtcgtaggtaatattagatgaccacaagtcttacaggctaacttttccatatcgtaagatgattaacttttcaaagccaaaatacaacatatacaataaaccaacagtaaattgtagtttaaatcttctttaaatcatttcgataataacagtatgcactaaccctaaataaaagaacaactattcacaagtaagcattgttttagtcgctcctttcgcgttgtttgagatagataaagcaggtgtgctaagtaagaaatcaatatggaatgttttgatttctttaatttctttgggtttgataaaaatagaatgttctccttgtttggcgtgattagtgccataatacacatgttcaaatgtcaaggtatgtgaagacttattgacaatataagtatgctgtccaaaagcggccttatacttccctagagaaacgggaaacaaaataacctcttctttatatgcagtacaagaataaacggtcaaaagtctagggggaaacaagtacaataacccaataatcaaggcaaaatctaaaaacacccaattactttttaatattcttttactgaatcgataccgttgagaaagaactaaccctgttagtgctaatattcctaataagatataaaaagtatgtatagaaattgccatagtatattttattatgctattgatatcaattaaaaaataaaaacacctccatacactgtttcaataaggtatggtaaaacactagtgtaataattttctattcacacaaaccaaatatactattttaacttaaaacacataaacaatattactattttaatataaatacaaaatcaaaaaaaaaaaaaacacttctaattcacatatatacacctttatatctgcttaatatctatttgttctccgcgtataagtagtacttgatgattactaagtggaacaagtggtaattgatccataaaatcctcaataatctgatcgactacctcggcaaatggagcattcttaaaatgagctataggatatttatctataagaccaagagctgtggtaccttctaataagagagcctttgctcgctcatccattgcttctatatacttaatatctggagacatcaccatacttccggcagaagttcctatatatactttaccctgagctacctgatctataattatttggtcagcaccacttcgttttaattcttgtaacaaaaagaaagtattgcctcctgaaacaaaaatataatcattgctcgtaagcttttctagaatctcctctagagtagcattggttaattctaacacatcaactttaattcctaatgcttcaaatgctaattggtcattgcttacatgtcctgtatactgctctataatacttgctgttggaataaaagttacgctctttcccttaacctgttctcctacaaattcaataaacaaactcatgacatcactaaaagacgccgctaaaaacattcttttcattacttcaaaccttattattcaaaccttaattgaagttgatccttttgattaaattctttattctctagtgttagcaaaaactcctttctccaaagtcctcctctataccccgtcaaactaccatcggttccgataattcggtgacaaggaataagtatagctattgagttcattccattggcattagctactgcacgaatacttttggggatatcaaggtaatctgactgttgcttatacgatcttatctcaccataaggaattgataataacccccgccatactttttgttgaaaatctgtaccaatcaaatctaaaggaaccgaaaaatccgttaaccttcctgaaaaatacgcttcaagctcctgttttaactgctgaatatatggatgatcacgttgaacaattacagcttgttttgcctgagttaaacgttgaagttctttatctaagtctgctaaatcagcaaattcaagcagacatattccttgtgcactcgcacaaaccactactgtaccaataggggtttctatttgttctaaattaattatttcttcctccatatctaccttaccagaattccttttaaattattcgtaaatgtaattatttttaaaagcgctctatcaatgcaaattgccctttataatagcaaaaaataggtcccctttattcgagggaacctattgtttaatttatactagttacatttctaaccgattatctcttacccgacaatatgagtaaatagcgcctgattatcatttaggtattgataattaaacgcgtgagcatctaactgtttaatcaagcgtttataatcatctttattagctagttcaacaccgacaacagctggtcctttttctctattggttttcttggcaaactgaaagtatgtgatgtcatcgttatctcccaagacctgattaacaaactcttttagcgctccagggcgctgaggaaaattgacaatgaaataatgcttcaacccttcgtgtaaaagggaacgttctttgatttcctcggtacgagtgatatcgttattacttccactaactacacagacaacgcgtttgcccaccaagtgttccttatacaaatccaaagcagcaatactcaatgctcctgcaggttcgaccactaatgcctcttcattatacaatttgaggatagttgtacaaactttaccttctgctactgtcaatacttcgtgcaaattttccttacaaatctcaaaggtcaattcgcctactcgtttaacggctgctccatcaacaaaagtatctacacttgacaaagtagtattaactttattaaccatagacaattgcatagaagcagccccttgaggttctacaccgatgacttttgtctgtggactcaactgtttaaacactgtacttacaccagcggctagtccacctccgccaattggtacaaatatgtaatcaattggttgcttgatcatctgtaaaacctctaaccctacagttccctgaccagctataacttgttcatcatcaaatgggtgtattaatactgccttagataaatcacaaaatgcttttgcctctacaaaacaagcatcaaaagtatctccttttagaacaatctcgaccatttcttttccaaatagcttcacttgatctatcttttgctttggcgtggtaatcggcataaatatagtagcgtgaatacctaattgattacaagaaaaagcaaccccttgtgcatgatttccagcacttgcacagactactccagtagcctgctgctctggggtaagtgtacttattttattatacgctcctcttaatttataggatcgaacaggctgtaaatcctcccttttcagataaatatctgcctgatacagcccgctgaggtttaggttttttattaagggggtttctaccgtgactcgtgctatattttgttgagcttggtatattttagtgattaggttcatgatttagatggtcttagtttacgtacttcagcgcctgcttgccatagttcactttctctgagttctttcaattcttcctctaacttcgctctatagtcttttttactattagcctcaattacaatctctgcttcacgtccagaagcaacactttcatacaaattttcaaatacaggggttgtagcgtctctaaacttgtctttccagtctagtgctccacgctgagctgtagttgaacaatttgcatacatccagtccataccgttatttgctaccaaaggcattaggctttgagttaattcttctacggtctcattaaatgcctcacttggcgtatgtcctttgcctcttaatacattgtattgcgcttcaaaaattccagcaatagctcccatcaaaacaccacgctcaccagtcaagtcactatacgcctctttttggaaggtcgtctcaaacatataacccgatccgatggcaatccctacagccaaggcacgctgctctgcacgacctgttgcatcttgataaatagcataacttgaattcaacccacacccttctaaaaacaacgttcgcaatgaagttcctgatccttttggcgcaactaaaaaaacatcaattccagcaggtggaacaatactcgttttctgattaaacgctactccaaatccatgcgaaaaatacagtgctttccctttagttagttgtgcttttacagtatcccatgtatgtatctgtccagcatctgatagtaagttcataacaatcgttccgcgttgacaagcctcttctatatcaaacaaattttttccttcttcccatccgtcagctacagctttttgccaactgtccgaattcttacgctgaccaacgataacattaaatttattatctctaaggtttaacgcttgacctggaccttgtacaccatatccaattactgctaaaacctcgtcttttaatacttctcttgctttatctaatgtaaactcttgtcttgttactacgttttccagtgttcctccgaaattaatttgtcccatattatatgttttttaattgtgttatttttattattaaaaccctttaatgctattctatcatagctttattaattgctactcttcctgatcgagtaaactcaaggataccgaagctagataacttcgcaaataaactttctatttcttcaatatatcctgtcttttcgatcgctataaactctctatcaactgtaagaatacgagcctgactctctctgatgatctgttctaccgcgccattagaaagtagatctgtctttaccttatacaaggctaattcctgataaataatttctgtattcttatgagcaaacaccttaaatacttccactaaccgctccaactgaccaattagcttatcgatttgttcctgtgtacttttaaaaacaacagtatacttaaaaacctgtttcacttctgactcagatactgtcaaactatctagattaatatgtctacgtgtaaacacattggtaattctggtaagcataccgatactattttctgtaaataccgataaggtaaattcttctttcatcgctttaattttctaatttaataatacctctgacacacttgctcctgtaggaatcatcggatacacattctcctctttttcaacaataatctctaataaataagctccaggagcttccaataattctactatagcctctcttaactctgtctgttcgctaatctttttacctggaatattgtacgactgtgcaatacctacaaaattagggttagtcatctcggtaaagctatatcgcttctcaaagaacaattgctgccattgcctgaccataccaagaaaactattatttaaaataatcatcttcaccccaatatcactttgcataatagtacctaactcttgtatattcatctgaaaaccagcatcacctgcaatagcaactactgtttgatcaggtgaacctagcttggcaccaatggctgctggtaaagcaaaccccattgtacccaaaccacccgaggtaatatttgtattattcttattataggcataattacgtgctgtaatcatctgatgctgtccaacatcactaacaacaactatctctcctccagttaattccgttaaaactttcaaggcatcttccatcataattttagtagaatcatgcaattgtttgttcttagccaattgagtttgttcataatcctttcctaatctaaactcctctagccagtgagtatgctgcttcggctctaccaaccccatcaatgtttgtaaagcgtactttgcatcagcatgaatagctacttctgctttgataatcttatttagttcagcggcatcaatatcaatatgaataacctttgcctgtttggcatacctagaaacatctcccgtcactcgatcgtcgaaacgcataccgattgcaattaacacatcacattcatttgtcttaacattagccgcgtagtccccgtgcataccaagcataccacagaagttagcatgattattaggcaaagcacctaaccctaaaagtgtagaagctgttggtaatcccgtcttctctacaaactgtcttaactcttcttcagcctttgacaagacaattccttgtccgattaacaaatatggtttttttgccttattaatcaattcagcagccttgataaaacctgccagatctggctggggactaggtgcataacttcgcacattcagacagcttttataatcaaatgtcgtctgatcaaactgagcatctttggttatatcgattaccacaggccccggtctgcctgacttggctaaataaaatgctttagctattgttggtgcaatctctgaagccttagttacctggtaattccacttagtaataggcatagagatacctatcacatccgtttcttggaacgcatctgtccccaacaacttagaagttacctgtccaatgatacacaccacaggagttgagtcgatataagcatctgctaaccctgtgattaagttcgtagcaccaggtccagaagtagcgaaaacaacacctacctcccctgaaactctagcaaagccttgtgcggcatgtatagctccttgctcgtgacgcactaagatgtgatttaattcatccatcttatcatacagcgcatcatagataggcataatcgccccaccaggatatccaaatacagtctgtactgattcgcataacaaagcggatataactgcctgagcccctgttattttttcttgttgcataatttattatttgtgttgttggtcttggtttaggaacctctgtccttaaatcttttatttaatcctctttatcagtaatacagccttctgaagcatcagaaacactctttaaatatttatataatatccctttggtaaacttcaattctggtcttttccatttcgcacggcgctgtgctaacttctcatcactgaccaataattctaacttgcgcttttccacgtcaattaaaatctgatctccattttctactaagccaatcactcctccatcatacgcctctggagtaatgtgtccaacaacaaaaccgtgagttccaccagagaatcgaccatcagtaatcagcgcaacacttctacctaagccagctcccataatagcagaagtcggtttcaacatttcaggcattccaggccctccttttggtccacagtaacgaatcacaattacctcaccggcctgtacctcaccagctgaaacacttgcgatcacggcatattcatcgtcatatactctagccgctccttgaaaaaacgtaccttccttaccactgatcttcgctacactacctttagtagctaaattgccatagagaaactgtaagtgtccactgcttttgattggtttatctaaacctaagattacttcctgtcccgctagtaagtcctctgcctgttttaaattttcagaaacagtctttcccgttactgttagacagtctccgtgtaaaagtcctttacctagtaaatacttcataatcgctggaacaccaccaatcctgtgtaaatcttccatcaagtactttccactcggctttagatcagcaataacgggtacacgatcacttatcgcttgaaaatcttttagcgtaattctaacatcaactgcatgagccatggcgattaagtgaagtacagcattggttgatcctcctaaagcaataaccatcgtcatcgcattttcaaaagcttcacgagtcataatatctctgggctttatgtccttttctaacaaatgataaagagcggctcctgcatctatacactcctgttttttctcttgactcaatgcgggataggaagaactatgtggtaaactcatacccaatgcctcaatagcagaagccatcgtattagctgtgtacattcctccacaagcaccagcaccaggacaagcatgtttaatcacacctttgtaatcttcttgtgaaatctgattgctaaacttcttgcccaatgcttcaaaagcagacacaatatttagtgattcacccttgtacttccccgaatggattgttcccccatacaccattattgctggtctatttagtcgtcccatggcgataatcgctccaggcatattcttgtcacaacccggaatagctatcaccgaatcataccactgagcattaaccactgtctcaatcgaatcagcaataatatcacgagacactagtgagtatttcattccttctgtcccgttagaaataccatcactcacaccaatagtattgaagatcagaccgaccatatcacactgactaacaccctgtttgacgtattttgccaagtcattcaagtgcatattacacgtattgccttcatagcccatactgacaattccaacttgcgcctttgtcaagtcctcttcgctaagccctattccgtagagcatcgcctgtgcggctggctgtgttacatcttgtgtaattacccgactgtacttgtttaggttattcattgtatttattttttaattggttgttattgcttgattaattaggtattactagactattgggtacaaaaaaagcctcccgatatcgggaggctttagtaatactgtatctctatataaaaacaaaaattagcatagcggctcccgtgcaaatgtgttaatcacaatcacaataattaggaccactagaatgctaactaaatttctcatttctttcttttgtatagatcaaagttaaaaatagttttaacacctacaaacattactcatcttttttatcaataaaaattcaaagattaatcacaaacaacttacattattcaaacttactcgttataaaacataaaaaaatcaacaccaaagacaacaaactaaaaaatactaacattcaaacaaacctaatactctattaaaattttagcaacccaaagtataacaagtgctaactcgctgtttcgttttaataaaaaggacaatatacttcgtcatttaaacgctatttacaactaaaaaaagaagggaaaaaggctcttttagccttattataaaatcgaagaagaaaagttcatgaaaaggaacaaatcacttttgataataaaaggtctattaacaaaaaagacaccgaagggtgtctttgtattttgaatgttaataattttaaaggtttgccccgaagatagtcgaggcactaaatgttttcacaacggaataatccttattgtgaattgctttcattattgtgttacaaatatataatcttttttacaatataaaagtataattattcaaataatttattgtaatattatatagtattcaatattttactgacaaaaattagcaattatgaaaaaaatacttggtttagacttagggacaacgtcaataggctgggcttacgtacatgaagctgaaaatgaaaaagaaacctcttcaatacaaaaactgggcgttcgagtaaatcccttaaccgttgacgaacaaatcaactttgaaaaaggtaaacctatcactactaatgctacaagaacagaatcacgttctgcacgtcgcaatctacagcgatacaaattaagaagagagcatctaacaaaaattcttacggagaacaattggataagtgaagcttctattttaactgaaattgggaaccaatctacatttgaaacctttcgattaagaaataaagctgcctctgaacaaatatccttagaagaattatcacgtgtacttttaatgattaataaaaaacgagggtataagagcagtcgtaaagttaataatacggaagatggtcaattaattgacggtatggctattgctaaaaaactttaccacgaacagttaacacctggtcaattatctcttgaattacttcaaaaaggtataaagaaattaccagattattatcgttccgatttaaatgaagaacttgatttaatatggtcatttcaacaaaagttttatcctgatatacttacaaaagcttttaaagataacataaagaacaaaggttcaagagcaacctctgccctattctgggttacctataactttaatactgctgaaaacaaaggaacaagagaggagaaaaaaacacaaagttaccaatggcgtgttgaagctttaagtaaacaactaacaaaagaagaagtagcctttgttattgctgaaatcaatggacaaatacataattcatctgggtatttaggagctataagtgatcgtagtaagatattatacttcaataaatggactgtaggtcaatacttatataagcagctacaagaaaaccctcacacccgtcttaaaagtcaagttttttatagacaagattacttagatgaatttgaaacaatatggaatacccaatctaagtactatccaactcaactaacttctgtactcaaaaaagatataagggataccatcattttttatcaaagaaaactaaaatcacagaagggattaataagtttttgtgaatttgaacaaacacaaaaacttattaatggaaaagtaaaaatagttggtaaccgtgtcattcctaaatcttcacctttgttccaagaatttaaaatatggcaacaattacacaacgtaactttaagaaataaagagactaatgaaacttgttatttagcagaagaacagaaggttcatttatttgaagaactaaacttgaaaggaaagttaacaagtacccaagttctaaaactaatagaaagtaaacctaaaaaatgggaattaaactattcagaattagagggaaacaacactaataaggtgttatacaatgcatatcttgatatcatcgatgatgaaggatatgatgtgagaaatgagttaaaaataaaactaaacaaagatgatatagaattaactgatttagatgtcgatgcatctcaaatcaaagagatgatttacacaatttttaaagatttaggtatagacactactatcttagagtttaatgctttgttagaagataaaacctttgagaaacaacaatcttaccagttatggcaccttctttattcttatgaagaagatgactcaccaactggcttagagagactatatacacagttacagaacaaattcagctttactttagcacaagccaaacgattgggtaatatcttatttcaggatgactacggtaatttatcaacaagagctattagaaaaatatttccttttattaaagacaataaatatagtgatgcttgtaatttagcaggatatagacattccaaacactctcttaccaaagaagaaattgagaatagagagctaaagaataaattagacttattagctaaaaatagcctaagaaatcctgttgtagaaaagatactaaatcaaatgattaatgtaattaatacattaattgattctgaaaacaataaactaattgcagaaggcaaaaaacctaacttccaattcgatgaaattagaatagaattagcacgtgaactaaagaagaacgctaaagaacgtgaagaattcacaaactctattaataaaggaaaaacagatcatgaaaagattatcaagattctacaaaaagaagatggaattaagaaccctagccgaaatgacattattagatataaattatatcaagaattaaaaaacactgggtataaagatttatacaccaatgaatacatcgaacgtaaagatattttcactaaagaatatgatattgaacacatcataccccaatccaaactatttgatgatagtttttccaataaaacattagtgcgtcgaaatataaacctaaaaaaaggcaatcaaacagcatatgattttattcttaccgaatatggtaaagaaaaagcaaatgactttgagcaaagagttactgacttatttaaccttggacaatcagaaggtatttctagaagcaagtataaaaaacttttaatgcgggaaaatgaaattggagagggctttatagagagagatttaagagacactcaatacattgcgaaaaaggctaagtcaatgttgttcgatataacaagacgagtagtttctacttcaggtagaataacagatcgtttacgtgacgattgggggctaattaatgtgatgaaggagctaaatattccaaaatatcgagatgcaagccttacagagtttatcgagatgaaagatggtaataaaaaggaagttataatagattggacaaaaagaaatgatcatcgccatcacgctatggatgctttgactgttgcttttactaaacacaatcacattcaatatctaaataatcttaatgctagaaaaaatgaaaacactgaaaaacatagtaatatcattgctattgaaacaaaagagactcacattgtaaaagatgatttagggaatataaaaagagtgtttaaagaacctattccaaactttagacaagttgctaaacagcacttagaaagtgttttagtttctcataaagctaaaaataaggttgtaaccagaaatgttaataaaatagcagggcgaaagattggacaacaaacactaactcctagagggcaattacacaaagaaacggtatatggtaaaatacgtcaatacgcttctaaagaagaaaaagtaggacctaaatttggcatagaaactatacaattagtaagtaatccaacttataaaaaactattattaaaacgattagaagagaacaataatgatccgaaaaaggcttttggaggaaaaaatgctcttgctaaatctcctatttatgtaaacttagaaaagaatattactattccagaaaaagttaaattagtttggctagaagacaattatacaatacgcaaggaaatttctccagacttaaaaatagacaaagtgattgatgagggggtaaagcgaatcttacaacaaagactaaaagcttatgataataactataaattagcattcgctgatttagaccgaaaccctatatggctaaataaagaaaaaggaataactataaagcgtgtaacaatatctggtgtcaaaaatgctttaccattacacactaaaaaagaccatttaggaaagcctattttagacaataaagggcgtgaaatccccgtagatttcattaacaccggaaataaccaccatgtagcaatatatgaagatgaaaaaggtaaccttcaagaaagtgttgtttcgctatttgaggcagtaagtagagttaatcaacagttgccgattattgacaaaacatataatcaacatttaggttggaagtttttattctcaatgaagcagaatgaattattcttgtttgcttctgatgagtttaatccaaatgaaattgacttatttgataaaaataactaccacacaattagtaagtatttgtttagggtacaaaaaatatctacaaaaaattatatgtttactcatcatttagaaacaaaagctattgatggtgaaactctaaaaagcaaaaaagcactggctgaaaaaaattattattttgttcaaactcctgaaaaactacgtaacatactaaaagtacgaactaaccatcttggagaaatcatacatataggcgaatattaacctaaattaatactatgctcaaaagaactatctatattggtaatccctcctatttaaaattatcgcatcgtcaacttaagattgacgatgctttaacaggagatacaaaaggaagtattcctattgaagatataggcttcttagtattagaccatccgcaaataacaatatcacaccccgttatacaatatctacagcagcataatgtagctattatcagttgtgatgaatcgcatttacccttagggttaatgttacccattagtggtcatattgagcattcagaacgattaaaacaacaaataaacacctcagaacccttaagaaaacagttgtggaaacaaacggttgaggctaaaatatatcaacaaaaagaagtattatgtaaacaaggcttaatagttgccccaatgcttaaatacctcaatgatgtaaagtcgggagatagtacaaacatggaagggatagccgcacagtattattggagccaactctttgaaaactttacgcgagaacgaaaaggtagctcccctaataattttctcaatttcggttatgccattcttagaagtatggttgcaagggctattgtatgtagtggccttcaccctactataggtatctttcaccgcaataaatacaatgcctactgccttgctgatgatttaatggaaccttatcgcccttatgtggatgaattagtcatacactggattaataatcctcttaatccattagaaattaccaaagaagcaaaagcacatttactacaaattgccacaaaagacgtttacattaatggtcttacacgccctttaatgacagcactaagcattacgacaagttctttgtacaaatgctttacaggagaaagtagagttatacattatccaatgatcaaatgagtttcagtagatataatgcatatagaatcatgtgggtactagtattttttgatttaccaacagagaccaagcgacagcgttcggcggcaacaaaatttagaaaatcgttaatagacgatggattcaacatgtttcagtttagtatttacttaaggcattgccccagtaaagaaaacgcagaagtccatattaaacgaacgaaaagacagctaccaaaagaaggaaaagtaggtatattatgcattactgataagcaatttggacaaatggaactcttctttgcaaaaaaagaaacggacttaccgattatgccacagcaattagaactcttttaatagaaacaaaaaaatgctataattctctttagagatatagcatttttttgttttttattatcgtataatccactctaaagcactattataatagactttaacatgaggttgtgtgattacacgataaagttacaataatttgaaagcaattcacaactttattgtgatgagtatttatactcgcatcgttgtgtgattacacgataaagttacaataatttgaaagcaattcacaaccaaatgataacgatagacgaagtaataacggttgtgtgattacacgataaagttacaataatttgaaagcaattcacaactagttacaataaacaataattatttttttagttgtgtgattacacgataaagttacaataatttgaaagcaattcacaaccggaagcggttaaggatgggcgtaaattaggttgtgtgattacacgataaagttacaataatttgaaagcaattcacaacttgcaagtcttgtttatcccatcctaaaaagttgtgtgattacacgataaagttacaataatttgaaagcaattcacaactaaggcaccaaatggtaaggcaggctaaaggttgtgtgattacacgataaagttacaataatttgaaagcaattcacaacgtataacgtaataaataaattaacaaacaagttgtgtgattacacgataaagttacaataatttgaaagcaattcacaactataagctgttccattggtttgcaatttcagttgtgtgattacacgataaagttacaataatttgaaagcaattcacaacccaactatagggtttgtgtgattgccttgtgttgtgtgattacacgataaagttacaataatttgaaagcaattcacaacgattttttacgtaacttaacagcaacaaaagttgtgtgattacacgataaagttacaataatttgaaagcaattcacaacatacacacactcgttattgtctgtacatttgttgtgtgattacacgataaagttacaataatttgaaagcaattcacaacacgatatactagtgttagattctaatactagttgtgtgattacacgataaagttacaataatttgaaagcaattcacaactaaatagtttttctattgattttttacttcgttgtgtgattacacgataaagttacaataatttgaaagcaattcacaacacgctatatactcatttgataactcgtgaagttgtgtgattacacgataaagttacaataatttgaaagcaattcacaacttaaactaaaatgactcatgctttttattagttgtgtgattacacgataaagttacaataatttgaaagcaattcacaacactatataaatgttaaaaaatgagttgtttgttgtgtgattacacgataaagttacaataatttgaaagcaattcacaacattacaagagtattatctgagttattaggggttgtgtgattacacgataaagttacaataatttgaaagcaattcacaacagaaaagtaccatgtacccctcctgttttagttgtgtgattacacgataaagttacaataatttgaaagcaattcacaacgcgctcgcacgatctacaacagcgtaagtagttgtgtgattacacgataaagttacaataatttgaaagcaattcacaacaggtattgagataatggaagatggagagtggttgtgtgattacacgataaagttacaataatttgaaagcaattcacaacagttatcccaaagcattctttccatattttgttgtgtgattacacgataaagttacaataatttgaaagcaattcacaacattcctttatgtgtataataggggtatggtgttgtgtgattacacgataaagttacaataatttgaaagcaattcacaacgattaacaaacaaatcttttttgattatttgttgtgtgattacacgataaagttacaataatttgaaagcaattcacaactcgcttaggcaatgaagaaagcctttggaggttgtgtgattacacgataaagttacaataatttgaaagcaattcacaacgcccttaacatcatatacattatcttcctcgttgtgtgattacacgataaagttacaataatttgaaagcaattcacaacatatgtattattattatttttaatagttatgttgtgtgattacacgataaagttacaataatttgaaagcaattcacaaccggtattactgctttttctgataactttttgttgtgtgattacacgataaagttacaataatttgaaagcaattcacaacagttattccaaaacattccttccatattttgttgtgtgattacacgataaagttacaataatttgaaagcaattcacaacatttacttgtgtataatactttgtcggaacgttgtgtgattacacgataaagttacaataatttgaaagcaattcacaacatctttaatgtagacaaacccaagcacattgttgtgtgattacacgataaagttacaataatttgaaagcaattcacaacttattgattttacacaagataacgtaagtcgttgtgtgattacacgataaagttacaataatttgaaagcaattcacaacataccattaatggatttagtcatatcctgagttgtgtgattacacgataaagttacaataatttgaaagcaattcacaacccgatagtaaagtaaccgagttatcactccgttgtgtgattacacgataaagttacaataatttgaaagcaattcacaactacccacttcattggtaagaagtgtttctggttgtgtgattacacgataaagttacaataatttgaaagcaattcacaacacttcgtttgttgtacctgctaatatagctgttgtgtgattacacgataaagttacaataatttgaaagcaattcacaacctttaaataactatgtagattatagcgatggttgtgtgattacacgataaagttacaataatttgaaagcaattcacaacggttcaactgtagggtggtttagttcaacagttgtgtgattacacgataaagttacaataatttgaaagcaattcacaacctccaatcaccgtgtattcgttctcaatgagttgtgtgattacacgataaagttacaataatttgaaagcaattcacaactgtaacatctggcatacctactattctgttgttgtgtgattacacgataaagttacaataatttgaaagcaattcacaacctttagatgtagctatcaaagtgatagagtgttgtgtgattacacgataaagttacaataatttgaaagcaattcacaaccattgaaaagggaaccggtaatgccggtgggttgtgtgattacacgataaagttacaataatttgaaagcaattcacaacatgaagcgtagcgaaaatgtaatacgttttgttgtgtgattacacgataaagttacaataatttgaaagcaattcacaacattaccagtagttaagatatagcagcatgagttgtgtgattacacgataaagttacaataatttgaaagcaattcacaaccatgcttaaaccttcttattaaaattattagttgtgtgattacacgataaagttacaataatttgaaagcaattcacaactaataacctctttgatgttttaacataagtgttgtgtgattacacgataaagttacaataatttgaaagcaattcacaacaatggggttggttttatgtgatgcttccttgttgtgtgattacacgataaagttacaataatttgaaagcaattcacaacagtggttgacagactgtgaaaattcgaaaagttgtgtgattacacgataaagttacaataatttgaaagcaattcacaaccacaacatctaatgcttgtataaatagattattcccgttgtgtgattacacgataaagttacaataatttgaaagcaattcacaaccaaacccctaagattgctaatagattgccagttgtgtgattacacgataaagttacaataatttgaaagcaattcacaactaatcataccatttaggaattgaaatgtttgttatatgatactcgataaaggtacaataatttgaaatatttctccaacttatttagggattaagataatagtaaagtatttagatattcatgaagttaaaaaataggcaatccattcagtacactagtctctctatttgttgcgaaaaagagccttttaatgaaacaagttacgaacaagagcaaaaccaaacaggaacccaaaagcagttcttttgattcttctttcaagcccttagtctagttttttatgaagtaggctatagtaccacaagaattccctttagactttttcttctactgggtctaattagttgctttaatcagaaaaaaaactaaaaggatattttttcgatttactcccctttacctccttttactatcttttatcatttctttaaacattgctctttcaaataatcagtaactttccttctaagaacgaaagccataaatattatgaaaacacaaataccctactctttcttagacttagcaatcataggccaagacaagagcacaacagcaactttacaagatgttctaaaagtagcacaaaaagccgaaaaagtaggttttacgcgtttgtggtttgccgagcatcacaatatgccgcatattgcttcgtctgctacagctgtacttatcggctatgtggcgggtggaactaataccatacgtgtaggctctggtgggatcatgctgccaaatcacgcctcattagtcatcgctgagcagtttggtaccttagatgccctatatcctgatcgcattgacttaggactcggtagagctcctggtactgatcaagcaacagccatggctctgcgcagaaatgacatgcatgcagtcaatcattttcctcaacaaatagaagagctcaaacgttactttagaggtgatgatcaggctaaggtaagagcctttcctggcgagggagcgaaggtaccgatgtggatactgggttctagtacagatagtgcctacttagctgccgaattaggtcttccgtatgcatttgcaagtcactttgccccagaacagatcatgcaagctgccaatatttaccgcaaaaactttgtggcttctgagcatttggacaaaccttattttatgccttgtgtcaatgccatcgtatctgatagtttggaagaatcttttcgcttggctacttctttctatcaaatgtttttgggaattattcgaaatgatcgaaagcctatgcaacctccttgtgattctatgcaagggctatggtcggaggttgaagaataccatgttttgcaaaaaacgtctttatctttcatcggcgacaaagaaacagtcaagcaagagcttcaaaatttctttaccatcgtcgagcctgatgaggtcatgattacaacgcctatttatcatactgatgatcgcgtaaaaagcattgcattgtttgcagagattatgcaatccttctaaatacatcagcccccaaagaatcatataccttgggggctgtttttatgtttattcgaaaaaaagcgatgccactatcacctactcaatagtgtttaattcgctgacctccatgacgtacttcacaattagctgaggaggggtcacaccgctctgacgccagtagatatccccctgtttgttaagcaaaataagcgtaggcacactgcgtatatagaactcctctacccactcgcgatccttgtctaaattgaccatacgcaagtctacatactcctctatatcagccttgatatgattaactaccccggtctgcgtacgacatggcgcgcaccaatctgcgtaaaactgcaagaggattggtctgtccaaattgtcaaaatctattgtattatccatggtctgtattctggtgttattgattgtctgcttgatctcacaatccgatagctattttttataaatggtttggcgatattgttgtccccagtccataatctctttgattactttctccaaagtctgtccgtattcggtcagctcgtattctaccgaaattggctttgtgtttaatactgtacgtttaatcaagtgattagcttctagatcttgaagttctttagaaagcatcttcgtgccaatcccttctacttctcgcttgagatccataaagcgcatctttccaccatgcatgagtgttcctaagatatataccttccatttgccagaaagtagactcattgtatcctttatcgctactattctcacctgacattgaggcgaagcattcaacagctcttttttactcatatcacacttaattaattggctaaaattacgctttttgtaagcagtacccaaaaggaaagtagtttccaaaagggaacttataggaatatctatacagagagtctttaagtttgtcattggaaacaataaaataaaatcttatgaataaacaaaaaattgccttttgggtatcgactgtactgttttcagtattcatgctatttagtgcctacaattatatcgcctcagaagaaatgaagcaagcctttgtacacctgggattccctgattacttcagagtggagctagccgtagcgaaggctattggctcagtggtgcttttacttcctatgctaccgcgtaccctgagaggctttgcctacgcaggttttgtcattaatatcgtatccgctgccgttgctcaccttgctatcggggaacctgtaagctctttgggcttcgtattaatcgcagctatcttattaactatttcgtatttcagcgctttttgtccatgtgcaaaaaaatgctaatcctcgtacgggcgaattgatatccctcgtacgggcgaattgcaattcgcccctacattatttcgcgaatgccttttcgcacatacgattcctcgacgggcgaattgatatccctcatacgggcgaattgcaattcgcccctacattatttcgcgaatgccttttcgcacatacgattcctcgacgggcgaattgatatccctcatacgggcgaattgcaattcgcccctacattatttcgcgaatgccttttcgcacatacgattcctcgacgggcgaattgatatccctcatacgggcgaattgcaattcgcccctacattatttcatgcttatgatatattttctaaaaactacttatacgtaatttcaaggcttaatagaccgtactctttttgaatactgagtctcatctgatcactttcataactatcagtcgctgtcttaacgaaatttgtcaacttcaacaataactcttcttctagtaaatctattcttttattcatattacctgttaggtagatatcgtattttaatccagtcggtttgctagctaacgttgtcgaatctattagatgaccaattgtcgaaaaggaataagaaacatcaacagacaccgtttttttgttaatcaacaactgacttgaagaattctcatagttctttggtgataaatctagtaaagcaaaaatagcctcataggtcattattggtgtcactccttctaatttctctagcttcattctatctagaatttcacctacattaatatattcgctaaataccattcgaaaatgtgtatctaataaatatgtctgagtagcaatatcaaacggaacctctatcctagcaggtggtattacgtagtttcctttcttgcctataaaccctgtatagccatcttgagtcactggtgcaatatcgcctaaaaacatatacgcatttgtatatcttggctcaatgatcatctctccttttttattaatatacccaaacaaattatccagacgcactaaggcaaggtctctgatagagaaaggatgtatctcttggtagatagcaggaataacaacggcaccttctctgtctaaccagccaaacttattcccttgttcaaacatataaaggtctccatcgacatgcaaatccacaaaattatctgtcaataagaccttgccttctttatctataacagctacactatctatactatggtacacgactgctacgccatatctaaacattttggcgaaatagtattgaggctgaatgacaaaatctccatttgtatcaatatatccccaccctttctcttgatccttcactggagctagcccttcattaaaactctttacctgctcataaataggctgcacaactacctctccttttttatcaacaaatccccagcgcaagagaccttcatcgttatacaccgcaaacttagctaaaccattggtgtaattccctactacctctgcaatgtccattgtgaacaattcttcccctgattggtttaaagcaatagggcgactatcctctcttgttccccaagcaatcccttcagaaaaaacggaagcatttacataggttggaggaattacatattggccttttgtatcaatatacccccacgtcttttgcttgttatcagcctgcactagagcgagtccctctctaaaaagagaacctttcagatagttgttttttaaaacggtattgcccttttgatcaatatattctatatatattcctctcatgattggaattaactctgtgctatacttggttgcataactagaaaacaaaagtgagattactgataatacaacaactaattttaaagtctgtttcataaaattatttaattcta

SEQ ID NO: 2163 - DNA, 24227 bp, synthetic construct
  misc_feature 1..24227: note = Synthetic
  source 1..24227: mol_type = other DNA
ttatcctgctacggcttatgatgttaatggcgtatggaatcagaaaagagagacggattggcaaaaggaactgatcggaaataccgccagttcttcttccacgcagctctccttaacaggaggaaatgacaccaccactttcttactgagtgtaggacatcaggagcagtctaccgtttttgccaaagattttaagtatctcagcaatacgctatccaatacaatttcacaccgatctaaagacaatgcttttcagctgaaaatatcgaaccttttttccatgcagaaaaacaatgtgattaatgaggatgtcaccaagaaatcattatttctatcccccaatgcgcctgcattatatcatgaggatggcagtttgaactgggagcataacaccttcatgaatcccattgctgcctataacggcacatattcaaacgaaaacaagcagtttttaaccaatatcaatacccaataccagatcgtaaaaaatattattatcaagctcaatggcggaatcaattatcagacactggaagaaagggctcttcagcctaatactatttataatccatcttttgcaacagggcaatccagtgcctattcaagcgcttcaaaaaataatcaggaacgtttttctttaatactggagccacaactgggttggcagtatgcgtataataagcataaaatagatgtgctggtagggggaacttttcagagagaggttaataagcagggttctatggtaggaattggctttgaaagcaatgtttttattgagaatattggtgcggcgcaaacgaagatcatctctgatcagtttcggactgaatacaggtatgctgctgtttttggaagaattaactatcagttcgatcatcggtatatcctgaacattacaggtcgtagagatggcagcagccgttttggacccaataaccgttttgctaatttcggagcggtgggagcagcgtggatattctctaaagaaaaattcttggaaaaagcaaaatggctgagctttggaaaactgcggggtagtataggaacggcaggaagtgataacattggagactaccaatatttagatacctatacggtttcttcattgatctacaattctgttaccggacttacgccctcccgtctctataatcctgattacagttgggagaaaacgacaaaacttgaagctgcattggaattaggttttcttaaaaataggatcaacgttacgggctcatggtacagaaaccgttcgagcaatcagctcataggggtacagctgccatccatgaccggttttggttctgtccttgccaatctacctgccactgtagaaaattcaggaatagagtttgaactgagcgcttctccaattaaaacggagcactttaaatgggaaacctcttttaatctcagttttcctaaaaacaaactcttgtcttttcctgatctcgaaggctctacctatgccaatcaatatctgataggatatcctaccactattgtaaaattatatcggctggaaggaattgatccgaagacgggactgtatgtatttaccgattttaatggggatggaaagatctcttcgcccgatgataataaggtcattgaaaatataggggtgaaatattttggaggctggagtcatacgttgacctataaaaactgggatctttctgtactgtttcagtttgtcagccagagaaacagaaattacaacagcctgatgcccactcccggaggaatgaataatcaacctgttgaggtattggatgtatggtcccctgatcatcctggtggattctatatgccgtacagcggaggttctaacggttctaaaaacacagcacaaaactattttagaaatagtacgggttctgtgtcagatgcctcattcatccgtcttaaaaatgtacagctgagctatcgtattcctttacagaattctgctttccgaaatgtgaaggtctattttcagggacaaaaccttatgacatggacccgttattttggaatggatcccgaattcctttcgctggggtatctgccccctttaagaacctatgcgcttggggtacagtttaccctgtaagaccatcacaaaaaagtaaaacaaaacagttgttcttaacaacgaaataaaatctttaaaaatgaaaacatccattatacgatatattttctttttcatggcggtgcagttcttctgtacctcttgtgaaaaactcatagaagttcagatgccggataatcaaattaacaccaaacaggtatttgaagatgtacagactgcgaatgcagctttagccggattatatgccggattgtgggataattctcctttatcaggagatcagtcaggaaaattattgggaagctataccgatgatctgaactgttatgccgttacggcaaccaatggcgcttatgatatctatattaaccagcaggtggataccaataccgcagtgtattcgtattggtcttcagcctacgaaaagatctatgctgccaattcgattatagagggagtggaacattcttctttgccttcggtagaaaaaaatagagttaaaggagaggctttattggtaagaagcatgctgtatttctatctgcaacagatgtttggagatattccgtatgttgtcagcaccgattatcagcttaaccgaatactgtcaaaaacatcggcttcagacatatcggcaaggttagaaatcgacctgagtcaggccatcagttggttggtggatgattaccgcaatgcagaacgtatttttcctaaccgtaaagtagcccagttactgcttgccaaagtatatatgacggagggtaaatggagtgatgcggaaaccctattaaaagggattgtacaaagttctttgtatcagtttgaaaacgatatcaccaaagtctttacgaagtcggaaaaacatatcctatggcagctcaaacccaagaactcgggggatcctacgaaggaagtgatcttatattatttctccaatgcccttcctaataattatgctgtttctgaagatctgatgaatagtttttcgaataatgatctaagaaaattgaactggatcactcctgttactgtaaacggaaatacctggtatcgggtggataagtataagaatagaaccgttaataatacagagtattccgttattattagattggaagaagtttattttctattggcagaatccttagtccagcagaatatgctacaggaagcagtgtcttatatcaatcctaccagagtacgtgcaggccttaccgctttatccaatcaattgcctaaagcacagctaatagatgaaatcctgtcagaacggagaaaagaattttttgcagagatgggacaccgctttttagacttaaaaagactgggccgtctgcatacactccttacggtaaaacagaactggaaagacactcaccaacgttggcccattccacaaaacgaactgcttttaaatcaacatttaaatccacaaaatgcagggtattaaactacaaaaggctaagatgatgtttagtataaattacctgatgcttctgttagggctgctttgttatacttctgttcttgggcaaacagattcttcttttaaggataatctgattaaaaagaatcagacaacaacccatcaggatacgatgcaaatctggaagtcaaaattcttcaaagtgaatatcaccgactattccccggatggaagatggatagcagtaaagaaatggtatgattataacgcagatacgatgatgataatggatgccaacagatcaaatgctgtagaaggctatctggtcaaaaagaaccagcttacatttttgaaagcaaatgttcttttagcgagtgggaattcacagacagacttatggaatttgatcacccatcaaagaaagatatttgaaaatatcagtaagacagatgcattacagaccgtcaatcagtttgcaatgctgagcaaggataaaggtttaacggtgtacgactatcacggaactttattacagtctgttcctaacgtaaccaattatatcacggatggacgccaaaaagtgtatgcagaaagaagagtaggagagtggagtgaaataatattgattgaaaatgcaaaaccccagcaaggagaaaagaatttcaattatagaaacaacaacaacaacaacaacaacaacacgaatgaaaagagtaaagaacctaccgttttattttccacaaagaataaaatagagcgttttgaactaggtccttccggtaaacaggtgatgattaccgaaaaagaggagacaacagctaaacggaatcttatttttattagtacttccgctattgccgatcaaacaccattgtatccattggggagggatactcaggacgccgatttttttaaagtaacagaaattcaggatggagaaatgtattgtattgaatctcaaaaatatgtaaaacataaaaataatgtagagatatggtatggaaacgatggagccttgaaggatatggagtatggaactgttaaacgggactatgtagtatggtatcccaaaggcaattcaataacaagaattcctactgaccaatttgaatctatagctagtttcaataataccctttattttctggcttttaataaagcagaactgcaaaattatgtcagctggattcctgatataaatatgaatctctttgacattaaaacaggaacttttcaacagttagatgccataaaaccttcgctttatagttctaaaagtggaaactggttcatttatccggacttgaaaaataactgggtgttgtataacccgaatacccaaataaagaagcggataggggatttccatcttaaaactcctgtattcagctttgatgagaaaatgatttactttgaaagtgaaaatgatctgtgggaatatcatattgagagtgaatctttgcactctttacacatgggcaagaacaaaaagactgaaatcctcaataaaaaagaaacgagcttgatcgatggatttaatttttttcagcataggattgacaatgcagattttctccttgttaaagtgagtgatctggtcaataatgaagtatccgtagtgcaatgggatggtcataccataagaacggtagtaagcccaagaattgctaacattaaaaatattaaatatgatgcagataggaagaaattttgttttgtagaagaatcttttaatatgccttcacaggttgtagaatataatataagaaagggtaatgaacatccggtatttgaagatagaagagatcaggagtcaataggaatgaggcaggaaatgattcattataaaaatacagagggaacgcctttaaaaggaattttatattatcctatagggtttaaccaccaaaagaaatacccgatggtggtccgtgtttatcaggtgcagagtgatgaagcaacgcagtatctgaccccgggatataataaccctatttgttttgatcttcgggcactcctcaaaagaggttattttgttcttatgccagatattgtttttacgaaaacaggaacaggattatcggcgttagactgcgtgaataaggctctcgatgaagtgagtaaaaatcaaaatatagatatggataaaacggctttgattgggcattctcatggaggatatgaaaccaactttatcgccacacattctgatcgttttgcggcttatatttcgggggcaggaaacagtgatatcataaggtcgtatttttcgtacaactataatttcagcagtcctttttactggcagtttgaaaacggacaatacgaaatgaacattccttttgctgaaaataaggaattgtatgtcagaaataatcccatctataatgttgagaaagttaatgcaccgatactattatgggcagggaagaaagatgagaatatagcctgggatcagggtatggaattttatgttggcctgagaagaaataaaaaagaggtcattgctttattctatcctgagaaaggtcatgatcttgagcccaacactgaagaaagaagagatctgcaccgaagagtattggaatggctggattattttttgaaagataaaaaggaaatcacgtggattaataaacaaataaagaggggatctcatgaataaaaacaaatggtaacgttgtgtagcatatttatctacatttattgtaaagaatggcagaatctgtcattctttttcttttgatctaaaaataatgtaagtattactggttaattagctcagcatcctccaactctttctcaaggtaatggatttgttcttgtgttaatttcaaatttcgtttccctgagaaactcccttttccaaattcctcatattcttttcgccatttgtaaagcaacgtaactttaatgctaaattctctagctagttccgagatattacttctttcattgcttaattcaaccgctttggtctgaaaagctggatcataattttttctttcttgtttcatatatttgttaaaattaattttttttaagcttctgaattaaccgtagaagtttagaaacagcagatgggaaaaaacttttcagtgtttcctgtagctaaaaatattacctataaaatataacatgaagaaatcatccgtacgaacgaaatcactcttaatattattccttataacgttttttgtaaccaatagctttgcgcaagatagcggacgcaaattaattagcttaaacgaccagtgggaatttaaaaaagaaaacggggtaacagaaaaagtaaaccttccgcacacttggaacgataaagatgtaatggatgatgagccaggttattaccgtggtttaggtatttataagcgtaaattgaagttggatgattctgcaaaagggaaagatatttatttggtttttaatggcgttgcacaagaagctgaagttttaattaatggtaaaactgctggtaaacacattggcagttatactcgttttacagtagccattacgccatttttaaattataaggatgatgtaattgaagttagggttactaacagatttaatgaagatattccacctttaacagccgattttaccttttttggtggtatataccgcaatgtaaatctgttaattaccaatcctgttcatttttcgcaaaaagaaaatggcagttctggtgtttttattacaacgccacaagtttctgctgctacggcaaaagtgcaggttaaaagtataatcgaaaacttatcattagctaaaaaagttcagatacaaactacaatatttaatgcgcagggaaaggaaatattgtcccaaatttccaccctgaatatgctttccggaggaaatgataccgtggttcaggagttaaataacattaaacaacctgaactgtggtcgccagaaagcccttatttataccgcatagtgactaaaattatcgatatgaaaaccaaaactgtattagatcaggtttctaatccacttggttttcgatggtttaaatttgatgcaaatcagggttttttcttaaacgataagcccttaaaattaataggagcaagtcgtcatcaggattatgaatatttaggtaatgctacgccagatgctttgcaaataagagatgtagagttattgaaaaaaatgggtggtaactttttaagagttgcacattatccgcaggatccattggtactcgaagcttgtgaccgtttagggattttagcttcagtagaaattccggtgataaacaccattacagaatcagaaacgtttaccaaaaactgccttgatatgcaggtggaaatgattaggcagaactttaaccatccaagcattattatttgggcatacatgaacgagattttgcttcgcacaaagtttgagaacgataaacctcgtcagcaaatttattttgatcatgttcgggaattggctcaaaaattagaagatttaacaagaaaagaagatccatcacgttatactttgcttgttaatcatggtgcatgggatatttataataaagttggtctaacaaaaattccaatgattattggctggaatttatataatggttggtattcaggcagtccggcagattttgctaaattccttgatcagcatcataaagagctggctgataagccaatgttggttacggagtatggtgctgatgccgatccgcgtatccgttcattttcgccggtgcgttttgataaaagtgtagagtattgcatttactttaatcaaatttacttaaacgaaatgcttaaacgcccatttgtaagtggcgggatggcttggaatttggccgattttaattcggaaacccgcgaagaaaccatgccgcatatcaataataaagggcttttaaccattggacgcaaaccaaaagatacctattttctatatcaggcgtatctggcagatcagccttatttgaaaattacttccgcacaatggcaagatagaacgggagtggcagattctgcttccttgttttgtacccaacctttacaggtggccactaatttaaaatcggccgaactattcttaaacggcaaaagtttaggtataaaagaagctgtagatcatgtttgtagctggcaggttccatttgttgatggtttaaatcaattgcgtgtggtggctggcaataaaagcgatgagactgatattaactttcaattgcaaccttatcgctttacggatcagttggtttcctttaaaaatatgaatgttttgttgggttctaaacgcttttatatcgatgagaaccagcaccaattgtggatgcccgatcagccatacagaaaaggttcttggggttggattggtggcgaaccatataagggcacaaataatcgaattacttatggcagcgacaaaaatattttagataccaacgatgatccaatttatcaaactcagcaagtaggtattcagcaatttaaaatggatgtacctgatggcgagtatgaattgtcgttatactttgccgagctggttggtggaatttctaaagaggctttagtttacaacttagataatactcataaaaaagaagtagaagagaatcggattttctcggtactcataaatggagcaacttttttaaacaatattaacctggctaaagattttggttataccactgcaatcattaaaaagaccagagtaactgttcaaaatggaaagggaatcaccatagattttacacctgttgagggcaaggctgttttaaatgcattacaattaagaaaagtttattaagcggataatcaactatctgcatgtattttatcaattgatgtattaagagcattaactatgtttttgatgatctttgttaattgcgggcagggaataaagatgaaaatattgcttggaatcagggtatggaattttatgttgacctgagaagaaataaaaaagtggtcattgctttattctatcccgagaaagggcatgaccttgagcccaacactgcagaaagaagagatttggatcgtagagtgtttgaatggctggattattttctgaaagacaaaaaggacttctcgtggattagcaaacaaataaaggaggatgctatatagatctctttcctgtttattaagtgaactgcaaagagaactagagctctgccttttatgtcaaatcagattctattcctcttattaaaggcatggtaaaaataatcagattttgttgtggtcgcaaagcacatattgataactctttttagtttttataatcttgaaacaattaaggtgacttttatataaaagaaatgccccgaagatagtcgaggcgctaaatgttttcacaacggaataatccttattgtgaattgcttttcaaaattattgagacaaatataagccaaaaatatgtttattgttttacggaaaaccataatttaattattttttttatttctatttttatacaatatcataaaattaatagctatggctaaaaaaatattgggtttggatttgggtgtttcttcaatcggatgggcgattgttgaagaagatgctaaaaattcaatgaataataaaattataaagttaggagtgcgggttaatccactgactgttgacgagcaaataaattttgaaaagggaaaaccaataacaacgaatgcagggagaactttagcaagaggagcgagaagaaatttacagagatttaaattaagaagactccatctcattgatattttacaaaaaaataagatattgaaacaaactgacctgcttgctgaaagcgggggagattcaacatttcaaactcaagaaatacgtgcaaagtcggctaagaaaaaagtagaattatctgaatttgcacgagtcttacttttaattaataaaaaaagaggatataaaagtagccgtaaagccaaaaatgaagatgaagggcagattattgacggaatggctgttgctaaagaattatatgaagaaaatacaactcccggagaatattcttatgaacttttaaaatcaggtaaaaaacaattacccgatttttatcgttctgatttacaagctgagtttgatcgagtatggaatttccaaaaacagttttatccggaaatttttagtgataatctttacaaagaattacaagggaaaaataaaaatgccacctggaagattttagaaatacctttttcattagttggaataaagcaagttggaacacaacaagataaaaagatagaaaaatgtttttggagaagtgaagctgttaaaaagcatcttgattttgaaagtttggctgttgtttttcaggagataaatagcaatcttaataactccagtggttatttgggagctattagtgatagaagtaaagaactttatttcaataatcaaacggttggagaatatttacattgtcaactaaaagagaatcctcatagtaagcttaaaaatcaggttttttatagacaggattatctggatgaatttgaaaaaatatgggagacccaatccaaatatcatgtgctattaacgaaagaactgaaaaatgaaatccgtgatgttgttattttctatcaaagaaaattaaagtctcagaaaggattaatcagtatttgtgagtttgaaaatcgagagattgaaattacagagaatggaaaaattaaaaagaaagaagttggtctaaaagtagctccgaaatcttcactattatttcaagagtttaaaatctggcaggttcttaataatttacagtttcaaaatattgaatctaaagaaatatttccgattgatttagagtttaaagaatctatttttaatgaagtaaatataaaaggaacgatttctgcgaaagcggttttagatgtattgggatattcaggtaaagagtggaaaaccaattttaaagatattgaaggaaataatactaacgaaaatttatatactgcttatttaaagattattgctaatgagggaattgagtttccaaaagaatttaaatataatcttgatgatgatattaaggtttctaagataagttgttctgctggaaaaataatagaatttgttagagaaaagttttctgaactaggaataaatacgtctattttagattttaattctgaactggaaggaacaaattttgaaaaacaagattcctaccaattatggcatttactctattcttacgaaggggatgtatctccgtctggaaacgaaaaattatatgaacttttagagaagaaatttggtttcagaaaagaacattccataatattggctgatattggttttccacaagattatggaagtttgagcacgaaagcgatgcgaaagattataccacatttaaaagctggattaccttttgcgaggaaatcagataatgataccatactttcagcaactgcaatggctggttataatcattcaaagtcattgactaaagaagaattagcaaaaagagttttgaaggaacacttagaaattttacctaaaaattctctacgaaatcctgtggttgaaaaaattctcaatcaaatgataaatgttgtaaatgaagtcattaaagaatatggaaaacccgatgaaataaggatagaattagcaagagagcttaaaaagaatgcagaagaaagagctaatatgacttctgagataggcaaagcaaccatacagcatcagaaatattcagaaatattacaaaaggaatttggaataaaatcgccttcaagaaatgatattatccgatataaattatatttggaattgtcaaataatggctttaaagatttatatacagatgttcaaattaaaagagaagagcttttcacagacaaatatgatatagaccatataattccgcaatcacgattttttgatgacagtttttcgaataaagttttggttccaagaggggctaatcttaagaaaggaaatctaaccgcatttgattatctggaaagtgaaggaaaagatacgctgggaaaattcaccaataccatcacagagttttatgataaagggataatcactaaagctaaatatgaaaaacttcagaaaaaaggaactgaaataggggatgggtttattgaaagagatttgcgagatacacaatatatagcgaagaaagctaaagaaattctttttggaattaccaattctgtggtttctacttcgggaagaattacggataaattgcgtgaagattggaatctcgtaaacacaatgaaagaactgaatttggataaatacagaaagcttggtttaactgaaactgtaattaattcaaaaggagaagaaaaagaaaaaattatagattggagtaagagaaatgaccatcgtcatcatgcgatggatgctctcactgttgctttcactacgcacaatcatattcaatatctcaattatctaaatgcgagaaagaatgaagctcataatcagcataaaatgatatcaaatattgaaaatttaattactaaagtatttgaaaagaaaaatggatcaaaacagagacggtttttagagccaattcataatttcagagttgctgctaaaaagcatttagacgaaatattgatttcacataaagcaaagaataaagttgttacaaaaaatataaataagattaagaaaaaagggagtattatttctaaaattgaacttacccctagggggcaacttcataaggaaactatatatgggagttctaaatatcttaaaaccaaagatgagaaagtatctggaaagtttgatttagaaactattaataaagttcagaatgaaaggtataaaaatgctttattagaaagattaaaagaatttggagatgattctaaaaaggcatttacaggtaaaaatattttagcaaagaatccaatatttctgaatatagaaaaaacggaacaattgcctgaagttttaactttaggttggtatgaaataatttatacaataagaaaatctataaattctgataattttaaagattataaaaatatagataaagttacggataaaaaagttcgcaatattttaacagatagattgagagagtttaatggaaattccaaagatgcattttcagatttagaaaaaaatcctatttggttaaacaaacccaaaggaattgcgataaaaaaagttacgattactggagttaataatgtggaagctctgcattacaaaaaagatcacttcggaaaagaaattctggatgacaaagggcataaaatgcctgttgattttgtaagtactggaaataatcatcacgttgctatttatgaagatgcagttggaaatctacaggaaagagtcttgagtttttatgaagctgttgaaagagtaaaccaaggattatctgtaattgataatgaatataactctagtttaggttggaaatttttattcacgatgaaacaaaatgaaatgtttttgtttccgtctgaagatttcaatcctcaagaaatagatttatatgacgaaaagaatttaagattaatttctaagaatttgtttagagtgcagaagtttggtgaactttcgaaatcaggtttttggtttagacatcatttagaaacatcagttgatgtaaaaaaggaattgagaaatttttcttatctagacttttatagtaaagattttatgaaaacaatagttaaagttagacttaatcatttaggtaaaatcgtacaggtaggagaatattaaactaaaaatgtgaatcatgattacacgctcaatctatatcggaaatccagcctatctcaagcttaaagatgaacagatgaagattatctgtcctgaaactaaaacagagagaggaagtgttcctgtagaagatctgggattattgatgctggatcattttcaaattacgatttcgcatcatcttattcagaaaatgatgggaaataatgttgttgtaataagttgtgacaatcatcatttgccacacggcattatgttaccactttatggacatactgaacattcagatagagtaaaagatcaactggaagccagtgagccactaaaaaaacaactttggaaacaaacaatagaatgtaaaattgaaaaccaaaaggaagttctacgacggcttggtaactattatgaacctatgattcactatcaaaacaatgtgaaaagtggtgatattacgaatatggaaggaattgctgcacaacactactggaaataccttatcagtttagactttttaagacagcgttttggtgattcacctaatctgtttttcaattttggttatgcggttctcagaagtattgtggcaagagctattgttgaaactggtttattacctgttcttgggattttccataaaaataaatacaatccctattgtttggcagatgatcttatggagccttaccgtccatttattgatttattggtgatggattggttaaaaggaaatcctgaaaatgagaaattgacaaaagagtttaaagcccatattctgcaggtagccacaaaagacgtgagtatggatagtaaaacaagaccattgttagttgctgttaaaacaactgcatcatcgctttataaatgttatacaggtgaaaaacgattgatctcttatcctgaactaatatgaataccgaaaggtttaacgcttaccgaattatgtgggttttagtattatatgacttaccaactgaaactaaagcaaatatgaaggatgctaatcgttttcggaaagctttgattgatgatggatttacattgtttcagttttcaatgtatgtacgccactgtccaagccgagaaaatgctgaagttcatattaaaagggtcaagtttatgcttcctaaagccggaaaagttgctattatgagtattacagacaaacaatttggtgatattgaaattttctttgccagaagtaaagaagaaccacctccaacctttcaacagctggaattattctaaattttcaattctaaatgtaaaaataacctactgatttatagtaggttattttttgaggctgtgattaatcacgaagataataatttttgaaagcaattcacaacttagaaatggtaagtcataatgttgtttgagctgtgattaatcacgaagataataatttttgaaagcaattcacaacatggaaccaatcaggcatttagagaatgaggctgtgattaatcacgaagataataatttttgaaagcaattcacaacaagcttgtctttctcttaacaaacgattgagctgtgattaatcacgaagataataatttttgaaagcaattcacaactaactgactttgcaaaaaggatggcaggttgctgtgattaatcacgaagataataatttttgaaagcaattcacaacagtgttaaaatacaagcatttgcttcaacagctgtgattaatcacgaagataataatttttgaaagcaattcacaacacctccatagacgtaacgccatcagctaatgctgtgattaatcacgaagataataatttttgaaagcaattcacaacaatcaacacctccgccaatcgaattaatttgctgtgattaatcacgaagataataatttttgaaagcaattcacaacataatatgtttgttgaggttaaaaagagtagctgtgattaatcacgaagataataatttttgaaagcaattcacaaccgtacaatcttccggcatgtgatggttccagctgtgattaatcacgaagataataatttttgaaagcaattcacaacattaattcttttggggaaatagattcagtagctgtgattaatcacgaagataataatttttgaaagcaattcacaactaacacccgtaacaacatagtgatttttcggctgtgattaatcacgaagataataatttttgaaagcaattcacaacgctatagtagatgatgaaacagtcgttacagctgtgattaatcacgaagataataatttttgaaagcaattcacaatttgctgatatgtacagttctgatggtgtaagctgtgattaatcgcgaagatagcaattttttaaaataaggtattgaattttatgttggccttagaagaaataaaaaaagagcacactactttattctatcctgataaaggttattatattgaacccaatattctagaaagaagataaatctgcatcgtagagttttagaatagctggattattttttgaaaaataaaaagaatacttcatgaatcagtaaacaaaaaaagaaggatgctgtataagcatccttcctttttattactctactttaaatagaggagttccacacatcgttggactgatgggttgattccttaactgggtagacccatcttccgaccaaaaacataaatcgactccgacagtgttacatttctgatccgtgatttcacataaaccagtttgttggttgatatgataaccggataccaatacggccttcttgttgtctgctgttttagtggccaaagcagatcctgttcctatgattaaaaggatagcaggaataattagatttttcataataaaagaatttggaataagtgcctactcttttttacaggttttcggcttttcctgtactgtagctatcagttatttttttgtttagtttatatttaattaattcatttccaataattagatataaggagctaccattgaccatcatatttgaaatgctgacgtcatttctgttgtagatataaaaactacccagatattcttgcttgtctgtacgataaatgtcaataatggaagctcttttccatgtctgtggagattcatgtttgccaattaaattggattgattaaataaaatacctccgtacaccgtggaacttttatttacttttaatggaggagctaccattttataacttccgtttgtaagtttccggattttaacccgagcaatggtggttgtatctattgtatgaagttggtgctgtactttgaaatcattgttcataactataatttgatttcggtagctgtgaatatagataagattggatttttttcggtcgtaaagcaattttccatctgaatcaaaaataccgtctttctgtttctttaggatattggcatatagattgacgactgctcgacgactcttttcaagtttcagacctgccagtatgaattgtttatttttagtagcgatggttctaaaagcaaattgggttgagtctaaaggtataaattgattaaaatatacctcattataacttattgttttagctatagaatcttttatacgcccacgataaatgacgggaacggtgccatcatataaataatagtagggtttctgaacttgtaattgtacatttctaaattgataatgggtattgtcaagggtaagcttacgtgctgaagctctgattaaggttgtatctacggttgtaagaatgagaggggatttgggatctcccaaatatattttctcattttcaatacctgcaagataataggaatcagcacttagtggcaacgctttggatttcattactgccgtaggaataaatctccgcgtaaaattattctccttttttatcatatgctctgaagtcaaaaataaataaacaacagtccccgaacttagaataagtagtaaacttatgttggaaatcaatcttgaggttctcgtacttcttttacgctccaataaaatgattgccactattaatagtattgtacaaataatattaaaagttagatgctgtgtccagttcatgttttgtagtattccaccacaagaacaggggatgaaatcactgtaattcaatattagatagatataaatggtaaaagctgccatgagaaaaagtgaagcatacaatcctagaagtcttgttcttaaaaaagacaacgctataacgatgattaattctataataattgtgctgtaagatatcaatcccgcatatgtactcagtaatggggactgcgcaatctggacctgaaagttttcaaaatccattattttacttatggctgcataacagaataagaggatgaagaaataggatgtgatgttaggaatcttaagaattacatttttcatgataatatttttatactgttatcaaccgacctgtatgagtttccattggattatttttccaaagtacttaggcatttgactgccctttgcaacagggcaggtggttctgaaattgcctgtactttcccaaattccactgatagggcaggacgttcctgttgtacgaaggattgattttgtacaaagattctgtggctcagttttgcttgtcatttggtttctgatttaagcttccaatcctgtccatcttttatgggtggatcaatttcgttactgtctggaatctttaaagagtctccattttttaggttttcaccttcgttttttgtttcctgtttgatcgtcaaattaggagtttcagaagccgtaattgtttcatctgactctctgcaagaagagagagataatgtgcataataaaagggttgttattgagataaactttttcatggtaattgatttttaaggttatctcggccgagtttttagtggaattcctgagtcaaagatattggactaaaagcccctgaaaaagtgtttataggcattgtttaaaaattcatacgtcatgatttttaaattttgacagatccttacagtaataaatgtttattaataggaatctatagggatatatcttgatttaatgaataacttattgttattcaatgttttttattctaatttgtttaattttggaatgatccatttcccaaaaataccattatgactatcgtcaaaagtatcctcgtagccagctttattttattatcatcttattatttgtacgcaggtgaaaaaaatgaatatgcagatatcagaaaaaactatgaaaatttaataagaaatgatattcgggcgattccgtatatcaatgagtatattaaaaaagcaaaaaaagagttggattatcctaaactggtacagggatatagagatgcggttctttacaatccgtcggaatataagaaattggcctatgcagacagtaccatttatgctgctttacgttctaaggatgatgatttaataacgtatgcttatttagggaagggtattgtgtattatttcagttttaaaaaatttaaacctgccttagaccaatatgtaaaagcttatcgatattcaaaaaatacaaagaatgaatatcttaaatataaggtgatttaccatttgggagtagtgaaaagttacttggggtattatgaagaagcaatagatcattttaatgaatgtattgcattttttgaacggaagacaaaagataagctacatcctaatatactgtatgatcatcagagaggatatctgaatagtttacaccagattaccatatgctatggaaacttacagcaatatagcaaggcagatagcatcgttactgtagccctctcaaatatcgcagacaataaagattttttgcttgagaaaagttatttttttaagtcgaaagggatattaaagttttatcaggataattatgaaggtgctattgtagattttcatcagtcattacctgagatcattaagacgggtgattttgaatgggtgtctattatctacttttacctggggaaatgttacctgaaatatgatacggaaaaatcaatccgtagttttcagaaagtagattctatttttaacagacatcattttgtagtgcctagaatcagaagtaattatgaatatttaatcaattactataagaaagaaaaggatattggtcaacagctttattataccaatcagctgttaaaagctgatagtttgatctctaaagactttacctatctgtcttctaaaattcataaagaatatgatcgacagtctttgttggatgataaaaaatatttattacagacgaatcataacagaacacttttaacgattaccttcttcgtattaacttttatttttttacttctttttatactgcattatcgtaaagagcggaatagtacaatcaaatacaaattgcttcaggaaaaatttaacgctgccaatagcgttgaaaagggtaagggaaaatctcttattcctgtttccgtatccaagaaaatgattttaagtgttgagattataaaagagctcactgagaaattacatgcttttgaaaaaaataatgaattcattcagaaaggactgactcagagaaagctggcattgaaactaaaaacaaatacctattatctttctacgtttatcaatgaaacgaaaggcattaattttaaccgatacattggagaaatgagaatccattatattaccgtacttatatattcacataagaaatatctaaattatactattgaagcattagctgaagaatgtggcatctcgacccgacaaagtttttctgatctgtttttcgagtttaatggaatgcggccgaaagattttattcgcaaaaggaaagaagaagtagataatagctgaaattcagtcggttaatatggtttttgtaaattttcctaaaaaaggtatggttacaaaaacattttttagaaaaattgaaaagctttgggaagagttaaataaagaattggctcttatttcagaagaaacagaacatatgattcatgtttctgaaaaagcactgatcaaaattgatgaaacaattcgggaaataaaatctgttgttacagatcttatctttgaaagtatagcagaagaagtttattttttcaaaagtataaagcctttatttctttcaaaatttatctattattcaaaaatactcagtattgagacctcacaaccctctgcaggaaagaaagaacttcgaaagtattatgaaaacgaacttttaaaactgaaacggtatcactcagaacataaggatttttatatttattaccatcgcaatgccacctatctggatcacaaatattttgtccgcggatcctatgacctgactatggaattatcttccaatctttataattttgatgaatattttaccacttctcatgatgggatgatctcccagattatggctaacgaaatgcttgaagtatatctattggacaagatcaatgctattggacagcttccgctcaatacaattgctcaatttcctttgtcatggtcggcgtctaaagtttcattagtggaactcttgtatgctcttcaccagaccaattgttttaatggaggaaatattgaatttagtgaggttataaaagcgactgaaaaattgtttaaagtgaatttaggcaatccttataaaacaataggggaaattaagagccgaaaaaataaccggactaaatttctaacgatgcttaatgatcatctcaatcagctgtttctgagcagtgatgaatagaatgacatgttatgttttcttcctaaaaagcaatacgaacgaataagtatttattatagacgtctttatccataggctgtatcagacaatcgtacggtagtaccgaaaagctaccaaaagaaattctgtgggataatcaaaatttgtcatatcaaacaattttgaaattatggcaatatctattatcacaaaagaagaccttcaggagtttaaaactgaattgctggaaagcattgaaaagttacttcagggtaacacatcagaacaaaaattatggcttcggacctcagaggtcaaagaactgcttcatgtctcttccggaactttacagaatatgaggatcaacggaactttatcctacagtaaagtaggagggatgctgtattataattataaagacatccagaaattaatgatggatttcaaacgttcaccgataatcaatactcatggaaaagacgaaagataaaaatatcattcttttttttgaaagaattattgaagatgatcggctacatcctgcgcatatcagcatgtatgtttctctgtttcaattctggacctggaatagatttgagaatcctatttctatttcaagaaaaaaaataatgaaggagagtaaaatcagctctattgcaacgtatcataaatgcatcaaagagttgaatcaatacgggtatatcatgtacgaaccaagctataattcctgtaaaggtagcttggttactatggtagatcctaatcatttcggtattcggaaagagggtgttgaaactaaagtttatcacgagaatatctttttgattcctcaagtttcagaggttacgctcttttttttagaaagggatttgaaggtggaggaggctgaagtattttatgctcactatcaatctcaggactggaaattggatcatcatgcagggaaaatgaaaagctggcgggctgctgccagatgttggattatgaaattaaaagatgaggatcaacaggttgtccttgtacacactactcctaaaaatgacttctcatgaacatagacagagtggagtttttaggatggatggaacgtattatgaaacgttttgatattcttggagaggatatcaagggttttaaagatccgcatcatacgattgatggtgaagaacttttggataatcaggatgtattgcaactgttgaaaattagcagccgttctcttcagcgttatcgctcttcaggtaaacttccatattatacgatcagtggtaaattatattacaaattatctgatgttcatcagtttatcagacaggggttttccagatcagtgcaaagagccgggacaaagacagactaattgttccaggcaaagacgagtctatgtggtaaggttctctgggtattagcttaggaccaaattataaaatcatctgttatgaatgaattagaatcatctgcacctgaaatcgctgaccagctttctgatattgtattggttttcaataaggagaaaatgaaaattgaagcagttaaagggatagggcaaaatggagaactggaaactgtctcgccagataaaaaccatcagaatcagtttatgaaaattgataaaaccggagattttttctccaatttcttttctaattttctaagccagcttaaaaatcccacccaattttcattctttaaagttcctgctcctatcgccattgaggtggctgatgaactacagaaagcagctttagattcctctgaagaaagtaaggaagtctttgcgaagtatgagattaacacaaaacaagaaattaacaaacaacaaaaacaaaataaaatggaaaattcacccaacacaccagaggccaatgaatatcgttacaaagcagaagatattgattggaaaaccatgaataatcttggattgaatcaggaaaaacttgagaagctgaaaatattggaacctttactcaagggctacaaaaccaatgatcttgtttcaataagccttaatctgggcagtgctattacacgaatggatgcccgactttctcttcagcacaataatgaaggacaagtagtggttgccattcatggtattcgcaaggagcctagcctccagtatcccttttttggtcatgaatttacgcaggaagataaagataatctgctgaaaacaggaaatatgggccggattgtagagcttgaaaatcttaaaagtggcgagaaaattccttctattatcagtattgaccgattaaccaatgagctgattgctcttagagcagagaaaattaaaattcctcaggagatcaaagggat

SEQ ID NO: 2164 - DNA, 24227 bp, synthetic construct
  misc_feature 1..24227: note = Synthetic
  source 1..24227: mol_type = other DNA
gatagtttacatataggtttaaattatcaacaatgcgttgtgataaacgaccacttaacgtagttgttttcgttttaaagaaatctgacggttggctcaacgtaaacgattgaggtaaagcgtacaagtcttttcctttgatactcattcctctatccaaatacccgttaaactggtcaaagattaaatctacatcaatctgtgttccgtcaactggtttgaaggtaaacgatggtgctacagcaaagttcttgcggttattaatatctctaaatgttttagaatcctcataaccagcattcaaacggtataatattctcttttctttatctaaaggtccacctacgtctaacgttgttctcaatgtttgaaaacttccggcagctattgtaactaatcctttgtgttcttctaatggttttttagtaaccatattgattgttccaccaggtgaaatatctccaaataacgaagctccaggtccttttaacacctcaacactttctaagttgattgtcatcggagaacggtagtaactctctccaaatccgtaagcagaacgaagtccgttcatcaaacgcatcccgttgtcgtatcctgttttaaacccacgtacaacaaactcatcataagatgaggcttgtgttacacccgctaaatcttgtaccacatcggttacttgaaacgcttgtttatcttccatcaactcacttgaaacaacggatactgactgtgctaagtctttcaacttaccgctaaactttcctcctaacacagtactatttgtcaagtacgaattatcacggcgaattgttaccaatacctcatctaattgttgtttgtcgtcttctaaagtgatactcatccctttatccgcactgtaaactccttctttaagtgttacaacttttgttttgtagccaattgccgttaattcaatatcaattggcaactcaactttatctccaaagcggaactcccctttgtcattgctttctgtcattagcgctttttgtggtgctgcaaccaatacatcagcaataggcttaccctttccgtttagaattactccgaaaacagtttcggaaacttgggcaatagaaatcatgggaagaaataccaataggattgataacttccaaaaaagtgatttttgtttcatctatttagtggttttgtagtttctttttacagtggatgctccatatgaagtgtagagaaacctccttcttctgcatccttaattaagcgaaatccttgtttttgccagaactcaaaagcgccagtcaaaaacggatgtgtgtgtaggtacaacatattgatgcccttgtcaatagcaactttcttcagttcgtcaaccaagagttgtgctatttttttacgtctataagcaggctctacaaataagcgagctacttctactgtagtatattgactgtaatctaaatacggaaaacggtgatcgtattccatcattccaattacgccaattaagtttccttgttcatcgcgagcttgtaaaaaaacacccttagggttattgatatacacctcgttaaaattggctaagtcacccggtactttaacagggtcaagcattggaaacaacacttttctaaattctattacgtattgtaatatctcctgggcgtctgccagcgttactttggtaacctgtattttttccatcttatttctttcttgaaggaacatataatggtcgcccattattctgtaaatacgtcaacggcaacttatacgtcttttcaagcaactcgtgcaattcttcttgttcacacgtatttacgtctaaaaggcgcttgttctccgttaagtaaaacttatcaccatacataaatgccatattggggtcgtgcatcacacaaagtaccgtagtcccttgatctaccaaggcgcgtacacactctaatacagccacttgataatgtaagtctaagtgatttgttggttcatctaacaacaatacatctggtttttgaaccaatacgcggcacagtaaaaccaattgtcgctctcccccagacaatgacgtatatgccttgtctttcaagtgggctaagtcaaattgattcaacacatcttctaccgcttggtggtcctcctcactgggtgaaaacttagaaaaagaagcacgccccgtcaaaatcacgtctttcactttaaaaggaaaagtcgtttgatgaaactgcgttaaaaacccaaggcgtattccttgttgttgtcccggtttaatctttcttctctccgtatcaccaatgataatttcaccagtatatttttgttccaaccctgctaacacattaaacagcgttgatttaccactaccatttctacccagaataatagaaaactccccttttgcaaactgaacattcaccttgttcaacacttgttcttttccgtacgaaaaactcaagtcttttattgaaattatactgctcatccgttccaattcattaaacttttcttcattaagtagataaaaataggagcaccaatcaacattgtaaatacacctacaggtatctcaaacggcattatagcccttgaaaaatcatcaattaccaataagaatgctcccccgatactaatatttgcccaaacgcaaatactgttatctggtccgaaaatcattctgctgatatgaggtacaattaatccaaacaagctaattacacctactgccgctacagacgaagctgtaatcatagtagatacggcaattaacaccagctttaatacttttggattaacccctaccgccagtgcttcgttgtctcctaacgacaataagttaagcttccatcttaaaaagacgatcaccgccagtccgattacaataggataaacagccatatttacttttgaccaagaggccgtgtgtaaattacccattgtccattgtataatcgcttgcaacttatacggatcacttaaatattgcaatagcgttagcaaagctgtgaaaattccggatatgataattcctgacaacaccatacttacaattgaagtacgactaccagcataggaaacaccatacgtcattaaaacagcacacacaccaaaggcaaaagcagataagttaatagacataaagggaaaaagcattgccaacgccgctccaaaagcagcccctgaggagatccctaacgtaaaaggatctacaattgggtttctaaaaatggcttgtaatacaccaccagcagacgctaaagaagcccccactaaaaaagtcaagatgatacgtggcattcttaccttccataaaatagtctcaattggacttgtagctatatcctgcccttgccaacgtgcaaacattcgcccagcatagtgtagcaactcgcttagactcaggttttctgttgaacctaacaacagtgaacctatgactaaaacgataggaactacccacaataacgctacttttagcttattccccatattctatttatctaactaattattcgttttatatagctcttttaacaccgcttgtatttcaacattcagctcatctgccgatttctcgttgtaacaccagttgcgcacttgcttagcaaacaataaaaacttaactgtgtgggggtcgtaatagaatgttgggtacatttcatatacgtgtttgtttttaactgctggtaagttttctaattctttcaaactatacacatcattttgacttgagtcccaaaggataatgatatcaggattccatttgtacaaagtctctgctcctacatttggcgcctccatttctaaaggacaagcatttactgctccagacaaattaattgccaaatccattaaagtaccctttcctgaagttgataacacacgccctttagaccaagcataataagctgttttaggattttcgaacttagctgtttgcatttttgctacctctgctctgatataagtaacaatctcttcagcacgttcttttttacctaacaacgtcgccattcctatcaattccttataaataacctcctgactcttgcttgataccgtatatactttaattcccaattgttctaactgctctactgtttcaatgtctttgtcaaacgtaatcaccaaatcaggctgtaacccgataattgactctatattacttgaaccaccaccaaaactcggtgtagcaatctctttattggcaattctcttatccagtttagacaagaaagaaaacgtatcttctttttgatatacctgttgcggaatacccactaatttatcttgagctcctaacatatagatatcatctacaagtgggtcataaagaacaacaatacgttgtgccacagcgtcaagcgtaatctctttatctctacaatctaacgcagtaacacttgtttgttgcacttgctctttctcttctactttagacttacacgcattggtaaaaacagcgctaatcatcacaagtgcgaagaatagaaattgtttatttttcattagataattttattagttttctcacattcttcacttcgttttgcatcaacaaagttttttcttgtaagctgattttatcatttagtttcgcaagtaattgctcgtataaattcccgtcataaggcacggtaaacgatttcttgtcagcatcggtaaacaacggtaagtgcctgttgcctatatagtaacaaaagtctgctacttcgcgctctacatcagaagagaagacaatacacaaggcaggttttacagctattttagccaagcaaaccccatttgcacatagcaaatctccctgttgccaatctctattcactgttttagtaagatgaagttctaccccctgcttagtctgtcttttaatcaattgcttttgcgtttcaaaccattcaatctcaaacacatcagcaacttcatttgaacaacctacttcagcagacagaacctcatctattagaataacctcttgcataaagaaattactcttcagtatttttagcttttttctcagctactttatctttcaaccattgacaccattggtccattccatctccttttaaagtactgattgtaagcacctcaatattaggattcacttctcttgcatctttagtaacgttctcaactgtaaaaggtacataaggtaataagtcagctttagaaacaaccattaactcacttgttaagaacattcttgggtattttttaggtttgtcatccccttcagtagtcgccaataaagtaacgcggtaatcctctcctaagtcaaaagcagacggacataataagttacctacgttttctataaacaacaagtcagtttcacttaagtcgatatggtctaacgcttgaagaatcatttgtgcttcaatatgacacataccacctgttacgatttgcaaagcattaatccctacctcttgcatacgcacagcatctctatccgtttcagggtctcccactaataccgaaatgtttatatcattggctaatctcttacccgtttcttgcatcaaagtagttttaccagatccaggagaagaacaaacattaatcacacatacatttttcaatttctcacgaatagcatttgctacatagtcatttgcttttaataagtgaagagttgtattatcacattgaagtgaacctacgcggtttcctaaactttttggattgctagccatagtattaatttttaagcttgtttaaatattacttttgatataaataagtcatttccttgtacaatatttgacgaaggttgtccacaagggcatacgaacttgtgaaactcgactttaaaatccttattgcaggaatcacaatgagcaatgatatcttgtactactacatccaattccatatccttatacgtttcgttatctgctataaaagcatcaaaagcattctgaataagaacaggctgtacatttgacaataaacccgctgtaatttctattttgacgatatcttcacttttcgcttgataatgctcttcaagtgttgaaaaaatatcttttacgattgttaattcgtgcataacttcaatacgtcttttaattacaataaaatatgagtcaatctattcatcgcaaaatccaggccttttttaattgcaaaatcatattttgcataaaaagccttattttttgtccaataaatagaatatatatagtagctataaaatgtcagaaatggcacttacacttttctttactaaaatgtgcccaatagctaatgaatgttttaatccttttcctctgttaagtctaactgaaggcttaataataatcacactttcgttattaaaacaggacaaaattacgaggtatctcaaggcacaaatagcacaaatcttgactattctaccataaaataggggttcacaaaactttatgatttctatcttcttttttcattacttaaatattttcttatatttctgaaaaattgcataacatccactaaaaaaattagaaaacaacctaaaaatacaagcctaaataagaaaaaaagtaacacaccttatttttaatagaaaaaacacaaaacaaattcattagtattcccgcaagaaaaagaagtttaaaatagtattaaaaaagtgctttagcccccttttaaaccaaaaaaaatagcacaaaagagggataatttagagaccgtcactttatttcatttcgatatttatcacttgccataaaatagccttctgctaaaaatcaaatcatttttcccaaaaatcaaaatggcacttttcttgaataaaaaacacaattattatgtatagcattaacactttcaaaggtcaatcccatcaataaacaactatctttgccctcgtttagtagttttggcacatctgttgtttctacactaaatctcaatttgacttatacgcattaaaaaataggaagatatattcaattaatgcccaatacattatatatgacagaaccacaaaataacgcttttaccagctatcagaaattcgccatttttatacttgccattacgcagtttaccgtaatccttgactttatggtaatggctcctttaggtgatttgctgttaaagagtttagatatgaacaccaaagactttagtattgccgtatctgcctacgcctttagtgcgggtatagcgggattactaacggcgggctttgcagaccgatttgaccgcaaaaagctactgctgtttttttacgttgggtttatcataggaacccttttttgtgcccttgctaattcatacactacgttagtactggcgcgtatagtaaccggattatttggtggagtaataggctcaatctctatggctattatcaccgatttgtttagcttacaacaaagaggtcgcgttatgggctacgtacaaatgggctttggagcaagtcaggtattaggtattccgattggcttgtatattgccaacaaatggtattgggaagcgccgttttttatgattgtcggtttgtctatccttattgcctttgccattgctatttactttaaaccggtaaccgagcacttaaaattacaacaaaacaagaaagtggttgcccacctttggcataccttaaaacacaaagattaccgcatcggctttttgtcaatctgtttcttatcagtagggggatttatgctaatgccgtttggaaccatattcgcagtaaacaacttaggcgtacacccagaccagttgcctatcttatttatgatatcagggataagctcacttgccttaatgccattcatcggtaaactaagtgaccgtatggacaaataccgcttgtttacccttgccagtatttggttaatgaccgtatctgttgtgtataccaacctatttcaaatcccgttttggttagtcgtaaccactaatatcttaatgatgatcggaattatgagtcgaatggtacccgcaacagctttgagcagtgccattccatactctaaagacagaggggcttatatgagtatttcctcgtctatacaacaaatatcaggaggtatcgcagccacaatatccggattaatcgtctatcaagaatctgctaccagtccgttaatcaattacgataaagtagcatatatggtgattattgtgtcttgtatcagtattttcttaatggggcgcatcaaccgtttggttcaacaaaatagatagtgtggttttgtgtattttacagaaaatggtgtaaatttgcaagacaaaagtgcccctttatacattctgctataaagcagcactataaaataagatattgacctcagaattcgttctgaggttttttatttatataccttcctttactcaccctctcaattaaatatcataaacataatttgattactatttttatacatacagcacaaaaagaaaaactcccttgttaatcaaattaaacaagggagttttgaattatatataaaaagcaatttactcttttacaagctgacctttctcatcgtattcctctacacctactatctttttttcatcaaacggataaacactaaacggcagtaaatcagcaaagctttcaattgcatttaagtctttcgcaatcacatcaaacttgcttataacagcacttagcaactgcccaagggaaccatcaaacacaaccggaaactgcaaaaatataggcgttaaaaactgattagcaaactgatccatatttgaatcaaacggcaaacgcttaaaactaaactcctgttctacctcctttgcatctttgtaatacacagtcattgacaacggagaaccctttttaaccacttcaataaacggtttagccgtaaacaagtgttgccccttgatgaaataatcagccacaagcttattaccagcctttttaaccactattaaactctcaccgctcatatccttaattaacagttgatcgtccgttaattcaaacgaaatacggttaaaataatgcatctcaaacagatctatgaacaggctcttctcttcaaagtcttcataattgacaattcccacagcattcccctcttcaacttccttatacactcgcccactcttaacttttcctccttcatacaccgtttctaaatcgtacataaacggagcagcaaactgatctcttgccaagtaatcgtaagaatactgtgcttttcgctcaccctgttcataatagttaatcaagttaatctcagacagtattctaccctctttgaaatacccctcaaacggtttaccctctttataaacccctttatacatcttttgaggcttaccatcaatcataaaaccattgtcttccacttcaaccacccttcctttttcatccttcaaaatacgcttgtacaatcgcttgtcatcttcgtcataaaacaccttttcttctttcatatcactccttttttcttgagcaaaaacagtcccaaaaggcagacaacacagtgtccctaatactataattcctctgatactcttcataattcactcaatttagtttggtttaatttgtttctacacttatcgttagtaagctgaaagagaacacaatatagaaaaataattactgggatgttaaaatatctttacaaatggcgaaataattattacgcctataatcaaggttagctgtttgtctatcaattgtaaactccactaaatgtgtaacctacaagtataatatcagtcatcttacaaccccacatttataaagtttaccctattgatagattacaaaaaatccccatacttcaagtgaagtatggggattctcttatgttttaaaggcaatgcctatttatgttgatctattaaattgaggataaaaaaaatgccccgttatagtcgaggcaaactaaatgttttcacaacggaataatccttattgtgaattgctttcattattgtaaaacaaatatatgtgaatttattgatactaaaaaatataattatcaaatattttatcgtaatattataaaacattcacaccttttactgacaaaaaataacaatcatgaagaaaatattaggtttagacttaggaacaacatctattggatgggcttacgttcatgaagctgaaaatgaaaacgaagtatctactatagaaaaaataggcgtacgtgtaaacccacttactgttgatgaacaaataaactttgaaaaagggaagcctattacaacaaacgctacgagaaccttatctcgatctgctcgtcgtaacttacagcgctataaacttagacgtgagcatcttatcagtattctaaaagaaaacaattggattaaagacaatactcttttagctgaaaacggcaatcaatcaacttttgaaacattccttttaagagataaagcagctacgcaacaaatcagcttagaagaattatctcgcgtgttattaatgattaacaaaaaaagaggttataaaagtagccgtaaagttaacaacactgaagaaggacaattgattgatggtatggcaattgctaaaaggttatatcacgaacaactaacaccaggtcaattatcattacagttaattaaacaaggcactaagaaattacctgattattatcgttccgacttaaaccaagaacttgacttaatttggtcgtttcaacaaaaattctatccggaagtatttactcctgtatttaaagaattactaaaaggtaaaggtcttagagcaacttctactcaattctggacaagttacagctttaacacggctgataataaaggtacaagggacgagaaaagactacagagctaccaatggcgcgctgatgccttgactaaacaattagacaaagaaatcgttgcttttgtgattgccgaaataaacggtcaaatacataactcatctggctatttaggtgctattagcgacagaagtaaggaactttactttaatcaatggacagtaggacaatatctttacaaacaattaattgacaatccacatacgcgtctaaaaaaccaagtcttttacagacaagattacttagatgaatttgaaaaaatatgggatacacaatctaaattttatccaaaagaacttacacctattttaaaagaggaaataagagatactataattttctatcagcgcaaattaaagtcacaaaaaggacttattagtttctgtgaatttgaacaagaacagaaagttattaatggtaaaacaaaaacaataggacaacgcgttacgcctaaatcttctcctctatttcaagagtttaagatttggcaacaactacataatgttactttaagaaataaagaaactaatgaaataataaatttagcagctgaacaaaaagaacatttatttgaagaattaaacttaaaaggcaaattatcaaatgcccaagttcttaaactaattgaatacaaacctaaaaagtgggagctaaattattcagaattagaaggaaacaatactaacaaagcattatataacgcttacttagatattattgacattgctggttatgatatccgcaatgaattaaaaataaaactgaacaaagacgatattgaattaagtgatttagatgtaaacgcatctgaaatcaaagaaatgatattctctatttttaaacatttaggaatcaatacagagatcttagagtttgatgctactttagaaggtaaagcttttgaaaaacaagcttcttaccaattatggcatttgttgtattcatatgaagaggataactcaccaacaggacttgatagactatatgatttactacaaaagaaatttaacttcacacttgaacaagcaaagtgtgtaggtaatgtattatttcaagatgactatggaagcttatcttcaaaagctataagaaaaatctttccttttatcaaagaaaacaattacagttctgcttgtgaatatgctggatataaccactctaaacattctcttacaaaagaagaaaatgaaaagagagaactaaaaagtcgcttaactatcttaactaaaaatagtttaagaaatcctgttgttgaaaagattttaaatcaaatgattaatgtaatcaacacattaattgatggagaaaatgagaaattagttgctcaaggaaaagaacctaattttcaatttgatgaaatccgtattgagttagcacgtgaacttaagaaaaatgctaaggaacgtgaagaactaacaaaatcaatgacacaaggaaaaacagaccacgagaaatttatcaaaatactacaaaaagaagatggcataaagaaccctactcgaaatgatattataagattcaaattatataatgaacttaaaaacaatggttataaagacttatatacaaatgaatatatcaagagacaagacatctttactaaagagtatgatatagagcacattattccacaatctaaattatttgatgatagtttttcaaataaaacattagtgcgtcgtaatgtaaaccttaagaaaggaaatcagactgcttatgactttattctttcggaatatggccaagaaaaagcaaatgaatttgaaacaagagtcacagatttattcagtttaggacaaacagaaggtatctctaaagcaaaacacaagaagttattaatgcgtgaaaatgaaattggagaaggtttcattgaaagagatttacgagaaacacaatacattgctaaaaaagcaaagtcgatgttatttgagatcacgcgttttgttgtttctacttctggaaaaattactgatcgtttacgtgatgattgggggcttatcaatgttatgaaagaacttaatcttcaaaaatatagagatgcaggactgacagaattcattgaaatgaaagatggtaataaaaaagaagttataactgattggactaaacgtaatgaccaccgtcatcacgctatggatgccttaactgttgcttttactaaacacaatcatattcaatacctaaataatctgaatgcgagaaaaaatgaaaatgctaaaaaacatagtactattattgctatcgaaacaaaagaaactcatattgaaaaagataatttaggtaatagaaaaagagtgtttaacgaacctattcctaatttcagaaacattgcaaaagcccatttagaaaatgtcttaatttctcataaagctaaaaataaagttgttactaaaaacatcaataaaataagtggacaaaaagtaggacaacaaacattaacaccaagaggacaattacacaaagaaacagtctatggcaaaatacgccaatacgtatccaaagaagaaaaggtaggtcctaaatttactgttgacataattgaacaagttagtaacccaacatatcgcaacttattattaaagcgcttagaggaaaacaataatgatcctaaaaaagcatttggaggaaaaaatgcattaaacaagacacctatttatattagtttagaaaaagacaccaaagtaccagaaatagtaaaattagtctggttagaagatgattatacaatacgtaaagaagtttcacctgatctaaaaattgataaagtaattgatgaaggggtgaaacgaattttacaacaaaggttaaaagactatgacaacaatgctaaaacagcattttctgacttagataaaaaccctatttggttaaatgaagaaaagggaattgcaatcaaaagggtaactatatctggtgttaaaaatgctttaccattgcacattaaaaaagaccatttaggacaacctattttagacaacaaaggtcgtgaaataccagttgatttcattagtacaggaaacaaccatcacgtagcaatctatgaagatgaaaacggtaaactacaagaaagtgttgtttctctttttgaagcagtagaacgcgtaaatcaacagttgccaattatagataaaacacttaaccaacacttaggatggaagtttttgtttacaatgaaacaaaatgaattattcttgtttccaacagatgattttaatcccaaagaagttgacttatttgataagaaaaactatgcagttataagtaaacatctatttagagtacaaaaaatatctacaaaaaactatatgtttactcatcacttagaaacaaaagctattgatggtgaaactttaaaaaacaaaaaaacattagctgaaaaagtttattattcaataaggactcctgagaatttaataaacataataaaagtaagaaccaatcatttgggagaaatagtacatataggcgagtattaactaattagcatcattatgctcaaacgaactatctacattggtagtccctcctatttaaagttagcgcatcgtcaattaaagattgacgatgcactctctggagagaccaaaggaacagtgcctattgaagatttaggatttttagtattagatcatcctcaaatcaccatatcacatcctgttattcaatttttacaacaacacaatgttgccattattagttgtgatgaatctcatttaccagtaggacttatgttaccgattagtggtcatattgagcattctgaacgcttaaaacaacaaataaacatatcagaacccttgcgcaagcaactttggaaacaaactgttgaagctaaaatatatcaacaaaaagaggtacttcgcaaacaaggtttagtagaggaaccaatgacaaaataccttaatgaggttaagtctggtgatagtacgaatatggaaggcattgcagcgcaatattattgggggcaactttttgacgactttacacgttccagagaaggagattcgcccaataactttctcaattttggatacgccattcttagaagtatggttgcaagggccattgtgtgtagtggcctccaccctactttaggaatctttcatcgcaataagtataatgcgtattgtttagcagatgatttaatggagccctatcgcccttatgtagatgaattggttttagaatggataagcaatccgcttaatccagcagaaataacaaaagaagccaaggcacatttattaaaaattgctacaaaagacgtttacattaatggcttaatcagacctttaatgacagcactgagcattaccacaagttcactgtataaatgcttttcaggagaaagtagagtaattcactatccgatgatcaaatgagttttagccgttataatgcatatcgaattatgtgggtattagtattttttgatttgccaacagattctaagcgacagcgaagtgttgcttctaagtttagaaaaaacttaatagatgatggttttaatatgttccaattctctatctatatcaggcattgtcccagtagagaaaatgcagaagtacatatcaaacgagtaaaaaaacaacttccagcagagggaaaaattggaatactctgcattacagataaacaatttgggcaaatggaactcttttttgctaaaaaagaaacagagcttcccgttatgccacagcaattagaactcttctaatagaaacaaaaaacggctataaaacattaagtttatagccgtttttttggtttttattcatcctataatctacctcaatcccttgttttacaacgcttttcacgaggctgtgtgattacacgataaaaatacaataatttgaaagcaattcacaaccatccttcttctggtcttacaactactatagctgtgtgattacacgataaaaatacaataatttgaaagcaattcacaactaaacatactgtatcaataaagaaatgttagctgtgtgattacacgataaaaatacaataatttgaaagcaattcacaaccaatcttacatcttaacgactgctaaatatgctgtgtgattacacgataaaaatacaataatttgaaagcaattcacaacatattgtccgttttttgagattagtttgtagctgtgtgattacacgataaaaatacaataatttgaaagcaattcacaaccacaatctccctgattattatcaaaaatatgctgtgtgattacacgataaaaatacaataatttgaaagcaattcacaacatattatatagtttctagaattttaaaatcgctgtgtgattacacgataaaaatacaataatttgaaagcaattcacaacatcccacgtaaacaaaaaaaaaccctgcaagctgtgtgattacacgataaaaatacaataatttgaaagcaattcacaacaagttgttagacagcattataaaaaacattgctgtgtgattacacgataaaaatacaataatttgaaagcaattcacaactatacgcttgttatactcggcgttaaaatggctgtgtgattacacgataaaaatacaataatttgaaagcaattcacaacttacgtttacggatattcttaacgataaaagctgtgtgattacacgataaaaatacaataatttgaaagcaattcacaactggtttaatattcgatgagcgtaattgtcagctgtgtgattacacgataaaaatacaataatttgaaagcaattcacaacagtttaaaaaatcataattattacccacaagctgtgtgattacacgataaaaatacaataatttgaaagcaattcacaacaacttttgtaggtttaactccatttacaaggctgtgtgattacacgataaaaatacaataatttgaaagcaattcacaacctggtcggtactctatttacagcttcaaaagctgtgtgattacacgataaaaatacaataatttgaaagcaattcacaacaagacgcattaaaagaattatggaattagagctgtgtgattacacgataaaaatacaataatttgaaagcaattcacaactgaatatgtgttttgcctatcttaacgcaagctgtgtgattacacgataaaaatacaataatttgaaagcaattcacaacacatctgtgtccattaacttaacttcaaacgctgtgtgattacacgataaaaatacaataatttgaaagcaattcacaacttgccaagccgacttagcaatatctattttgctgtgtgattacacgataaaaatacaataatttgaaagcaattcacaacaaaaactataaggatctgtacgaggacaatgctgtgtgattacacgataaaaatacaataatttgaaagcaattcacaactaagatgtttaaacgttacgcaaaaggtcagctgtgtgattacacgataaaaatacaataatttgaaagcaattcacaacagaattagagaagtcggcaattgctaaaaggctgtgtgattacacgataaaaatacaataatttgaaagcaattcacaaccaatgattaaattgcaaggtcaaggattgtgctgtgtgattacacgataaaaatacaataatttgaaagcaattcacaacgcctttgttgttgaattacttgcaaaactagctgtgtgattacacgataaaaatacaataatttgaaagcaattcacaactactattgatgcacctactatctatactgtgctgtgtgattacacgataaaaatacaataatttgaaagcaattcacaacaagtaaagaagaggtgacagaaatcttacagctgtgtgattacacgataaaaatacaataatttgaaagcaattcacaacgctaataacactgataagttaaaaacattagctgtgtgattacacgataaaaatacaataatttgaaagcaattcacaacataaatatacttgaataatgcctatatttagctgtgtgattacacgataaaaatacaataatttgaaagcaattcacaacgtaatattaaagtattgaccgatacccatcgctgtgtgattacacgataaaaatacaataatttgaaagcaattcacaacttgaaaataaaaatatgtatgatgaattatgctgtgtgattacacgataaaaatacaataatttgaaagcaattcacaacaaggcaaagaaaacgtacaaatagtaaagtgctgtgtgattacacgataaaaatacaataatttgaaagcaattcacaacaggtggttttatcgcctaaatgatggagctgctgtgtgattacacgataaaaatacaataatttgaaagcaattcacaacaatcgacgaatcttatttcactaacaagttgctgtgtgattacacgataaaaatacaataatttgaaagcaattcacaactggagctttaggagggtataagcacatatagctgtgtgattacacgataaaaatacaataatttgaaagcaattcacaacattattaaatatataattgacgcatatatagctgtgtgattacacgataaaaatacaataatttgaaagcaattcacaacagaagagcgaagaaatagagagcttaaagagctgtgtgattacacgataaaaatacaataatttgaaagcaattcacaacaaatgctttcatattgttttcgttttaattgctgtgtgattacacgataaaaatacaataatttgaaagcaattcacaacgaacaattcggtttattccaggttcaaaaagctgtgtgattacacgataaaaatacaataatttgaaagcaattcacaacctatatatatagataatcaatatacagggtgctgtgtgattacacgataaaaatacaataatttgaaagcaattcacaacaatcaattaacaaaggtggttacgctactagctgtgtgattacacgataaaaatacaataatttgaaagcaattcacaacgaacctaatttaattaattcagtagctaccgctgtgtgattacacgataaaaatacaataatttgaaagcaattcacaactattgtcattatgtatatctattccattgggctgtgtgattacacgataaaaatacaataatttgaaagcaattcacaactacacatctccactctcttgcgttccatgtgctgtgtgattacacgataaaaatacaataatttgaaagcaattcacaactaacgtctccagttgttggttcaatcattagctgtgtgattacacgataaaaatacaataatttgaaagcaattcacaacattatgtcgctccctttaggttgtaacgctgctgtgtgattacacgataaaaatacaataatttgaaagcaattcacaacaattggtcgagtaatataacaaaacaaatagctgtgtgattacacgataaaaatacaataatttgaaagcaattcacaactatacgtccgctaattgttcttaattctcggctgtgtgattacacgataaaaatacaataatttgaaagcaattcacaactccagccttgaatgctgttaaagtaggctagctgtgtgattacacgataaaaatacaataatttgaaagcaattcacaacagcttgtctgctctttctttgtcaaacccggctgtgtgattacacgataaaaatacaataatttgaaagcaattcacaacttagatacagctgctgttacagcgtataacgctgtgtgattacacgataaaaatacaataatttgaaagcaattcacaactaagcctaatctactttgtgttctttctttgctgtgtgattacacgataaaaatacaataatttgaaagcaattcacaactgtgtagtctccaggtgcgtaagcgttgtcgctgtgtgattacacgataaaaatacaataatttgaaagcaattcacaacactttaagttgttggtagacgtaaaaacacgctgtgtgattacacgataaaaatacaataatttgaaagcaattcacaacaaacctctttaattacctctctctctactggctgtgtgattacacgataaaaatacaataatttgaaagcaattcacaactagtgccttcgaaaaaatcaatgtaggattgctgtgtgattacacgataaaaatacaataatttgaaagcaattcacaactaaatagataaattttataattgtttgattgctgtgtgattacacgataaaaatacaataatttgaaagcaattcacaacactgcctgttatcggtaaaagtaactctttgctgtgtgattacacgataaaaatacaataatttgaaagcaattcacaacagactccacatacgaagcgccagccataaagctgtgtgattacacgataaaaatacaataatttgaaagcaattcacaacctatacttagtattactataatcagtattagctgtgtgattacacgataaaaatacaataatttgaaagcaattcacaaccatggcgacaatgcacgccgtgcagattacgctgtgtgattacacgataaaaatacaataatttgaaagcaattcacaactgccctaccgacaatacaataatagttggagctgtgtgattacacgataaaaatacaataatttgaaagcaattcacaactattgctttttgatttcaaagcctacgggggctgtgtgattacacgataaaaatacaataatttgaaagcaattcacaactagactttgcagtgtttgcaactgaatttagctgtgtgattacacgataaaaatacaataatttgaaagcaattcacaacaaagcatagtctaatacttccatacacttagctgtgtgattacacgataaaaatacaataatttgaaagcaattcacaacattttagcaactacccatttacgtgcgtcagctgtgtgattacacgataaaaatacaataatttgaaagcaattcacaacactcaaacaacctattttgacctattttaagctgtgtgattacacgataaaaatacaataatttgaaagcaattcacaacgatcttacaataaggaaggttcacacccatgctgtgtgattacacgataaaaatacaataatttgaaagcaattcacaacgatattgaaagattgagaagacattactatgctgtgtgattacacgataaaaatacaataatttgaaagcaattcacaacatgaaaagtgtggttggactggttcaagatgctgtgtgattacacgataaaaatacaataatttgaaagcaattcacaacttcggtatagttgagatttacgctttcttcgctgtgtgattacacgataaaaatacaataatttgaaagcaattcacaacatgggttacgaggtaaagagctttgaagcggctgtgtgattacacgataaaaatacaataatttgaaagcaattcacaacgatcttacaataaggaaggttcacacccatgctgtgtgattacacgataaaaatacaataatttgaaagcaattcacaacgatattgaaagattgagaagacattactatgctgtgtgattacacgataaaaatacaataatttgaaagcaattcacaacatgaaaagtgtggttggactggttcaagatgctgtgtgattacacgataaaaatacaataatttgaaagcaattcacaacatgggttacgaggtaaagagctttgaagcggctgtgtgattacacgataaaaatacaataatttgaaagcaattcacaacaaatcggtacgggtggtggtaaaacacttagctgtgtgattacacgataaaaatacaataatttgaaagcaattcacaaccatttaattgatgttcgtcaagttcaatttgctgtgtgattacacgataaaaatacaataatttgaaagcaattcacaacatattagccaataataaaattcaggaatgtgctgtgtgattacacgataaaaatacaataatttgaaagcaattcacaaccgaccgaccgcagcatccgtagtcgcacaagctgtgtgattacacgataaaaatacaataatttgaaagcaattcacaaccagggggaacgctcatatattctgccctctgctgtgtgattacacgataaaaatacaataatttgaaagcaattcacaacaggcaaatatgtggataattctggagcaatgctgtgtgattacacgataaaaatacaataatttgaaagcaattcacaactaacattaatacacactgtaccacccgaaagctgtgtgattacacgataaaaatacaataatttgaaagcaattcacaacatggactgaagagaactttataaacagcgtgctgtgtgattacacgataaaaatacaataatttgaaagcaattcacaacacaatgtataagagataaagaacactttaagctgtgtgattacacgataaaaatacaataatttgaaagcaattcacaacaaactttgatgcgagtataaatactcatcggctgtgtgattacacgataaaaatacaataatttgaaagcaattcacaacgcacttattatcattatcctttgctcattagctgtgtgattacacgataaaaatacaataatttgaaagcaattcacaacttagtcagagataaggctgataaacgtattgctgtgtgattacacgataaaaatacaataatttgaaagcaattcacaactccccgttaaggcattgcaccgtaacggtagctgtgtgattacacgataaaaatacaataatttgaaagcaattcacaacagcttgcaaacactgcaagccttgcacctggctgtgtgattacacgataaaaatacaataatttgaaagcaattcacaactactgaggagtaacccattagcacttttgcgctgtgtgattacacgataaaaatacaataatttgaaagcaattcacaactacacggtagcgacatcgttagccccgaaagctgtgtgattacacgataaaaatacaataatttgaaagcaattcacaacacggcgttctttaaccattacgtagtttacgctgtgtgattacacgataaaaatacaataatttgaaagcaattcacaacgaagtgcaataaatattaatcaatatgcatgctgtgtgattacacgataaaaatacaataatttgaaagcaattcacaacacggcgttctttaaccattacgtagtttacgctgtgtgattacacgataaaaatacaataatttgaaagcaattcacaacgcatctatggccgcttcgataaattcgcgggctgtgtgattacacgataaaaatacaataatttgaaagcaattcacaacaaatagactccgtaggcgccgaagtcgatagctgtgtgattacacgataaaaatacaataatttgaaagcaattcacaactattattcctacaactatttacaaattcgggctgtgtgattacacgataaaaatacaataatttgaaagcaattcacaacatagacttggaacatcattttgaaaacaacgctgtgtgattacacgataaaaatacaataatttgaaagcaattcacaacatatgtgttgcaggtgctaattacgcttttgctgtgtgattacacgataaaaatacaataatttgaaagcaattcacaacgcactacttcttcgcttatactccttcattgctgtgtgattacacgataaaaatacaataatttgaaagcaattcacaacatctattgcaggacagttgaaagcgtttaggctgtgtgattacacgataaaaatacaataatttgaaagcaattcacaacaggtaagtctgataatctatttcaaagccagctgtgtgattacacgataaaaatacaataatttgaaagcaattcacaacgcattagtaataactacatctttaaaaagtgctgtgtgattacacgataaaaatacaataatttgaaagcaattcacaacaccacaacgcaataaggcaaatcgtcaaatgctgtgtgattacacgataaaaatacaataatttgaaagcaattcacaacacaacaagacatattccatacccctactgagctgtgtgattacacgataaaaatacaataatttgaaagcaattcacaacaaaaacttttaatcatgcatcggggaattggctgtgtgattacacgataaaaatacaataatttgaaagcaattcacaacaccacaacgcaataaggcaaatcgtcaaatgctgtgtgattacacgataaaaatacaataatttgaaagcaattcacaaccaaccgtgacgatatcagcaccaacattacgctgtgtgattacacgataaaaatacaacaatttgaattgtaaaatcactaaataccaaaacaaatattatccaatgaaataaagcaattcac

SEQ ID NO: 2165 - DNA, 24227 bp, synthetic construct
  misc_feature 1..24227: note = Synthetic
  source 1..24227: mol_type = other DNA
caaaagaaacattcgaaaaaaatcctgaaaaatcatttacagctttcatataataaagtttcaagaaaaataattgagcaattacagatcttaacaaaataagcgttgattggtaagtaaataatcggtgacttgtaggttgaaacacatttgtttatttttgatcatgaaaaacatcctcctgcttccatttttgttcatcactacgtttgtctttgcgcagtcagataatagtattgtaaagctaagcaacccgtcagaagtaaattcatctaaaggctattcccaacttgcagaagttaatttgggtacaggcaaaatgctcatcctttcaggccaggtggcgtttgatgttaaaggcaatctggtaggtgcaggcgatattggcaaacaaaccgaacaggttttcatcaacataaaaaatatagtggaaagtgctgggggtagtatggataatgtgattaagctaaactattttatgaaagatgtgaaccagataggtgcagtaagacaagtgagggataaatacattaataccaaaataccaccaaccagtacgctggtagaagtgagtaaacttttcagagacgatgtactgattgaagttgaggctacagcgataattccttctacagaataattatcactgattaattgttttcggcttcgggtattgacaagtatactgcaagtatatcgatactttcagtcacatcaaaatcgattggatcgtcagtagtgaatggtttggtgtaagatcccgagcatttggtaagtatattcaatattccggctaaatcgatcccatttaatgaatagtatattttctgaaggtctttttttgttactttttaaagttgtaataatttttttccattcagatcggttaaagtcctttgctgaaaaatcttctctgaagattcctttgacaacaatttgattctgctcacaatatttcaacagtctatcttcctgttctgggagagaatagccatttctcatctgttcatcagtactcactctgacataaatacgctgatttcataaaatgtatggtttatgtagtatcaacgttttatgagcattgttttatttgaaataagatcaaaaagattgtgaaaatgagtatttaaggtggagagtgggggaattgttcctaacttaaaatcccactttaaagtattgtatcgaggggtagagattggtgactcaccgaatcactcaccaatcttaatatcttttatagctgcaaatgctgtataataaatttaggtataaatgttttaaaacaaaaatcttctccaacatgataggtcgcagaaattttatgctcagaaagtttgtcttttggacataattcattaaaaactaatagagtgttttcctaaaaaaaattaactttaatcattatgggaagacccaaaaaaacaatccccgaaaattttatcaaggatgtacgtcgcagtacccgaagaatcttcactgcagaatagaaattttgatcgtgatggaagcgctacgtgcagagaattctatcgccgagatctgtcgtaggcacagtattaacttaatacaaatttacagacatttttattaagtggtagcaatgaaagcgcaagaactaagagcaggaataatcgcagtattttttataaatttgtatgatcttataattggcataggttgaccgaaaacactggcatcaacattccgaaatgcccaagtgattaaatattgaagctgtaatcttgcaaaataataccgaaattaaaaaaatggataaaaaccgtccttcgctcataatgagaatatcaaaaatatttttaaaaacaatcttaggaattgtagccataatcgctatcctactcatcacgacattcctgattcatcaagtcaattcaagcatcgaatctgataaaattgaagattatggtcaaaaaataaaaatttttgacggtacaatgaatattacaatagatggccatgatccagacacgattgtgttactcaccggatttggaacggcaagcccaagattagattttgaaccattaatcagaaaattagacaaaaagtatacagtgatcacgattgaaccttttggttatggattgagtagtgaaacaaatcgtgaacgcagtttgaataatatgtcggaagaaatccatgaagttgtgaaacaattaaatcttaatcgttttatattaatggggcattccattgctgggctttacagcttagcatacattaacaattatccaggtaaagcaatcgcatttgtaggtgttgataccagtgtaccaacacaaccttggccgggttataattctacacctatggactttttagccaaagtaggtgtaatgcgtgcatttttaaagttttttggaaatgaaaaacctaaagaagaatcagaagtacaccgttttgaacaagaacacatgattacgatgaaagtaaccggaaacaatactttgcacagagaagcaacttcattaagtaatagttttaaagatgctcaaaaattatctttcccgaaggatttaccggttttattatttgcagacgaaaactcagctgtcaaaggctggacagaactgcatcaagcgcaagccaacagcgtggataagggaaaactaatcttattgcctggttctcattatctacatcatacacaatctaaacgaattgtagcagaacttgagtcttttttaggaaaataaaataattgatcccgtcgtagcgcttccttgtttgaagtgtataataacagcaattaaatgtgtataacattcactacttggatgatctcggtaaatcacacgaagaaaaaagttcacagtgatcaaggtgggtatttcgggaaaagtggtcaccttatttcgtatcaaactggccacccttggttctgccttaattattagaaagtactgtggcatcgatgccaaatgtcattaaatttcgagctttgagctcgctcgcgtttatcagatcctgctaggatttctcaagtgatgtacttgaatgtaccctatataaagtatttttggaatagttttattttgagataattcaagtgtaattgtgatatgtcatattttggagtgaaattaaaaattttggtacatagaagtgtatcattgccttaatttaggtgatgatatactttaatgtaataattttaattctagcattgttttaaggcaaaaaatatatgaaggcttaatcccaaaaaagacctccacactaatttcataaactgcaattgctggtacattaaagtttattattatttttattatctaattttaattggtttgaaaaatagggaagtttaccctttgcgatgttgatgatttttagcacaaatgttcaatagattactcccattgaagtttgtataaatgtttcatagaagcacttcagtcatcgtaatacaaaaccgatgctagtctaattttttattttcgcttaactcttttttcaagctgtctgtcaataagttattttttactaaataaccacttatcattttcaaaaatacttttgctttctttatatactccttctcgaattttgcacagtcaacagctgctagattgctatatgctctcataatgaatcttccagtatcttcgtattgcttacttacaaatagtgtcccgaccatagaaatataagaaacaaattcgtattgaatatgatttcttcttaaatactcaattggcagattttcattcatgctttgaaagtgcgaaattattccgatgtccttcaagtatttctctttttcaattacaaaccagtcatctattacatctccattcagattagtttcaagctcgtaatagcctattggttctatattgtcaagccaatcttgactttcaacgtagagacctattttagttctgataatagaatctctatgtcttctgtcaattagatattcaaaaccatcaaactttgtaataatttcatcttgaataaaaccattgaaaaaatccttgttctctgagttgtcagagaatattttgtttagagttataaatgcagtttttttcaagtcaaacatctcaactctttctgtcaataatacctcaagttcttggtctgtcataaggtggctgttaacgctaaatttacgaattacactaatataaaatatgcaattgcgctaatatttttgtgccttaaaaatcttattattttatgatactttttttagattctgatggtaagtataatgaagttgtttaaagtaagaaagaatgatattttgatataaaagttgtatcattctttcaaaaaaagcttagaaggtaaagatagattaaaaaagagctatgctgctaattatcactaggtattaagaaaaataatgcaaaagtattactgttacaagttgtggatgctatcttatatcgcttaaaaacaggatgtcagtggcgagaactaccgtgtaaacagttttttgaagtagaatatagctggaatagcgtttatcagcattttcgtcgttggtgtaaagatggtagttgggacaatattaaaaaagaactctttgccaagtataagaatagattagatatgagttgtattcagttggatggttcccatactccagttaagcgaggaggtgaatcctttggataccaaggaagaaagaaatgtaaaaccactaatatgctttttgtatgtgataatcagggaatacctattgcgtataaccaacctctagcagggaatcatcatgatacctttgaactggaacagcttatgggggaagttattgaggatattaaaagctcaaatatcaggactgatggactttttctaaatgctgatgctaggtttgataccgataagttcaggaattactgtttcagtaatgaagtctttgctaatattgacttcaatcccataaatggaaaagtatctgaaagagagtatatttttgataacactttatataaaagaagatttgtaattgaacgtacaaatgcatggatagacgcttttaaagcatttttggtaaggtttgagaccaaagatttacattggaggtgctggcacttaattgctttttgtgctaaactaatcaggaaactttaaataacttcattgtattttataaattagcaaaaagaaaaaaaggttttgcttgtgatagttataaattaaatttttatgcttttttttatgatcctttgccaaaccgttaacagtaatcttaaaaaatcacttgaatcaaaatgaagacaataaagacatttactttctcaattctgatgttgatgatgatgtcatttaatgaaaggcagaaggaaactaatattgatccacaaaataatccgactgacattttgaaaaaaactgttgaaaaactgaataatttaaaaaatgttaattattcatattatcgtagtataaactatttttcggaagactatcattccgagacaagaggaacaacatttataaattttgataaatctaatacaagtttaggctttaagttccaattagaagatgaggatatgaaaatagtatataatggcattgagtatttttctttagataaaggagataaaacaatttcgataaaaaaacgtccgccatcaagcagctttgaaaatatatcgcttttcttaaactcattaatcacattaaaaaaatcattaccagtaattatagctgacagagaaattcataaaaatctgtctgatacaataattaataataaaagttaccatttagcttcatttgttttgaaaaataaaacacttagcggtcttggaaatttttcgccaataacattgaaacgaaattttctatacaaaattgttatagataaaagtagctttcttcctcttcaggttattcagacaaacgatgcagagcctaaagattatatgttgacttcttttgataacattcaaacaaaagacaatattccatccgaattatcttggtattattctacatataatgagtatgaacaaaaaacagataagcggctaactataattaaacataacgaagtagtaccaccctttaatttgccctactatgataacaatgacacaatttctttagctcagctgcaaagcaaatttgtattaattgaattttggatgaaaaattgtggttattgcatccaatcgatcccaacaataaatagccttttaagtaaatttgataaaacaactttaagtgttattggtataaatagctctgataatagcaaggaaattgcatttttttatcaaaaaaataagcctttgtttaaaacgttattggatgaaaatggaaaagttacacgggatttcggcgttgatgcatttcctcaagtggttctactggacgggaatagaaatgttatttattctggaagcttgaatattgaagaaatagaaaaactattgtcaacaaaataatttgaatcgtttcctttttttactttaaataacttcaatatctaatttctggtatctcttgattttatagctgattttataaaattaccaaatccggactctcttttcaggggatatataaagcttatctccgggactgatattgaaagctttataccaagcatcaatatttctaacaacaccgtttacgcggtattctgcaggtgcgtgatagttctgtgataccgttatacggtatgcttccggtgtataaaggctacggctggtttgggcaagagataaaaagtagcgctgatcagctgtatagccgtgcaaaagtaacgactcatctgtatgatcagcaaggtacagctgataagcttcataggcaacaactgccccagtcagatcgcctatgttctctccaacagtttgttttccgttcacatgaattccctctaaaggtgaaaaagcattgtactgctcaataagtagctgggtgcgcacttcaaattgttttcgtgtctgagaagtccaccagtcgcgtaccagaccctggccgtcaaatcttgatccttcatcgtcgaagcagtggcctaattcatgtccgatgaccgcaccaatcgcaccaaagtttactgctggatctgcataaggatcaaaaaatggaggttgcaaaataccggcaggaaattcgattgaattatataatttactgctggttgcatctacagtttgtggaacctgataccaatctttactggtaaaagccctttgaagcagagaacgttcatagtcccagcttgcttttgcaataagctgttcattacggataggattcttcgaatcaaactttatggatgaataatcacgccagacttcaggatagcctattcttacggtaacagcatccagtttagcctgagcttctttcctgctgctgtcgtccagccaatccaggtttttaagcctgactgcaaatgcctgtcggatatagtccactaaatccttgatttctttgatgtattcagaagggaagtatctttctacgtagagctttccaactacttctcccagacggttattaacatatcggattgatttttgttctctgggaatatcatctgtaacacctcccaatttagcagagtaaaagtcaaactggcttttgcggaattgttccggcagaagtgtagagtggttaacgatccaatgaaatgccagataagatgaccaggtttctataggtatattcgtaaatagggctgcttttgcttttatcgcagaatcggcctgcagtattacttcacttacactgcttacttttctttctgccagaaaggttttccagggaaatcctggagcgtaggtattcagttccgaaatcttcatcaggtgggaattaatcttactgtcacgcatttgcgcgggcgtccactgtactgctgctaatttagtttcaagtgcaagtatatcattagcacgtttatcagcgtctttgataccggcaagttgaaaaatatggcttatatattctttataggctgtacggtagcggggataaggaccatcttcttttttgtaccattcaggtgcaggcagtccaataccgctttcgcttagtgtaacaagaaatcggcttctgtcattaaggtccggtccggtatggatcgcgatgattgagaacgattttgggtctgccatccattttgtgaccccttcataactttttaaagcaagtatatgttttaaatccttttgaatcggtttgagtctcagtttctcgatgttattggtgtcaaggtagcctgaataaagtgcgcctacctgctgtagtggactattggctgtgccggtagcttttgttccattatgaattatctgtgctattctttcattaattttattagcggcatcaccatagttgccgaatgttgaagaccctgccggaatagtttttgatttcagccacccctcattaacatatttataaaagtcattgcccggcagcactgatttacttataaactgagtttcaataccaaaatctccgaaggaagcttttcttttatcagattcattcaactgtgcctgcatgtagaagggactggcagaaagtacagcagtcataattatttttaacattaatcctcctatttttgatccttgatcttttcggttttgagatagtatagaccggtctgaatgtctgattttataattcatattatattcattgtaatgtgccgaagttacttctagattttgaattatgattgtataaatgcgaacaggaaattatttttttagtgttagcagataatctgctttgttgaaatttttaggcgttgtccttattacagatgcaaacgtattattaaagtgcggctggtcataatagccatttgctgcagctagctgtgtcattgttatggagctggtatctgggtagacaatattatcaagcacttcccgtaattttatgatgcgaatgaataccttggggcttattcctatgtaatttttaaaaattttttgcagatgacgtactgaacagtttaaagaagatgcaattgatgaaacttttatatttcctttattggcaataatcatttgtgtgctttcaataatcaaagcagtttttatggtattcctaaacaaagggtaaaaagcttttgtaatatagctgcatattttttcactgcctaatccaatcattgcagttaaatccgatactgggactacccctatttcactaatggaacaaatcttatcagtaaagatcttggcatttgaaattccaaaatgtgcaggtgtccagggaaaaagctggatcattatagcttttgtgtctgaatgaatatcaatatacatcgtctcggtgatctgaccacagaagtaaacgccttctggcattgttttaatctgattttgatgctttatgcttagtccttttccctgaataacagctatcgtaaagtttttacaaattatatggtacaccagtagctaaagatattatgcctatgattataactttggaacagtagtgttgcaacaataccaactttatattaaacattattatatgatttaaaaggttatttaaaattgttaaagtttgtaagcgtgattttttagcgagtttgataataatcctatttcgatcagaattactttatttgattttttgagccttatcaatgattttcataataacgtttccaataaagaaagtatttccaataaagattttactttagcgattcctccactataattaatttaaaacttgggctgtagtatcgcggattatattttgcataattggatgatgattcataataatgactcttttttttatcattattttcaagactacacaatctttaaataaaaaaatgccccgaagatagtcgaggctctaaatgttttcacaacggaaaaatccttattgtgaattgcttttcaaaattattaatacaaatataagtcaaaaaatcattactgatttacggaaatccacaatttgaataaatttttaattattacttttataaagtatcaaaaaactaaaagtaatgactaaaaatatattgggtttagatgtaggagtttcatcaatcggttgggcacttattaacgaggatattgaaaatccaaagaataataagattataaaattaggggttcgtgttaatccgcttactgttgacgagcaaatcaattttgaaaaaggaaagcctataacaactaatgcgggaagaactttagcaagaggcgcgagaagaaatctgcagagatttaaactaaggagatttcatcttattgatattttacaaaaaaataacattctgaaacaagctgatttgcttgcagaagttggaaagaattcaacattccagacacaggaaatacgggctaaatctgctaaacaaaaagtagaattatctgaattggccagaattttccttttaattaataaaaaaagagggtataaaagcagtcgtaaagccaaaaatgaagatgaaggacagattatcgacgggatgtttattgccaaaaaattatatgatgaaaagctgactcccggagaatattcttatcaacttttaaaagagagtaagaaacagttacccgatttttatcgttcggatttacagtcggaatttgataaaatctggaattttcaaaaacagttttatccggaaaattttagtgataatctttataaagaattacaagggaaaaataaaaatgccacctggaagactttagaaatacctttttcactagtcggtatcaagcaaacgggaactttgcaggagaaaaaactggagaaatattcttggagaagtgatgctgtgaaaaaacagcttgactatgaaaaattagcagttgtttttcaggagattaatagtaatatttataattccagcggatatttgggagcgattagtgatagaagtaaagaactgtatttcaataatcagacggttggagaatacctgtacaatcaaattaaagagaatcctcatacgaaactcaaaaatcaggttttttatcgtcaggattatttggatgaatttgaaaaaatatgggaaacccaatccaaatatcatacaacattaacgaaagaactgaaagaagaaatccgtgatattatcattttctatcaaagaaaactaaagtctcagaaaggattgataagtatttgtgagtttgaaaaccgagagattgaaattaaagagaacggaaaaattaagaagaaaacagttggattaaaagtagctccgaaatcttcaccattgtttcaggagtttaaaatctggcagattcttaataatttgcagtttcagaatattgagtctaaagaaatatttccaattgatttagattttaaagaatcaatttttaatgaagtcaatataaaaggaagaatttctgcgaaagcagttttagatttattgggatattcaggtaaagaatggaatcccaattttaaagatattgaaggaaataataccaacgaaaatctgtataatgcttatttaaaaataattgctgacgaagaatttgaacttccaaaagaatttaaattgaatggtgatgatgatctttatgtttcgaagattgcctgttctgcaagtaaaataaaggattttgttaaagaaaaattttccgaaataggaattaatacatctattttagattttaaccctgaacttgaagggaaagattttgaaaaacaagcttcttatcaattttggcatttactttattcttatgaaggtgatgattctcagtccggaaatgaaaaactgtatgagcttctggagaaaaagtttggtttcaagaaagagcattccaaaatactgagcaatattggatttcctctggattatggaaatttaagcacgaaagcaatgcgaaaaatcattccccatttaaaagcaggtttgtcatttgctaagaaatcaaaagaagataatattctttctgcaactgcaatggcaggttataatcattcaaattcatataccaaagaagatttagcaaaaagagttctgaaagagaagttagaagtttttcctaaaaattcattgcgaaatcccgttgtagaaaagattttgaatcaaatgataaatttagtaaatgaagccgttgaagaatatggaacaatagatgaagtaagaatagaattggccagagagctcaaaaaaaatgctgaagaaagggcaaatatgacttcagaaataggtaaggcaactttacttcaccaaaagtatgcggagattttaaaaaaagaatttgatattcctgttccatctcgaaacgatattattcgatataaattatatttggaactggcaaataacggctataaagatttatatacagatgttcagattaaaagagaggaacttttcacaaataaatatgatatagaccatattattccgcaatcgcgattttttgatgatagcttttctaataaggttttggttccgagaggtgcaaatcttaaaaaagcaaatcagactgcatttgattatctggaaaatgaagacaagcaaaaattagaaaaatttctcaatattatcaaaaatctttatgataaaggtgaaataacaaaagctaaatatgaaaaactccagaaaaagggtagtgatattggcgaaggttttattgaaagagatttacgcgatacccaatatatagccaaaaaagccaaagaaatactttttggaattactcattctgttatttctacttcaggtaaaatcaccgataaactgcgtgaagactggaatctggtgaatacgatgaaagagcttaatttggataaatataaaaaattaggtttaacggaaactttactaaactctaaaggtgaagaaaaagaacgaattatagattggtccaaaagaaatgaccaccgtcatcatgcaatggatgctctcacagttgctttcactacacataatcatattcagtaccttaattatctcaacgcgagaaaagatgaagatcataagcagcataaagtaatatcaaatattgaaaatttaattactaaagtatttgagaagaaaaatggtgcaaagcagagaagatttatagagccaattaataatttcagagtggatgccaaaaaacatttggatgaaatattgatttcacataaagcaaaaaataaagttgttactaaaaatataaataagattaagaaaaaggggagtgtggttgcaaaaactgagcttactccaagaggacagcttcataaggaaaccatttatggaagttctaaatttcttaaaactaaagatgaaaaaatttcaggaaagttcgatttagaaacgattaataaagttcagaatgaaaagtataaaaatgctttattgcaaagactaagagaatttggggaagattctaaaaaggcatttacaggtaaaaatgtgatttcaaaaaatccgatatatcttgatgaagaaaaaacgctgcaaatacctgaaagtgtgactttagcctggtatgaaatgatatataccataagaaaaccggtgaacccggataattttaaagattataaaaacatagacaaagtaacggatgaaaagattcgtgctgttttaactgatagattgcgaaagtttaacggaaattcaaaagaagcattttcagatttagagaaaaatcctatttggctgaacaaatccaaaggaattgcaataaaaacggttacgattaccggaatgagcaatgtggaagcgttgcactataaaaaagatcatctgggaaaggaaatcttagataaaaagggtgatagaatgcctgttgattttgtaagtacagggaataaccatcacgccgctatttatgaagatgcaaaaggaaacttacaggaaagggtggtaagcttctatgaagctgttgaaagggtaaatcaaggactctctgttgtaaataaagattataacgctggtttgggatggaagtttttattcacaatgaaacaaaatgaaatgttcttatttccatcagaagattttaatcctaaagaaattgatttatatgatgaaaagaatttaaaactgattgctaagaatttgtttagagtacagaagtttggggagctttcgaagtcagggttttggtttagacatcatttagaaacatcagttgatgtaaaaaaagaattaagaaattattcttatttagacttttacagtaaagattttatgaaaacaatcgttaaagttaggcttaatcatttaggcaaaattgtacaggtaggagaatattaaattaaaatttgaatcatgattacacgctcaatctatatcggaagtcctgcgtatctgaagctcaaagacgaacagatgaaaatcctgtgtcctgaaaccaaaacggaaaaagggagtgtgcctgtggaagatttaggacttttgatgttggatcattttcaaatcaccatttctcataatcttattcagaaaatgatgggtaataatgtggtagtggtaagttgcgatactcatcatttaccacacgggatcatgttgccgctatacggacataccgaacattcggatagagtaaaagatcaattggaagcaagtgaaccactcaaaaaacagctttggaagcagacgattgaatgtaaaattgaaaatcagaaaaatattttgatgaggttggggaattattatgaaccaatgattgattatcaaaacaacgtgaaaagtggagatattaccaatatggaaggtatcgcggcccaacattattggaaatacttaattagtcttgattttctcagacaacgttttggagattctcccaatcagttcttcaactttggctatgcagtactgagaagtattgttgcaagagctatagtggaaacgggactacttcctgtattgggaatttttcataaaaataaatacaatccttactgccttgctgatgatttgatggagccttatcgaccgtttgtagacttgttggtgatgcagtggcttgaagtaaattctgataaggatgagcttgcaaaagattttaaggctcatatcctgcagattgcaacaagagatgtaaatattgacgggaaaaaaagaccacttttggtagctgtaaaaatcacagcgagctcgctttataaatgttatactggagaaaaacgtctgatttcttatcctgaattagtatgaataccgaaaggtttaatgcttaccgaattatgtgggttttagtattatatgatttaccaactgaaactaaggctaatatgaaggatgcaaatcgcttccgaaaagctttgattgatgacggatttacattgtttcagttttcaatgtatgttcgccactgtccgagtcgggaaaatgcagaagtacatattaaaagagtgaaatttatgcttcctaaagctggaaaagttgcaataatgagtattaccgacaagcaatttggcgatattgaaatcttctttgccagaaataaagaagagccacctccaacctttcagcaacttgaattattctaaattttaaattctaaaaataaaaacaatctactgattgtcaatagattgttttttgaggttgtgactaatcacgaaggtaataatttttgaaagcaattcacaacatgcagttccctgtgctgccaaagtattaagctgtgactaatcatgaaggtaataatttttgagagcaacttattatgatttgttcaatattaaccattcaattcggcgtttcatttacagtatcagccttcttgaaagaagcagctaacatatatagaaaatccaagataatgactgtttcatcttcattaacgcgtattccattatgccttaatatttttaatgcctgattagtggagaccattcgtcctgaaaaagattttgtaattcgattgatacttttttcaataatttttaatggtttatcaatttcttttttgactatgccgtcatgcattataattttttttagaattggatttatttgtaaggatttgaaatttccttttgatatagttatttctgaaggtgtaaacatacttacgatgaaccttttacctacataatcttgggtgctataggattgaaaaatactaattccattatctgaccatatatctgcaagttcagaattatctccgatcagtttctgtgtaagatgttgtaacctatcatttaagtagtgcataatttgattatgttctttttttgtatccctaaaatcatcaaagtctatttttccagcaagtaagtatcttcttgcttttgatatgaactccttatgctgggaaatttctacaagaacggcttttctttcattcaatgactgccttcttgcagagaatatattttcttcttccaatacaagattaaaaagctcgtacacgttgggaaggagagtaattctttttaagtagttttcatacgaagcttccaaaatatctgctctatatctgcctttgcatttcgaagtggtacaatggtaatatctgtattttgcaagtttgccctgtgaagtgcttcccgtaaatcgtcgtccacaaaaaggacaaactaagaatcctctaagtgggaataagaactttgtttgaaactttgcttcattctgtttgcgtctgcttttgagcaggagctggactgttctgaaaagatcttcagatatgataggttcatggattgcttttacaaattgaacaacttcatctttaattgctttaaccgtaattactccacaataaataggattatgcaatatcttccaaaaattattcttactacattgtaaacccttatgaacagtcatcattctaacctgattgatcgaatatgtaccagttgcaaactgctcaaaagcccatttaattaaatctgcctgtggttgtttagggctcatgatttttctgccttctagtgttgactggtttatatatcccattggagctcttcctggccatctccccatttttcgagccctacgcattccatcagacgcgtttctacccctcctattgttttcggcttcgggtattgacaagtatattgcaagcataacgatgctttcaggcacatcaaaatcgattggctggtcaatagcgaatggcttggtgtttaatgctcttaagataccaagcatttgataagcatattcgatattccgactaaagcgatcccatttaatgaatagtatattttctgaaggtctttttttgttactttttaaagttgtaataatttttttccattcaggccggttaaagtcctttgctgaaaaatcttctctgaagattcctttgacagcaatttgattctgctcacaatatttcatcagtctatcttcttgttctgggagagaatagccatttctcatttgttcatcagtactgactctgacatataaatacgctgatttcataaaatctatagtttatgtagtatcaacgttttaagagtattgttttatttgaaataagatcaaaaagattgtaaaaatgagtatttaaggtggagtataggagggtatctaaacatctttgaactgaacaaaacatcaattttacctgggttatctccaataatggttcttattatatttttcaacatagtattttatattaatcccataaggttttcgataatttagattgatttcatttcagatcaaaaattcaaaaaaatcatcaagtactgatactgataaaaatatagtttttagtatccgtgaaatttatatatttaattgcaactagttttttagctatttaattccatttagaaataatagaaatggtataaggagttcgacaggcctcccgcccatccgcttaaggagacgtttatatttaaatgtctcctttttttataggctccatgtattgattttcagtgtgttatatttgaataagattatgtaattaggtgttcgattttttcagtatttaccttaataaaaaagcattggccttaaaatacccctattattcagcattatgtgttcgatattcgtttaaccattcaatttcgtaaatatattaattttgtaagtgccttgttatgcagtagtctaacattgccgccctcgccaaaattagaccttatcgacttgatctgttaaattttatcgttaaaaggtacagtagtggaagtctattatttgataaaaaattgtcagcattatacttcacataaaaaacacatgggtgaggtttagagggttaccagatatgaatattgcataagttacagtatctcttgtaaaacctattttagaaacagttatagtaaagaatcataataatttttaataacttttggtagttatgtacttgaatgaaccactgtataaagtatttttggaatagttttattttgagataattcaagtgtaattgtgatatgtcatattttgtagctaaattaaaaattttggtacatataggtgtaaatcgtcagctggcaaaacattttagattaagcagaaactcggtggcaaaatggaagaagctttttattatatgaattgacaatattagtggtattgatttttagtacaaattatatgctttaaaatatagactactataatacattcgttccagttccatttccaaaattttgtttggattgaatgaatagtttttaaggaatgtggagaaatagtactagaaattaggaaatgtggttataatgtgccgctctgttgacgcaggcatttgcgtcaacattttttatgcttattttatcaatttatggaagttgatcagtgtttcggacttaatagctaagggtttaaaagcgagaaataaaacctgccttttatataaacacgcagatgctgaaccaggaggctataactccgattagaagtagcttaaggtatatatttctatcacgaggtgttttgttgagaaaacaggcaattagcatacagatcattcgcacagcaatacaggcaaaaagtaccaaaccgtaactccagataaatcacaggctcggctcacataaattattaattctcgaccgtatacacctttagcaagaaatgtcctttttttacatgtgatcgttaagaatcatgacactttctcattttgaagctctttaataaaatacgaaggagttatacctgtttcctttttgaaagcgtttagaaatacccgaggagtagcatatccgcattcttcagcaaggtagcttattttatatttcctgtaattcgggttttcataaagtttgttaataatataattgattttaagcctattgatatattctgcaaaactattatctctgtgtattttaataccttccgccagatatttgagattggtgtcaagatggtgggcaagccagcctatactaatatcctttctaagatatttttcagatttctcaaatttttcaagtttttgaagcagcgagtttgaaatgtcgtctgttataagctgggtaatcttggtttctttattttttacatttgcatttgcatttgtctggatttctccttctttatggcttaatttagtaaccaatgtatcatatttttcatgaaagtgcctgttttgtcttctccaagaaaataacgcgagtgcagctaccataaaaacaattcctgtaattaatataaactgattgtaggtctttttctcctgagtttttatagagtctgtaagtaatatgttatatgccttgtctgtattatttttttctctaattctaatgctatctttaagataagaatatttattcatatacatatttgcgttattagtatctcccatttcagtatatgcagtagcaagaaattcgaaagattctactctattatttggatcaggaaattgtctttcaagatcccatgccatctttgcatattctattgttttttgataatcttttttttctaaatataaccaactgagctgattcaataaaagtactttatcagcttcaactaaattatacttattcacaatgtttagactttttgtaaggtatttttcagcaatttgaatatttttgggtttatcagcttcttccagataaagtattcctaagcggatataattaaaggaaataagactgtattttttttcagttgtgatttcttgatctccatctttgatgagcttagctgcctcaagactttttttatggtagttgataaccgaatctttgaatcttttattttcaagtcttttgttaaaaaaataaattgtcatctgttcgtatacaagtgctaaagtataatttttaatgttagaattattaattttttctgcatatgttattgatgttttaaagtctcttatgctggcatcatcaaaacctaaatatcctaaagctaatgcattagatcgatagatatttgcgattgttctatctgcttgcgggcccgcgtcaatcttttttaattcagtggccagttttataatctccttatttttattttgcttttcatatatttctatgatgcggcgtccgctttttaaaattccccatttatatcctatcttttcagattcagattttagtttatataaatctttttctttttctacatcggaaattttagtattaaatcttatatcttctagtttcttgtcaataattgagatttccgttttcggaagattttgtgcttttataccgggaccggatattaaaaataagaggataaaaaataaatatttcatatcataaaataattttaacaaagatatgaatacctacttgacactttttcaataatgattgttagaatgactattattattacgtttgattgtaatgtattgataattagttttttgtaaaatattatggtcggtattattccagaataataccgatttggatcttgtgtgcgcctctttaaaatgatagtattgcagcattatttcaattgaccgccagatatgttcgaaggtttaattatacaatgatgcactgatatgaattctgaaaatataacgatgaaacgaaaatcttccctgtcttgtgatagggtaagattttttctgttgtttttgttattgacaggatgccaaatcattcaggctgctgacagtccgaaagaagcctatacccgaacggaaattgatggagatgcaagaatagtaatttcagaaggcatatcagtttccggattggagaatcttcgtattattactgtggaaataaataaaactcaaaatcagtctaaaaatagtaagaaaacaaagactgtaaaaaaaatacggtcccaaaaaacggaacgtaaaatcgctaaaactaggcaaaccccaaaaaccgcctataacttcagtaataatccaaaatcagatacgcatttatgccatccgatacttaggggtaccagtttcgcaggcccatcgttcagcttcaaatgcatcttagcaaatgaagtgaagattcttagcatactgctcgtaattacgggtatttttcttatcaatttctataaaagccggtcattctccggtaattactttttacaaaattttcaaaggcctccgccggagctcatgctgtaaagacagtacactgtcatcctgaacgaagctgaaggatctcaacataaaaaataaaagatgtttcagcaggctcaacatgacaaagagatgcttcctctgtcagcatgacaaagtgaagacgtgcattgtcatcctgagtacaaatgaaaagcaagtgaaacttgttttgaaatttgcgaacgaagttcagaagcggaatcgaaggatctccacataaaaaaagagatgtggcaggctcaacatgacaaggagatgcttccttcagcctgtaccaaacctgttgaatatagaaaatcaataacaaacaaaatttaacacataaacaaaatgaaaaataacattatccttttaggagcagtattaatttcaggtattgcattctcgcaggtgggtatcaatacggacgcaccaaaagcaacactggatgttgtaggaaaagcaaccgacaccagttcgttagacggtatcatcgcaccacggcttacaggagtgcagttgagagccaaaacctataccacagaccagacaggaacactggtatatgtaaccaccgcagacacggcacctgcaggacaaaccgtaaatgtaaccagcattggttatttctattttgacggtgctgtatggcagaaagtaggcaacggtgcagcagctcctgtaaatatctacaatgcaaacggaactcttacaagcggacgtacactaacacagaatggttttagtcttgctttcttaggaaccaatcagtctacttcatttttcccgaacaatgggattagtcagacaggtatagcaggaggtaaaagagcaagcataacattaacgtcaaatgacaataacagcgacggggtaagttctaatatgcaattattccaagaccctgaacaattgtcacaaataatcgtcggcagtgattcccgtggattaagtataggcacatcatttacgacacagcctgcccctataacatttataacaaatacaggaaatacaaacggaacagaaagagcccgcataacacctacaggtaatttcggaataaacacacaaggatttgcaagcgaaaaattggatgtaaacggtatagcaagaataagaacacttcctttgaacggcatcactaatgccattaatacaacatccggaggtacggcttctgcaagccaggatcaaacatttactgcaacacgaaccgttgtggcagatgctaacggtgttttgggatacgtaacgggattaccaactactgggggaggaaccccacctacaggatctattaatgtcggacagactatttcagctgtatattctgtgccgaatgcaacagcaactgcaggtagtggtgctttcagattgggagcttacgcaactgccaatgggctcacggctttgccttcgttagatggaattcagatcgatttgttaggatacgatgcaaactattacgttccgataataatcaatacagcctcaactgctcaattggttagtttgcaatcctttgccactgtagtaaattcaaacaaaactcttctgaaccaatcgctctcaccatgcccttttgcagcaaatacatttacttccaatctatgggctggtaatgttacttccggatggcttagtgttgataacgataatattgtgtactggaatacagcaaacgcagaagtagaaactaccaatgtgcaggtacaggtagatgccaacacctataggtggtatgaattcaaatggtggtgtatggaggtaagtggtttcaagaaaatatttctttccgttacccgtaaagcttaacacccatgccgctaagatgatattttgagtattctcaatatgcaaagaaatgcttcgtgacactcaggataatagtataatgctatcctgagttgggagcacagcgaaacagtcgaagaatttggcttcctctatcagcatgatgaaatatataatgattaaataatacaaacaaatgaaacactcgtgtggtctttttggaaaccctagtctttgaggcttcacagaattgataatttttttatgttcattatcattaaaaaaatcattaaaaaactattaaagatataccaatgaaaaaaattctactaacattatgtacagttttgcccatgctgtatgtatttgggcaatctccgggaggatttactgcaccagatttctgggtgaaatccaatgattcgggagctattgccacagcatggaaagataattcgagcagtgcaaataatatcccgaatgtaggaggagtagcattatcggcagcagacagaaaccacaacttctatccatataccacaggatatactgctgctaattcttttataataatgcttcggtactgaatcctactaatgtagagttaccaaatattagtacttctatttctcggcagtaagaccaacgtaatcctaaaagtacacagaatgaattttaaggaaatccatataggaattttaatcagcagagcagttgcggaaagagggatagaaagttcccgtatctgtaactttttaaaatgtacggaagaaaaaattgaagaaatgtataatgcgaaaagccttgactctgaaattttgctaaggtggagtaaacttctggagtatgattttttcagattatattctcaacatttgattttatatgcaccaccaaatacgacaaacgataatgtaaaggtgaagaaatcttctctcccgaaattcaaaaaaaacctttatacca

SEQ ID NO: 2166 - DNA, 24224 bp, synthetic construct
  misc_feature 1..24224: note = Synthetic
  source 1..24224: mol_type = other DNA
ggtattttcacgttcttccagaatattatatccttgtaaaagatcgggtatgctacctgttacgacatcgtaatcatacaggtaattgttattattgtcgaatggttcgaaataaggattggcaatacgggaataatagacagggttagtaagcccataggtatctgtcagaaaagtggtgtttttacgtctatttgcaaaaatagaaacacctactttcagtaatttattgatttgataagaagttttgctcgtcagattaaaacgacttaagcttactcccggaatattcccgttttcgagagtgtagccaagggagttataataagtcaccttttcgctacctccggaaatgctgatattatattcttgagtaatggcatctctgaatagtatatcattccaatcagtattaatactttttaaacggttgattgcgttttgagcttcaggagtaagcccttcccagcctttctcccgataaatatccattagattgtattgttttaatatagccgctactcctcctttttctgaatatacaggtatcggataaaatccccatttattgaaaggtgcttctttcatcatttgaagttccaagtttactttttcctcagaatttaggagattaaggcgggaggtctccaaattaggagtataggttaattttgtattaaaattgacaacaggctttcctgttttacctctttttgtagtaactacaattacaccattagcagcgcgagcaccataaatggcggttgctgctgcatctttcagtatggtaatgctttcgatatcgtttggacttaatccggcgattgatgattgaccgatgttgacaatatcattatcagaagatttattgtccattttgggaatatctgttccttccagaggaattccatccagtacccacaatgggtcttgtgttccgttcattgatgcagtaccacgaatacgaattttggcaggtgatcctggtgcaccggaagtgtttgttacggatacaccggctatttgacctgtcagcgcctggtcaatactttttgcagcacctaccatagcatccgaaacttcaactttagagatcgcagctgttaattttctacgttctagggtttgatatcctgttacaactacatctcccaatgtatgtgctgaagtttgaagtacgattcggtagctttttttgtcgccctgaagaactataacttgttcttcaaatccgatgtagctacaatgaatacgggttactttatccggaacggaaagagagaatttaccatcgatatctgtaatagtacctagcgatgtctgggatgctcctgcctttttcagttcatccgtatgaacgtagaccgaagcaccaatcaacggttcgttatcttcaccggagattactaccccggtgatagtgcgattagccgcactggccattgccagtgcgttaacaaggaagcatataataatgcaaagatgttttttattcattaattgtaaataaacgtaagtgattgaatcgaattatttaatacctaaagctgtattgatacgtaaaatcatatcttcgtaatgataacgtgttgctgtatcagacgttccgaggcggctctgcaataatttcttaatccgcagtaactctccgcgtttcacggatattgcatccgagatacgattcagttggctgccgtagaagttgagaactcggtgagctcccattttatcttcctgtcggagcgaacgttgttcggccgcatagcagctgcagaaaggagtggcatgatcgagcaagaaatgatcgtctgcaatctttttattgattttcacagcttcgggctctgcggcagctgtgagtaatgcatccagaaagtttttttgcaaagagcgttccatcacattgggaatacctcctcgttcggtaatgccgaaaatattcttgtggagtccgtccattagttccactacggtaaacgctttttttccattgactgattcattttcaatcatacgcatcagacgggtgttgccaagcaagtcccaaaggatgtaggcttgtgcattcttcagtatctgcgtcggggcgttttcttgttgtccaaccggggtgttacggagcaaataggtatattttcctacttccgtatcgaacaaccatttaggataagtcagtacttcatctgtcagaaacttcaaggaagcctgttgcttctctttctcaacgaatgtgtaggtctgtacaccatctcctatgactgtattttcgatatagatgccaccaatgttggccagtacgtgatacagatagttgttccattgattgataattgcgtaatagaggcgtgaggcttcttcgtaagtctgccctttttctccggtagtagtccattgaaggatttgcggaacgatgcgtttcaggttgtcaatgccaagtaaggaagaacgtacgggatcatcgcctaaatcttcattctgtgcacgtggatcaacggcatcacgtacatcctgtgcttcactatatttataaagacggtcggtatgcttactcaggaaatcaaataagatatctttttcttcttccgggctattctttccgtaccagcgatatccatattcgatggcaaagatatcgtaaggaccgatatgcggggaaagaaccttcacgccatctcccggttgggctatgtagttgaagcgggcatagtccataatagaagaagcggtggaatttaatcgggaagtgaacgttgcggaacgtaaggaatcagttgggaacgctgccgatcccatcatgttgtgacgcaatcccaaagagtgccctacctcgtggcaggcaacaaagcggatagcatcacccaatagtgaatccggcaactgcacgctgcgtgcttccgggcaaacagttccggtctgtactgtaatccattcgcttaccatagagagcacattgtgccaccacatgatgtctgcttccagaatctctccggaacgggggtctaacaaagaaggtcccatcgcattcttcttttccgaagctgcgtaggtcagtacggaatagtttacgtcatccatatctatttccatactatcggtaacttcaatggcgatgattgcattcttgaatccggctttttcaaaagcgatctgccagtcttcaatgcctctttttatatatttgcgccattgataaggtgtggaattgtcgatatagaatacgattggtttggcgggttctaccacctttcctttcaggtaagcttcccggtcttccggtttgggttccatacgccaacgggtgataaactgctttttatccgttctttgctgtgcatcgctgaaactcaatagcggattggtgaaataacctattttctgattatcaaaacgtcccatcatcggagtctcaggcagcagaaggatagaagaactgacttctaccgttacatatacgcttgttgttccttccgtcactttagtagtcagctcggaagtggcaactacattgttcggaaaggatttcacggataagatacgtgatagatttttaatagccgatgttcccagattgatattggtaaatacattattaatgctggtttccgtaccatcatagatgtcgttgatcttgatcaccaatgctgtagagtcctgattgacagcctctatcttgaatgcggcaataagcggtgatataaaattgtccttaaccgaacggaaaatagcatccgtctgaggagccagaggtaacgggcgttgttggcggaacatcagtttcccggttgctttgtcccattccatgcaaatcatttgattttcataatttacaccccggtttactccagcatcgttcaattcagccggtactcgttgtaacttgttgacaacaagtaaatcgcgccctagcaatgatgtgggaacctcaaaataataatcgttctttttttgataaacggcaaacatcccttttttaacactgctgccttccactaatttctcgtagtcgctttttactctctcttcttctgaattttttttctttttctttttgaaccaactcagattttctgtagcaggggtagttgcaagtgctgagtacgcttctccattcagcaatatacatgcaatgaccgctgccattacctttacatacattctcattaagtccttttacttttaattattattaaaaacagccgcaaaagtaataatattaataatataatgattacagtttagttgcgaatataataataaaaggaattattaactaggttcatctgctatcattcttcccggatatttcgtaatctagttggaataatgtacatttgcaggagtaaaaaagtgaagaagataatgaaaagatatattgctgctttattattggcctgttgcgtggaggggtatgcacaggaaaaaaagcaggctgcctttgtgccacctttcgactttccccttacattgagtggaaacttcggagaaattcgttccaatcactttcatggcggattagattttaagacgggaggaacaatcggcaaaccggttcgggcacttgctgacgggtatatctcacgtatacgtgtcaccaatggttcggggtatgtgcttgacgtctgttatcacaacggctattccactatcaaccgccatttgagcgcttttctgtctcccattgccgaaagggtaaagaaacttcaatatgaaaatgagaactgggaaatagaaatcatccccgaacccgatgaatatccggtgaaagccggacagcggattgcgttgagcgggaataccggatactcattcggaccacatcttcatttggatgtattcgagacggagacgggagactatatcgaccctatgcctttctttaaaaagaatctgaaagatacacgtgccccgaaagcggatggtatcatgctttttccgcagcttggcaaaggagtggtcagtggaagtcaggaaaataaaacgattctgccgaacagtgaacatccggtggaagcatggggggtaatcggcacaggtatcaaagcgtatgactacatggacggggtaaataatcattatggagtgtattccgtagtgcttacggtagatggtgccgaagtgttccgtagtaccgtagaccgcttttcgcaggaagaaaaccgaatgataaactcctggacgtatgggcagtacatgaaatcctttattgatcccggaaatacattacggttgttgaaagcctcgaatgataaccgtggcttggtaacgattgacgaagaacgggattatcagtttcaatatacactgaaagatgcttttggcaatacttcccgctatcactttacggtacgtggcaagaaacagccggttgaaccgttgaatcatcgggagaaatatttctttgcctgggataagacgaattatctgcaggaaccgggcttgagtctgattgttccgaaagggatgctatatgataatgtacctcttcaatatcaggtaaaagcggatagcggagcggttgcatttacctatcagttgaatgataagccggtcccgctacatgcaagctgtgaactgcgaatcggattgcggcgcaaaccggtggcggacactacgaaatattacgtggcgcgagtgacccctaaagggactaaatacagcgtaggagggaagtacgaagatggatttatgaaagcatctattcgtgaactgggcacatatacggttgctttggacactgttcctccggaaattatacctgttaacaagaacctgtgggcacgaaacggaaagattgtctatcggctgaaagatgaaggagcaggcatcgcttcttatcggggaacgattgacggtgaatatgcacttttcggtcgtcccaatattgtaaagtcttactgggaatgtgtgcttgacccgaaacatgtgaagaaaggcggcaagcataccgtagaaatgactgtcacggatgcttgtggaaatcagaccgtttcgaaggaaacttttgtttggtaaactattaaaatgtattatatatgaagaaaagaatcattctatctgctgtcctgtctttggcggctctggcgaattctttcgcttgtacgaatctgattgtcggcaaaaatgcctcgactgacggttcgactattgtttcctattcagccgattcgtatggtctgttcggtgagctttatcattatccggctgctacatatcccaaagggactatgttgaaagtctatgaatgggatacgggtaagtatctgggcgaaatcgaacaggcacgccagacttataatgtgactggcaatatgaatgaatttcaagtgactatcggtgaaaccaccttcggtggacgtccggaactggcagattctaccggaatcatcgactacggaagtctgatttatatcggattgcaacgttcacgttctgcccgcgaggcgatccgtatcatgactgacttggtacagcaatatggctattatagtggaggtgaatcgtttacgattgccgatccgaatgaaatctggattatggaaatgatcggtaagggaccgggggtacgtggtactgtctgggtggctgtacgtgtaccggatgattgtatctcggctcatgccaatcaatcccgtatccatcagtttgacatgaacgacaaagaaaactgtatcacttctccggatgtgatttccttcgctcgcgagaaaggttacttcaatggtgtgaacaaggatttcagctttgctgaggcttatgcgccacttgatttcggtgcccgtcgtttctgcgaagcccgtgtgtggagctatttcaataaatttactgatcatgggaatgactatcttccttatatagaaggaaagacagatactccgatgcctcttttcgtaaagccgaaccgtaaactttccgtacaggatgtgaaagatatgatgcgtgaccactacgaaggaacaccgcttgatatttccaatgatttcggtgccggtccttataaaaccccgtatcgcctttctccactgaatttcaaggtaggtgataaggagtattttaacgaacgtccgatttcgactcaacaaagtggcttcgtatttgttgcacaaatgcgtgccaacaagccggaccccataggcggcgttctttggtttggagtggatgatgcgaatatggccgtatttactcctgtttattgctgtacgacgaaagccccgttgtgctatacacgtgtagatggcgcagactacatcacgttctcctggaattccgctttctggattttcaactgggtgtctaatatggtctatccgcgttatgatctgatgatcggtgacgtgcgtgcaactcagaaagagatggaaacgacttttaataatgcgcaggaaggtattgaagaaatggcagccaaattgctggcaaaagataagaatgccgcaatcgctttcctgactaactataccaatatgaccgctcagagtacttttgatacttggaagcaactgggcactttcctgattgtgaagtacaacgacggagtagtgaagcgcgtgaaggacggacagtttgaaaggaattctatcggacagcctgccggtgtcattcgtccgggatatccgaaggagtttctggaggaatatgtgaagcagacaggagagagatatttggtgaaatagttgtcaattattcattaaataactaggatttataaacttattcttttacatttgtgtgctcaagacttggcatatattcaaggattgacagagaatagagaaataatcattaaccaataaacaataatcgaaatggaaaatcaggaacttatcaagcaggtcactgagaaagccgaaaaatggctgaccccggcttatgatgccgaaactcaggctgaagtgaaacgtatgttggagaacgaagataaaaccgaattgatcgaagcattctacaaagatcttgaatttggaacgggtggtttgcgtggtatcatgggagtaggtagcaaccgcatgaatatctatacggtaggtgctgctacacaggggctttccaactatctgaagaagaacttcaaagatctgcctcagatttctgtagtggttggtcacgactgtcgtaataacagccgtctgttcgctgaaacttcagccaacattttctcagctaatggcatcaaagtatatctgtttgatgatatgcgtccgactccggaaatgtctttcgcaatccgtcacctcggttgccagagcggtattatcctgactgcttctcacaatccgaaagaatacaacggttacaaagcatactgggatgatggtgcgcaagtactggctccgcacgatgctggtatcattgatgaagtgaataatatcgcttccgctgctgatatcaagttccaggggaacccggatctgattcagatcatcggtgaagatattgacaagatttaccttgatatggtgaagacagtttctattgatccggaagctatcgcccgtcataaggatatgaagatcgtttatactccgattcacggtacaggtatgatgctgattccgcgcgctttgaagatgtggggattcgaaaatgtatttactgttcccgaacagatgatcaaagacggtaacttcccgacagtaatatctccgaatccggaaaatgccgaggcgctttctatggctgtcaatctggctaaagaaattgatgccgaccttgtgatggcttccgatccggatgccgaccgtgtaggtatcgcctgtaaggacgacaagggtgaatgggtactgatcaacggtaaccagacttgtatgatgtatctttactatattctgactcagtacaaacaattgggtaagatcaagggtaatgaattctgtgtgaagactatcgttactaccgaacttatcaagaagattgctgataagaataacatcgaaatgctcgactgctacaccggatttaaatggatcgcacgtgaaatccgtctgcgtgaaggcaaaaagaaatatatcggtggtggtgaagagagttacggcttccttgccgaagacttcgtacgtgataaagatgccgtatcagcttgctgtctgattgcagaagtagctgcatgggcaaaagataacggtaagtcattgtaccagttgttgctggatatctacgtagaatatggattctccaaagaattcacagtgaacgtagtgaaaccgggcaagagcggtgctgaagaaatcaaagctatgatggaaaacttccgcgctaatcctccgaaagaactgggtggctctaaagtgattctgagcaaagactacaagacgctgaaacagacagatgcagaaggcaaggtgactgaccttgatatgccggaaacatctaatgtgctccagtacttcactgaagatggaagcaaagtttcagttcgcccgtcgggaacagaaccgaagatcaaattctatatggaagtacaagaagaaatgggttgtcgcaactgtttcgcttctgctgatgctgctgcaatggaaaagattgaagcagtgaagaagtcattaggtatttgattccgttcttcttctgatatttcagaatagagaaacaataaataacgcctccataatcttcgagactatggaggcgtttcttttatgtaaccgccttttcatcggtctttcatttcctttgcattctttaagttcccttgctaatccttcttatggaaatcttgttctatctaaatcatctcaatttaaacatgcaggctacggggatacacggttttgttgatgctttagagtgatacgtaacgtttcattttcataagttgttcgtttgtagtttgtgtgtacttcgtggcctgctttcttactaattccatagatgtatagaaaaatatttttcatgcgtgaatataaaaaagcccccgtagaaggacgagggcaacctaatgttttcacaacggaataatccttattgtgatttgcttcaattagtatgacaaagataataaaagaatttgatatataattctttttgtaggaaaaaagtgatatatttggtggaaaatgtaaaacacacaagtatgaagaagatattgggattagatttgggtacaaatagtaccggatgggctttggtaaatgaagcagagaatacggcagaaaaatcgtctattacgaagttaggagttcgtattattaagtatgataatttcgtgaatactgaaacagggtcagagagcaaagaacctgaaaaggatttctgtggaggtaaggggatatcccctaatgccggtcgtacaaaaggcagaagtgctcgtcgtaatttgcaacgatataaattacgtcgtgctaatctgatagaatacctgaagaaatgtggattgattacagattccgcagtattgtgtgagaacggcaatcgaacgacttttcagacttatcgtttacgtgcaatggctgtaacggaagaaatttcattagaagaattgtctcgcgtttttttgatgataaataagaaacgtggatataagagtagccgtaaagcaaaattgcctgatgaaggacagttgattgatgggatggcagtagcagaacagctatatgaaaatgatttaactcccggtcaatttgttttttccatattacagcaagggaaaaaaagtattccggagttttatcgttcagatttgcagaatgaattaaatcgaatttgggatcatcaaaaacaattttatcctgaaatattgactgatgagtttcgaaaacagatagaaggggaaggaagaccgaatacagctaaaatgtttttaggtaaatataagatatacacggcagatattaaagggaaagataaacgtttacaggcttatcaatggcgttcgaatgcgttgacgagccaattgtctatagatgaagtcgcttttgttgtcagtgaactaaatggagccattaataatgcgagcagttatttaggagcgattggtgatcgtagtaaagaactgcgctttaataagttaacagttggacagtacttgatgaagcaactagataaggatcctaattatagtttgaaaaatcaagtgttttatcgtcaggattatttggatgagtttgaagctatttgggaaaaacaagctcaatatcatccggaactgactcctgaattaaaaaaagacattcgtgatattattatattttatcaacgaccattgaagagtcaaaaggggttggttagtttctgtgaatttgaaagtcgccagatagaggttaatgtagatggtaaacagaagttaagaactattggatgtaaggtatgtcctaagtcttctcctttatttcaggagtttaaaatctggcacactcttcattctttgatagtgaaagagaaaaaaacgaatgcggagcgtttcctgtatcaggaagaaaaagagactttgtttgcggaattgaatataaaggagacgttatcaaaattggatgctctgaaacttttatataagaactataaggatttagacttgaattacgataaaatagaaggtaatcgtactcaagcggcattgtttaaagcctatcaaacaatcatttctatgacagggcatggagaatatgatttctctaagatgatgtcggatgaggtaatggaaatagtagaaggcgtttttagtggactgggttataatacgaatatattacattttgatgcggaaaatgaattatttgataagcaacccatgtatatgctatggcatcttttatattcttatgaaggagataagtcgagcacgggaaataaaagtctgatagataaaatatttaagttatgtggttttgaaaaagaatatgcaagcatcattgctaatataatttttcagcctgattatggaagcctgagtacaaaagctatacgtaaaattttacctagaatgaaagaaggtaatgaatatagtttggcttgtgaatatgctggttatcgtcactctcaacgttctttgactaaagatgaattagataataaggtatataaggatcatttggatcttcttccacggaacagtttgcgtaatccggttgtcgagaaaatcttgaaccagatgattaatgttgtcaactttgtggtagatgcttatggaaaaccggatgaaatacgtattgaactagctcgcgagctgaagaagagttccaaagaacgcaaggaaatgacaatggcgattaataaaacgactgctgaccatgaaaagtatcgtcagatacttcaaaaggaatttggattaacaaatgtgactcgtaatgatatcattcgttataaattgtatttagaattgaagagtaatgggtataaaactctttattctaatacttatatacctcaggaaaaactttttagtaaagagtttgatattgaacatattattcctaaggccaagttatttgatgactctttctcgaataagacacttgaaagtcggagagttaatattgaaaagagtaatctgacagcttatgactatgtattgggagtatatgatgagaaaggtatcaatgattatgaaattcggatagagaatttatataagagtggaattatcagtaaggctaagcgagataaattgatgatgaaagaggtggatatcccaagtggatttatagaacgagatttacgggattcacaatatatagcgaagaaagctcgggagatattggaagaactggtgaagtttgttgttcccactaccggaactatcacggatcgtttgcgtgaggattggcaactgatagacgtaatgcaagagcttaattgggaaaaatatgataaattgggacttactgagatagtcaaagataaggatggtcgcgaaattcgtcgtataaaggactggacaaaacgtaatgatcatcgtcatcatgcaatggatgcgctgactgttgtatttacaaaaagaagttatatacaatatctgaataatctgaatgccagaagtgataagtccggtagtatttatgcaatagaacaaaaagaactttatcgggataagcatggaaaattaagatttaatccaccgatgccgcttgatgtgtttagggcggaagctaaacgtcaattggaaaatacgctgatctctataaaagcaagaaataaggttctaacgcagaatgtgaatatcacaaaaacgaaaaaaacagagagtggttatcgtaagaaagttcagttgactcctcgtggccagttgcataatgaaacattttatggagcaataaagtggtatgtacctaagttggagagtgttggttcaggttttaatgtggagcagatagcactcgttgccaataagagatatcgggaagctttgcttacacgtcttgcagcttgtggaaatgatcctaagaaagcttttactggtaagaatagcctggagaaaaatcctctttatttggatgaactgcatactcagcaagtgccgacaaaggtgaagacggtgactttagagactgtttatactactcgtaaagatatatcttcggatttgaaaatcgaaaaagtaatagataggaaggttcgtagtatattgaaagaacgattaaaggagtttggaggagacccaaagaaagctttttctaatctggatgcaaatccaatctggttgaataaggaaaaaggaatttctattaaacgggtgacgataacagcagtaagcaaggctgaaccattgcatgcaaagagagatcattttggtaagtatatattggatgctaatggggcaaagcaacctgtagattatgtaaatacgggaaataatcatcatgtggctatatatcgggatgaaaaaggtgtgttgcaggaacgtgttgtctcgttttatgaagcaactgcttcagcttctgttggtttacctgttgtggataaggaatatagaaagtctgaaggatggacgtttttgttttcaatgaagcaaaatgaatattttgtttttccaaatgagaagaatggctttaatccaaatgagatagatttgatggatccggataattatgctttgatcagtccaaatttgtttagagtgcaaaaaattacatcgaaagattatgtctttaggcatcatttggaaacgacagtagaagataggaaagaattgcaaaatattacttggaagcgatttcaatcacttactaatttagataaattagtaaaagtacgagtaaatcatattgggcaaatagtatcggttggagaatattagatttaagagatgttctactttaaatatgattactatgattaagaaaacactttattttggaaatcccgcttatctgtcgttgcggaatgcgcaattggttattaaattaccgggggtagagaaagcggaatcgttaccagatatgatgaaagctcaggcagaggtaacaaaacctattgaagacttgggagtggttgttttggataacaaacaagttactatcacttccgggttacttgatgccttgctcgaaaataattgtgcggttatcacatgtgatagtaagagtatgcctattggattgatgcttcctttgtatggaaatacaacacaaaatgagcgttttcgacagcagttggatgcttcattgccactgaagaaacaactttggcagcaaactattcagatgaaaataaataatcaagcatctgttctgaaggattgtgtggatgaggaagtaaggtgtatgcgtgtgtgggcatcagatgtacgtagtggtgatcctgataatttggaggcacgtgctgctgcttattattggaagtcattgtttgcagatattgaaggatttactagagaacgtgaaggcatatatcctaataatttattgaattatggatatgctattcttcgcgcagtagtagcgcggggattagtgacaagtggattattgccaacattaggtattcatcatcataatcgctataatgcttattgtttggcggatgatataatggagccttatcgtccttatgtagatgaattagtctttaaattggttcagattaatggaaaagtgttagacttgacgaaggagataaaagcgaagttacttgaaatacctactttggaggttaaaataggagggaagcgaagtcctttgatggttgctgttggacaaacgacggcatcgctttataaatgtttcagtggggaagttcgtcgaatttcgtatcctgaacggtaatggatcgatttagtgaatatcgagtcatgtgggtgcttgttctttttgatttgccgactgaaacaaagaaagataagaaggcttatgcggatttcagaaagaatttgcaaaaggatggttttacgatgtttcagttttctatttacgtgcgtcattgcgctagtagtgagaatgcaatggtgcatataaaaagagttaaatcttttctccctgaatttgggcagattggaattatgtgtattacggataaacaatttggggacatagagcttttttatgggaagaaaatccaaaatgtgaattcaccaggacagcaattagaactgttttaaaataaaaatcccgcattgacgcgggattttttgatggaaacaactctcttttttcttttctgaacttctttgtaaattgttgattcacaatgtgtaagtgataattagttgtgtccaatggttcaaagatactaaattgaaagcaaatcacaactattgtatgtttttactgctagtccgaattgttgtgtccaatggttcaaagatactaaattgaaagcaaatcacaacaaagaagcagccacctctccgaatgaatatgttgtgtccaatggttcaaagatactaaattgaaagcaaatcacaacctaagtataatcccaagaccggaaagatcggttgtgtccaatggttcaaagatactaaattgaaagcaaatcacaacctacagtcaattgaggaaatcgaaaactacgttgtgtccaatggttcaaagatactaaattgaaagcaaatcacaacttttttacagcttatcagctacattggttagttgtgtccaatggttcaaagatactaaattgaaagcaaatcacaactatttttattgtattctcccttaatattagttgtgtccaatggttcaaagatactaaattgaaagcaaatcacaacggaaacaggaaagatatacattgatgtttcgttgtgtccaatggttcaaagatactaaattgaaagcaaatcacaactgtcgactgggagtcttctgtttctttttgttgtgtccaatggttcaaagatactaaattgaaagcaaatcacaacggtatgacacagtagataaattaagatcagttgtgtccaatggttcaaagatactaaattgaaagcaaatcacaacggcgggcataatataaacactatcctataagttgtgtccaatggttcaaagatactaaattgaaagcaaatcacaacccgatagccgagatcaccgcaaggatagcgttgtgtccaatggttcaaagatactaaattgaaagcaaatcacaactccgagaccgaagattctccaccaattctcgttgtgtccaatggttcaaagatactaaattgaaagcaaatcacaacttacatccatctctaccgtttcaaaatgcgttgtgtccaatggttcaaagatactaaattgaaagcaaatcacaactcatcggtcataaccaatgtgtccggatggttgtgtccaatggttcaaagatactaaattgaaagcaaatcacaactaaacaaacgcataacgttagaggtaacggttgtgtccaatggttcaaagatactaaattgaaagcaaatcacaactagtcagacgtttaacccgttgttcgttgagttgtgtccaatggttcaaagatactaaattgaaagcaaatcacaacgtgcttgaaaacgtcagaaatcctcattaggttgtgtccaatggttcaaagatactaaattgaaagcaaatcacaacctctaaatctatcttttcttgaaattcaggttgtgtccaatggttcaaagatactaaattgaaagcaaatcacaacctccaaaccggagatttccaaaccatagttgttgtgtccaatggttcaaagatactaaattgaaagcaaatcacaacttagcgggcggtctgtacaacactaatatgttgtgtccaatggttcaaagatactaaattgaaagcaaatcacaactaagaaagttttgtgaatacggtattcaatgttgtgtccaatggttcaaagatactaaattgaaagcaaatcacaacacaactggcttgggctgatctcggatgaaagttgtgtccaatggttcaaagatactaaattgaaagcaaatcacaacatgcaacgaagtctcctgcgttagaaacaggttgtgtccaatggttcaaagatactaaattgaaagcaaatcacaactctgatatcttcattattttgattttatagttgtgtccgatgattcaaaaatactaaaatgaaaacaaactatagtaacaaattttagttatatttctctgcctgttatttctgctgcctcaagtattgtagtttgttcatatgatgttaaattgctaatgatgtgagattatactttgtctattaccctttctttatctttatccaagtccatcgatgccaaatggtttccaatggtccttgtttatgcttcgacagccaccatttacagaactgtacctgtaataggaacagaatgattccgataatcagactgagcgtatatccgcaatagggagccagataaaatccgaatgggaagtagatgatagctcccataatagattgtgtgatgtagttagtcagactcatttttccgtaaaagcgcaggttggaaacggttttctggaacttagccttctgataaagtaagatgaaggaagcaatcagtacgatagtaaatgcgaatttctgccacatatcaaaagctgtccctacggtctgttgaatcaggctgctgtcactttgcatgatctgctctttcaaagagtaaagcggagcgaaactgatagctgcaatgatcagtgctttggtccagaatttcagatgagactcggaagtgacgaacagttctttgcgtccgatgtacagaccgaacaggaaaagtccggcagtctgtaagaagcgtccggcaccaatggcccagaataagctcgctttctgtcctaatgtgacgttgccaatgaggaattcccaaaaagttccgtttttggtgtaatctgccacttcgctatacatggctccgacattcagatcgggcagggtataggcaggattgaacagactcattatataatggaaccattcaataggctgtaatgaaaataagatagcagtgattaaaatagccttatcgctccatttgcgtacaataaataatatgataccgacaacaacaaacagaagcaaaacatctccagccggaaagaaagccgcgttaagagtggcaaaaccggcaagtaaaaccagtctccataaaaaacggtagccgaaatcttttcctttcaactgctgattatgcgattggatatagaaagtaaatccgaaaagcaaggcgaatatggcataagattttccggcaaacaatgagaatattgcattaaacactccggcatctaaaacgctaagccattcgggagaactctccggataaacagggaaaatgaaatgttccagattatgtaccaagaggatggccataactgcaaatcctctgagggcatctactacttcaattcgtggtgtcttttttaataattccatgggtttgatttatgattgttttttagttagtattcgttttacccatttattggcgggcttttcgaaataatagtaagaaagtaaactaagtataatggtgataccgaaaatgaggggaacactgatcatccatgacacctgccattgatagagcgctgccattttcgtatatgtgagtataataaacaaatgtatcaggtagaaactatagctgatttctccacctattatcagaaaccgattggataatagccgggatatacctcccttctggaaggcaaagatgagtatcatcagagaaacaggtaaccagtaatagcaagaataacggtatactttaggtatatctgcggcacaaagataaaaaagaagaaataaagcgacggatgctacttccaagaatgttcccgtggaagaagaaatctttttattgtgtaatgactgatagatctgataaagcaatactcctacaaaaaagttcggcaggcgggtgatgggattgacataccaatatgctttgatttgttcgtcggcagtcagatacatacctgccagcatgaccggaagacagattgagagtacaaccaatagttttcgcctgctgcttaagaaaggaatcacgaaaggaaagcagaaataaaataactgttcgcaccccaagctccatgaaggactgttgaaagagaaaaaataatcggcagaggggaagaagggctgtaacagaaaggtagaggcgacaaagtgtttgatccagtccgtcgtatcgctatattgaacatatcctcctatacatgcggcaattaatagtgtaagtagatgcaggggataaatgcgggcaatacgtgctacccagaacgtgcgtttagtagtcgtttttgtcagcagtttttcctgataattataggcaataataaacccgctgaggacaaaaaagaaactgactccgacaaatccttctttaaagaagtgtgcatcgaaacttgtatccagaacatagcaatgtgctccgaataccatcaaggcaaagaatattcgtaaagatgttaatgtgttgatcacgacgtttatctgtttcttttttgtattcggctgtaaaagtacagtttttctgtgatataaaaattcacatagattaaaaagaactcaggattcggagcgcaggcggcttaaatgttgtggagtcatcccaagaaaggaagctatatatcccagttgggcacggtgaattacatccggctgttcgcgtagaagttgttcgtagcgttctttggccggtaggtatagtcggtttatgtggtgtatgtccatgtagagcagacattcctgatggataatgcgtccccagttggcaatttcgatatttgtttcataaatctgatttaattcatcaatgcgtatggcatatagttcgcaatcttccagtaactctacatattcgtatcccggttggttgtggtataagtctttcatcgcaaaagtgatatcgccttcgcgtgagaaccagatcgtgatttcttcaccgtcacgcaggcaataggagcggcaaaatcctttctcaataaagtagacgtgacgatctgatactccgccgtgtatcagtaagtgtttctttggcaattccagctttttcatgtggctgaaaagcatttccagtgagctgtcagataccggataatatcggcggattcctttgatgatgttctccatgtctgtttatttgtgggagcattccagccaccagtcgatcattttccgtgccaggctcagttttcgtggaagttccggcaaattatctcttgtatagaaatcaccggagcttaattcttcttcttgcaatttgatttctcctccggcataatcggcaatgaatcctaccattaatccgctggggtagggccagggctggttgccgaaataagtgatgttcttcacgtccagtccggtttcctctttcacttcgcgggctacacattcttccagtgtttcgcctgtttcgaggaatccggctacaaggctgttgaatctgcctttaaagttgcgggcatgaacgagaagtatggagtcgcctttgcgcactaaaacaaggacggctgtcgagatagccggatacacttcacggccacaactcggacagcgtttcatgatggattctttttgttccatcggagtgccgcaagccgagcagaacagactgtttctgtcccaatgcagtatttcgtgggctttgcctgctgcctggtaatgtcccagcgggaggtattcgtaagaagcgcgaagccctatcattgcatattgttctgtctcttcaataggttgggatacggaataggctttgcagtttcttccttccagtgtggtgatattgtgtactgtagtcttgtctttgataaggataggaggaatttctccgcagggaatggcaaatgtaccgttcccctccttttcaagcagtagttcatctttgtaaaagacaaaccacagggattcagctgtttgattcattttatatttttctattttcttcgcgctgcgaagttataaaaactgtatcgatatatgtagggtttaccggataaaatatgaatagattaacttaaaaatatactttgttccactccaatctcttgaatgaaataattatcgtgtgagatggctatcacagtacctgcatagtttttgatggtagcagtaataatttcgatgctttgtatatccaggttattggtcggttcgtccagtataaacatatcgggcatattattactgatcatcaggcaacaaaaggcaagtctcattttctctccgccgcttagcttccggcaagatttatcccattcggaagccggaaataaatatcggtttagaataatctttatttcgtgctccggcaggttgcggccattgaaggcataggcttgttccaaaatactgtttcgatcattgatgatcgaatattcctgattcagatatacataggtgaaatttgcctgtatgagcgtgcctttcagtggttggagttgtccggttatgattttcagcagagttgtttttccgctgccattgcctccttctatacgaaggcggtctccgcttttcaactgaaagctgagaggggctcgccaaagttgtggctgatcgggatgataaccgaagttaatctcttttgccgtaaccagtattttaccggtatgaagtccgggactgttaaagtcagtctttagtgcggctgtcggcgagagtgagcttcggagttggttacgctcgtcagttaacttctcggttttttcctgatgtgcaccgcttagtttggcagtactcttttccgatttgctttgcaaaccgttcagtacaatacgcgggacaccttttttcaggtttcttttttcaccacgtacattttgtttatccctccgttcagctgtttcgcgggctaccttgcgggcagtgcggagcgctttctctttttcttcgatgcgttgttgcagggcttcttgcatcagtgttttttgttctttgtaaaattcatagtttccaccgtaatagctgatctgatgcttttccagttcacatatttcgggaagaagattcagcagtgtacggtcatggcttactaccaacagcgtggaacgccatttttccacccagtcatacagacgttgtctgcctgacgaatcgagatgattggtcggttcatccatcagtatgacagacggattatgaatgtccatacctgcgaggaatacacgtgtcttttctcctccgctgagcagattcatcgggtaggatagtgggaattggcccaatccccacgaatcgagggcgacgacggaacgttcttctatattccagtcgtcgttcaatatgctgaaattttcgattgaggcatctcctgcaaggatagcatgtagtgctttctgcttatggtctatctgtaaggcttgcgcgatggtcaacgaatcatattgcccgaaatgttggggaatataatagaggtcgtccggtcggacgatgacgccggaagagggtgttaattgtccggcaataatttgcagcagggtagatttgccacagccgttattgccgactaatcctaacttctgccctttactgatggcaaagttaaggtcactgaataatacttctttatccggatggatatagctgatttgttgaatactaataggcatgatggtctattgggtttgaggttgaaaactgggtgaggataatcacggggcaggggaacgacaaacacaatactggctaaacaacacgaatttcgtgatgcttaacgataaagaaaaagcatagatgaaaagtgatgtttactagaagtgttgtcttacttagaaattctcattgtggtaagtatatagtttaacttgggcgcaaagatagtactttcttttatatatcaccgctttttagctaaaaagatgtttttcagaggttctgttcgattgaatcagaggctctgtttagtccattcagaggttctgtttactcgattcagaggctctgttttgagtccgtttttaatgatagatatgagtatttggttcatttgagtgtttaatgctggtctttcttgcttttcttgcataaatcattttccccagtcgtacatctaagtattacccgcatgtacaactggggataactgttattgccataaaaataggctcagattagtgaaaagacataataaggttattaacgtattcctgcacgttttagttcttccctttacattatacgtcgaataattgattcaacccctcgctcatactcggatgtgtgaagatgaagtcacgcaggaacgtagaagtctgtcccgtcttcatagccattgcaaccatattgatcagttccggagcatcggtacagaacagggtacatcccataatcttaccgctatggctattgataatagctttcagcatcccatcagtctgttgcaaggtacgcgaacggacaacggaggttgccggcagtcgggagactttgaaagaatacccctttctcagtgcctcctcttccgtaattccgatatgtgccaatggcggatcgataaatacagcataaggcagaggatctctgtcgttgatgtcacgtttcttgtccccgaaaagctgatcccggataatacgaaaatcatccagtgagacataggtaaattgcgctcctccttttacatctcccattgcccatatatgaggggcattggtatgtaattggtcattgactacaattgccccgtgcgcatcgacttctacaccagctgcttgcaggttcagtccttcaatcattggtttgcggcctgtggcaataaggatcgcatcaccgtctacaaagtaaggagtgccgtccgaagtatccgaataagtcagagttaccccgtcgtgtgtatcatggatcgattg

SEQ ID NO: 2167 - DNA, 24224 bp, synthetic construct
  source 1..24224: mol_type = other DNA
  misc_feature 1..24224: note = Synthetic
gtaagaagagtacagggcggtcaacatacgtggtatgagatccgtaatgggctgttccctttccaatgataaaacagattttataataatcgcgtctgttgtaaggacttttaaaactacaatactttcggggaatgatattgaaatgggtttttccggtttcaagatcagcatcagatatttcgagaatatttctgcgggtacgtttgtagtagtcttttatggtttccagttgatcactcattgttccagaattataaaaatcaaagataggcaaatctttgggttttaagatttaccttcaatagtttttatgattggtattgattgaagatcctttaatttttactaacctgcatttctataatataagacggaagctgaaaaggtgttgtttttgcattttccttaataacaaaaccagattctttcagaaactcaagaagtggatcctctgtaaagatgttggtccatatgacatcagtgaatgaggcagctgctttacattttttccacagagattcacgggtctcaggcgtgtcatattccttaagaataacaaagctaagctctgtaaaccttttcccttccggtgaacccggatatccggagccactttttataatgccataacctgcaggtttttgatctgcatacgtgataactagctggttagacagattgtttagttcattaatcatttttctggggtcccagtcctcaacatattgtttgatctttttctctgaaatatgatctttataagtagaatgtaaagaagatttgatgacggtaaaaagatcatcaactccttcgtctgaacctatggtgaattttgaaatgatttccattcttttttcttcaaaattatgagtttaatctattcagaaagggtacagatgatgaaaatataaccgatacagattgtaattttgtaaatttgttcggtacagattgatataaatcgatgaaaacctacaaatacgaagcttttacagcaattattgaagaacagatccgtaacggaattttacagattggtgacaaactgccgtctatccgggaaataaagaaaagatatcatctaagtactagctcagtacaaagtggttttgaatatttaataattaaaggtctagctcaaagcagcccacgctccgggtattttgtagcaaagaaaagagacgaatatattccagaggctagaacgaagttttctccagtggtgcgggatgaaaaatttatgaagaatatactgctgacttccaaaagaatttcagaatcgagttcctttaatacagcggtgcctgatgatcttttaattccgcagaaactgatcttaagaactatgcaggaagtgatccgggaaaaaggagcttctctgttgaggtattatccttccaacgggcttgaagcactgagaaaacagatcgcaaagcaaatgggaatatatggctgcaggtttaatcctgatgaacttattattacggatggcgctctacaggcattaaccattgcattaagttctgtaaccaagcctggtgacgttgtagcagtggacagcccctgtgtattttctatactggaagttattgccaatctggatctgaaggttattgagatccctgtacattatagaaatggttttgatactgaatattttcgaaaggtttgtgctgaaaacaatatccaggcccttattgttaccccaaatttccataatccaaccggaatcatgatgagtgatgaaaccaaaaagaatgtattggaaattgcagaagactatcagatctgcattatcgaaaatgagatgtattctgacctttattttgaagaaaaaagaccatccagcattaaaagttttgatgaaaaaggatgggtaatgacctattcctctttttcgaaaacgctggctcccgggattcgtttagggtggctttatgctgggaaattttatgcaaaggcagaaagaacaagatttgctctgggcagatctgtatctccactttatcaggaattgattttgaaacttttacaggagaacagctacgaaagacatttgcgatcatttcgtaaaaagttaaatcaacaggccaaccagctgttggaagtcttaaggagaagttttccacaggattcatattttcataggccacagggaggatatagcatttgggcacagatgccggaaaatatggatatgaaaagattttatcagtattgtgaagaacataaagttttattcactccgggaaacacattttcttttacagataaatacgatcaccattttcgggtggtctttgcggagagaattactcctgaaagtctttatctattagaagagacaggaaggaaagcccatgagtttattctaaaagaagaatagttcataggttgataaaataaagaattccaatatctatctatcttttattatagctggagggctttgtattttctatttccggaaggttgctaatgaggtaatttatccccaatttattcaatcagatatttactattttccatttccaattgcggaattccatcagtaatttggaaagaaaaaccgtctgtccatttctctttaggaagatcaatatcttcaccattgagaatatgtttttggaatgaataggagatgtcctgatccagatacttctgaacaaactcaagaaaaaactcatccggcatttttgtaaaagagaacggaaccatgaaaagactcttgcctaaaacatgaaaaaaggtgttgttaattcttggtcggttgaagattttataattaggatcagtgaaatcttgtttgatatggtaaaacaaagaaaattgagttccttttttctgatgaagccttacttggttattttcaggcttgatttcgaacttaatatcagggttttcttcctataaaagaataagatttttaaaaaggtcattctcaccccaattttcattgacataataaaaagataaagtatccgatgcctttttcaatgtataatctatctgtacttttaagccattctttgcaaggttttcatcataatatactttatagctgattttattttgagaatgagccatgaatggtaatataagtaccaaaaaaatatttttttgaacatgggttaagtcgtttttcaaaatttagtataaaaatctaagaattaatggcggcttatggctcgttttgaaatagaaattttaaaactttcagaacttgttgccaatacaatagaaattaggaaggaaaatgtatgtggaagaactaggtgaaatttgatccatgaaggatttcaggaggatttttaggaaaatcacaggctgaaaatcgataaaaatcggttcaagggtagaaatatgttaaaatttcagtcattttgcccaaacttttttctctgctactaggctggaatcaccataaaacctatatttgcagcctaaatttttaaatataatgaaagaactaattgaaaaaatcaacgcagaatttgaagcgtttacaactgaggcaaaccaacaagcggaaaaaggaaacaaagcagctggtacaagagctcgtaaatcagctttagaattaagcaaattgttcaaggatttcagaaaagtttctgtagaagaatctaagaagtaattcaacctttagccggcttttgtagccggtttttttatgcccgtatcgcatccggttactcatgatgcacacaatttctcaaaaaataaaaggcttcgattaaaaaatgaaaagcctgaaataaacccatctctatcgattttattttttatttcaaatattaaattttcccttccagggtgtttgtcatccttatagtttgtattttaggaatatcaattactcgaaatatgatgaaacatttctattggctgtttattctgttttttaatttcttttcagcgcaaaaactgcaggtagtagattctgaaaatggaaaaccaattcctagcgcaagaattctcctataccaccagattgtgtatactaatgaagaagggtttgcgcccgtagatcaaagttcggtcaactttgaaatttcagcgtcgggatttcaaaagacaacaatccgggaattttattctccggtaaagctgaaaagaggatataaaaaaattgatgaagtaaaactgaaaaaagtagatttgaaagaaatctttgaagatgttgccgagaattacaaaaaaagatattatagtgaaccttccctttatgatgttacttataaagaaaaaaggagtgataataaccaaatccattttctagttattgccgaaacaaagttatggagcaagactaatttttatagccctaacaaatcttttgatagcaacctccaaatgcagctgaataatgtgaaatattttaaagatctaaagtcagatagcatttttgtaaaaggaataaagaaattctctgaggaatatatgggaaattatttctttaattttgagttgaagagaacgttgtctcatataaaaaataaggcatcaaaatattcaggatggatatttttcgagcagggcaatgagcagctaatcacatttagtattaagtcaggattaggaattgagatgaagggagaattgaaatataataaggctgataaggtcattacttactttgaaattcattatttgcaggatcagcacccaatcgttaaaagaagaaccggaggtggtgaagagtttgattatcagttaggaaatgcaattcttgcttttgatttttacaaaaacggaggagtatacgttcctgctatgagcaggattgaagccaataaatatgttgcttactataaaggagttaaacatgagaggaaaatcagcagagagcttatttataacacatttaagaaatcagatgaaaaagagttaactcctagagtaacttttgataaggatatctgggataatatctccgtaaaggaaaataaaaataatacaattttacttaccacagaagagcagacttttatcaacaaaaagttaccggatttttgatcaaaaaaagatgaagaatatcatattggtaaattaatagattatggtaatcattttattttttttcaaaaatggatgtaaatgctgatgtctaaagacttttttactttaattcctttatcatctccgcaatttcttttatctttaatgcaatcaatatacattatgaggataaatagattttttgcagtatcggctgtaatgttggctgcccaattttcatgggctcaggtaaaggtagacccgaaagagaaccttaacccaatcgtaaaaagttttgtagatgaagtaaacaacaattcccagcttgaagggatggcttatgaacttctggacggaataggaccacgtcttgtgggaactccggaaatgcttgctgctaatgagtggagtgctgaaaagcttcgttcatggggaattgatgccaaccttcaacagttcggaacctggaaaggatggcagagaggaactacccacgtagatatggtattcccaagagtaaaatctttgtcagccactcaactggcctggagcccttctaccaaaaaggctgttgaagctgaggtggttgttctgccaaaagtatcatctaaagcagaatttgacaaatggcttccttctgtaaaaggaaaaattgtactgatggctcaataccagaagatagggcgttctgatgaacagatcaaggagtttgcaaccccggaactgtatgaaaaacttaaagcagaaaaagatcacgcagccaaagactttacagcgtatgtaaagaatattggatatgataataatacccttcctgaagcgcttgaaaatgcaggagcagctggaattgccatttcaaattggactggaattatgggagcaaacagaatcttcggagcaaaaacatctaaaattccaatgatagacattgatgtggaagattacggtatgctttacagaatggcagagaaaggcgctcagcctaaaattaagattgatgctcagtctaaggtacttcctgaagcaaaaagctttaatacgatcggtatgattaaggggaaagaaaaaccggatgagtatgtcattctttccgctcacctggactcatgggatggtgctcagggagctacagacaacggaacaggaacgcttacaatgcttgaaaccatgagaattcttaaaaaatactatcccaataataaaagaacaattgtgattgggctttggggaagtgaagagcagggattgaatggttcaagaggttttgtagcagataaccctcagattattaaaggaacgcaagctgcattcaatcaggataacggaaccggacgtgttgtcaatatcagtggtcagggttttgtaaaagcatatgactatattggaaaatggctggatggggttccgaaagcggtaagaagccatatcaagacagatttccctggaatgccaggcggtggcggatcagaccatgcttcatttgtagcagcaggagttcctggattttcattaggttcattgaactggggctatttcggttatacttggcataccacaaaagatacgtatgataaaatcgtttttgatgaggtgaagaacaatgtgatcttaacagcagcattagcgtatatggcttctgaagatcctgaatttacgaacagagaaaaaagggtaatgcctaaagacgataaaggaaatccggtacaatggccggaagtaagagaacctaaaagaagttctaaagattataaatgataaaatttctaccgcgattagaatttttattgtgaaagatgaaaataagtccggcttacagctttgtaagccggattttatttaaatatgcttttttaaatcagagaatactgaaatctgggcttcatgctgatgagccagttttccaaagccgtattcacagaaaataaacggtaaactgttggaagcggcagaatcataatctgtctgtgtgtccccaacgtatacagaattgtcgatagatagaccatttctttccataaggagctgtatattttctactttaggtttttgagttcgcccatgagattcaaaatctgcaaagagagtctccaattgataatgtgctaaaaaagattcaatatatccctcctgacaattgcttacaatgaaaagattgtgggtgttggaaaggtttttcaacgtttcttcaacaccagggtaaagaataccgccttgtattcccaatacctcattttcccgggctacaacctctgaaagaagttcctgaatctgttggttcgaaataccgggaagcatatcctttagaatatcatgggctagtaaacccatatattgattcatatcatcaggcttcagttcctgttgtatcaattgacgcttatttaaaacatcattccatattttgatgatggttgctctggaatcccataaggttccatccagatcgaaaattaaattcttatatttcaaagtgtttcttgtttaattgatgaataatgattttttaaaattttatcaagcaattatttaaccattaaggtaagtttagatgttaagttctattaagaaagaaaacaagggtttttattagcaaaataccttaaagcgaagctcggcttaatactttcaaaacctcttaatggaaaaaaatatccttataaaatcatgctcaattgcactctttttcttgcctcatccacttccgttacctttactctcacatgctgatgcagtttcaccacttcattcacatccgatacaaatccatccttcagctgggaaatgtgaaccagtccgctttctttaattccaagatcaacaaaacaaccgaaagctgttatattgttaacgattcccggaagaatcatgcctgtttttaaatctttaatactttttacactaggatcgaattcaaataccttagctgcttttcttggatccagccctggtttttcaagctcctttacaatatctttgattccaagaattccgatgtctccggtaatataattttcaggctttatcagcgcaatcttttctttgttggctatcagttcattggttttaatacccagatctttagccattttttctacaatcccatatgcttcaggatgaacagcagagttatccagcggattttttgaattggcaattcttacaaatgctgctgcctgctgaaaagctttttctccaagtcttggaacctttttaagttgttttctgtcttcaaaagctccgttttcggctcggtaattcacaatattttcagccattttctctccaattccggaaacgtagcttagtaatgatttactagctgtatttaaattgattcctacagagtttacacacttcatcaccgtagaatccagttcattttttaattgagtctggtccacatcatgctgatattgtccaacaccaatagatttaggatcaatttttaccagttcagccaacggatcagaaagtctccttccaatagaaactgcaccgcgaactgttacatcgtaggttgggaattcatctcttgcaattttgctggcagaatacacagaggccccggcttcggaaaccacaaaaacctgtaaaggcttatcaaaagcaattttcttgatgaaaaattcagtttcacggcttgccgttccgtttccgatggaaatcgcttcaatatggtaagcgttcaccatagaacggatctttttcatcgccataccggattcattctgtggagcgtgagggtagagggtttcattatgaagaagatctcccttttcatccagacaaactactttacagccacttctgtaacccggatcgatagccagaattcttttctctcccaatggcggagctaaaaggagttgacttaaattctcagagaaaatttcaatcgcttttttatctgctttttctttagcttcctgaagggcttcgttagaaatagcaggttccaaaagtcttttatagctgtctttgatcgctaaagcaatctgttcagaactttcattattagatttaatgatggctttttcaataaaatcgatggcctcttccttatcaattcccacattggttttcacaaaaccttctgcttctgctctcagcatagccaaaagtctgtgagaaggggttctgctgaggttttcttcccattcgaaatattgcgagaacttctgagcatcttcttcctcttttttagccttcaccactttagaagtaacaacagccttacgttggaacaaacgacgcagattcttgcggacatacatattttcattgatccattctgccatgatatctctggctccctgcagtgcatcttcctcagaaggaacctcattattcagatattttgaagctaaaaactgaacatcatcgttcctttggctcataatgatcttggctaaaggctccagtcctttttccttagcagcatctgctttggtctttttacgtttcttaaaaggcaggtataaatcctccagctcctgaagatcaaagctttcttcaattctttgtttcagttcagaagtcaaagccccctgttcttctatggactttaaaatagattcctttctctttacaatctcttcaaactgcttactgatcttggcaatttgttcaatttggatttcatccagatttccggttttatctttcctgtaacgggaaataaaaggaatggtgcagtcttctgctaataattgtaaagtattgttgatgctcttttcagaaatatcgagctgcttctgtataaattctacggtcgtcattgttctgttttcggaaagctaaaatagggttttaaaacgaaaaaaggcgagttgccccgccttgaatgttttcacaacggaataatccttattgtgaattgctttcaaaattattgatacaaatataagagaaaaattctttggatggtttacggaaaaccataatttcgataaattttttcttcctatttttatttactttaaaaaaactgatacttatgattagaaatatacttggactggatttaggggtttcatcaattggctgggcttatgttcaggaagattctaaaaattctgaaaacaatagaattatcaaattaggtgttcgtgtaaatccattaactgttgatgaacagttgaattttgaaaagggaaaaccaattaccaccaatgcgggaagaactttagccagaagtgcaagaagaaaccttcaaaggtttaagttaagaagatccaatcttatggatgttttaaagaaaaataatattctcaaagaaacagacctgcttgcggaagttggaaaaaactcaacctttcaaactcaggaattaagggcaaagtcagcaaaagaaaaaatagaactttcagagtttgccagagttttacttttaatcaataaaaaaagagggtataaaagcagccgtaaagctaaaaatgatgaggatggacagattgtagacggaatggctgttgccaaaaaattgtttgaagagaatttaacacccggagaatattcatatcaacttttacaacagggcaaaaaacaactgcctgatttttaccgttcagatttacaggcagaatttgataagatttgggattttcagaaacaatttaatcctgaaattttcaccaatgaactttatgaaaaacttcaaggtaagaatagaaatgcaacctggaaagaattagaatttccattttctcttgtaggcatcaagcaaaccggaacgatgcaggagaagaaagttgaaaaatacttttggagaagcgaagcggtgaaaaaacaattggattttgaaagtctggctgttgtatttcaggagatcaatagcaacctgaataattcgagcggttatttgggagcaatcagtgatcgaagtaaggagctttatttttataatcaaacggttggagaatatttatttcagcagttgaaaacgaatccgcatacaaagcttaaaaatcaggttttctacagacaggattatttagatgaatttgagaaaatatgggaaactcaatcgaaatatcataaagaattaacgaaggaattaaaggaagaaattcgggatattactattttctatcaaaggaagctaaaatcacagaaaggtttaatcagtatctgtgagtttgaaaacagagaaattgagattacagaaaatggaaaaacaaaaaagaagaccgtcgggctaaaagtggctccgaaatcttcgcccttgtttcaggaatttaagatctggcaggttctgaataatttacagtttcaaaatatagaaacaaaagaagtcttcccaatagatttagattttaaacaatccatttttgatgaggtaaatattaaaggaaagctttctgcgaaagatgttttagatcttgttggatattcaggaaaagaatggaaaactaatttcaaagagattgaaggaaattataccaatgaaaatttatatactgcttttctaaagattattgccagtaaagaaatagaattcccgaaagaatttaaaataaccattgatgacgaaattaaagtttctaaaataaatgcttctgcggaaattataaaattatttgttagagaaaagttttcagaattgggaattgatacttctattctggattttaatccggagttggaagggagtgattttgaaaaacaagcttcttatcaactatggcatttactatattcttatgaaggtgatgattcttcttcaggaaatgaaaaattgtatgaattgttggagaataaatttggattcaaaaaggagaattccaagatattagctgaaattggtttttctcaggattatggaagcttgagttctaaggcgatgcgaaagatttatccttacattaaagagcataaatacagcgtagcttgtagttatgcaggttacaatcattctaaaaattcattgaccaaagagcaattagagaaccgaattttgaaagaacgtttggatattcttccaaaaaattctttacgaaatcctgtagttgaaaagattttgaatcaaatgatcaatcttgtaaactgcttaattgatgagtatagtgagaaagataaagatggacagattgttaaatatttcaaatttgatgaaatcagaatagagcttgcaagagaactcaaacttaatgcggaagaacgtgctacaatgacttctgaaattaacaaagccaccatacagcatcagaaatatgcagaggttttacaacgggagtttggccttaaagctccatccaggaatgatatcattcgctataaattatacttagaattggcaaataacggctttaaagatttatacacagatgcgaaaattgaaagagaaaatttatttaccgataaatacgacatcgaccacatcataccccaatcccgattttttgatgacagtttttccaataaagttctagttccaagaaatgctaatctaaaaaaaggaaattttacggctttcgattatcttgagattgaaggaaaggaaaaattagagaaattcctcaatatcataaaggacctgtatgacaaaggagcaattacaaaagcaaaatatgaaaaacttcagaaaaaagactttgagataggagacggttttattgaaagagatttgcgaaacacacaatatattgcgaaaaaatcgaaagaaatcctttttggaatcactaattctgtagttacaacttcaggaagaataacggataagcttcgtgaggattggaatcttataaacacaatgaaggagcttaatttagaaaaatacagaaaattaggtcttacagaaacggttatcaattcaaaaggagaggagaagcagagaattatagactggacaaaaagaaacgaccaccgtcaccatgcaatggatgctttaacagttgcttttaccacccataatcatattcagtatttgaactacttaaacgctagaaaagatgaaaagcataaagaacatcaaaatatttttgctattgaaaatttaattactgagatcattgataagaaaaacggttcaaaggaaagacgatttaaagagcctgttaaaaatcttagagcagaggccagaaaacatttggacgaaatattaatttctcataaggttaaaaataaagtagttaccaaaaatatcaataaaattaagaaaaagggaagtgtaattgcaaaaacagaacttactccgaggggacaactgcataaagaaacgatttatggaagttcaaaatttcttaaaacaaaagaagaaaagatatcaggaaaattcgatgtagaaactattcagaaagttcagaatgaaagatacagaaatgctctattgaaaaggttacaggagtttggcggagattccaaaaaagcatttacagggaaaaatgtcatttctaaaaatccaatatttcttaataatgaaaaaacggaacaattacctgaaacagtaactttagcttggtatgaaatgggttataccatcagaaaagctgttaatccagataattttaaagatttcaagaatattgaaaagactattgataaaggaattcgtgacattctaactaaaaggttgaaagaatttaacggaaattctaaagaagccttttctgatttggacaagaatccgatctggctcaataaatctaaaggtatttcaataaaagccgttaccattacaggaattaataatgctgaagctctacattataagaaagaccatttggggaaagattttttagatgaaaacggtaaaagaatagccgttgattttgtgagtacaggaaataatcatcacgttgcaatttatgaagatgaaaatggcaatctacaggagaaagtggtgagcttttatgaagccgtagaaagagtaaatcaaaatttacctataattgataaggaatataattctgaatcaggctggaagtttttatttacgatgaaacagaatgaaatgtttttatttccatcagaagatttcaatccaaaagaaatggatttatttgatgaaaagaatgtaaacttaatttctaagaatttgtttagagtgcagaaatttacaattaaagactatttttttaggcatcatttagaaacaaatgttgaagatagctctccattaaaaggaattacctggaaaagagaaggcttaaatgggattgaaaacattttgaaagtgagattgaatcatcttgggaaaatagttcaaatcggagaatattaaatattttggattatgatcactcgttccatctacatcggcaatccggcttatcttaaactcaaagatgagcaaatgtatattttagaaccttccactaaagaaatgaaaggcaaagttccggtggaagatttgggattgctgatgttggaccatttccagattactatttctcatcaattaattcagaaaatgatgggaaataatgtggttgtggtgagttgcgacggtcatcatttacctcacggaattatgcttccgttgtatgggcatactgaacattccgaccggattaaagatcaattagaagccagcgaacccctcaaaaagcaactttggaaacaaaccgtcgaatgtaaaattgaaaaccaaaaagaagttttaaagcggttagggaattattatgagccgatgattgattatcagaataatgtgaaaagtggtgatgtcaccaatatggaaggcattgcagcacagcattactggaagtatctcattagtttggattttctgagacagcgttttggagattcgcccaatcagtttttcaattttgggtattcggttctcagaagcattgtcgcaagagcaattgttgagaccggattacttcccgttctcggaatttttcataagaataaatacaacccttactgtctggctgatgacctgatggaaccttatcgcccttttgtcgatttattagtaatgcaatggcttggaatcaattcagagactgaagaactaacgaaagaatttaaagctttcattttacagattgtgaccaaagatgtaaaaatagacgataagaccagacccttattggttgcagtaaaaacaactgccacctcattgtataaatgttatacaggagaaaaacgtctgatctcttatcctgaactgatatgaatgccgaaaggtttaatgcttaccggattatgtgggttttagtattatatgatttaccgacagagacgaaagccaatatgaaagatgccaatcgctttcgtaaatctttgcttgatgatggttttacattatttcagttttcaatgtatgtaaggcattgcccaagccgggaaaatgctgaggttcatattaaaagagtgaagttgatgcttccaaaagcagggaaagttgctattatgtgcatcaccgacaagcagtttggagatattgaaatattctttgccagaaataaagaagagccgcctccaacctttcaacagcttgaattattctaatttttaaatcctaaaaacaaaaacaatctactgaaaatcagtagattgttttttgaggctgtgactaatcacgaagataataatttttgaaagcaattcacaacgttatcaccgacggtagtatctattacatggctgtgactaatcacgaagataataatttttgaaagcaattcacaactgtcccgcctaggaggtaagcacaggcttagctgtgactaatcacgaagataataatttttgaaagcaattcacaactcttttggggttgtacattcccccataggagctgtgactaatcacgaagataataatttttgaaagcaattcacaactcttttggggttgtacattcccccataggagctgtgactaatcacgaagataataatttttgaaagcaattcacaactaacggaatgttgacaattatcaaaaacacgctgtgactaatcacgaagataataatttttgaaagcaattcacaacaaatgggtatacatcatataatccaattgggctgtgactaatcacgaagataataatttttgaaagcaattcacaactgcaaaattctaataatgcaaactgttaaagctgtgactaatcacgaagataataatttttgaaagcaattcacaaccagccacaataagcacattttccattgtacgctgtgactaatcacgaagataataatttttgaaagcaattcacaacaaatttggaagtgtatctttatcattgaatgctgtgactaatcacgaagataataatttttgaaagcaattcacaacgcttgctcatactttaacttgctaacttcagctgtgactaatcacgaagataataatttttgaaagcaattcacaacctttgaaacggatataacgatcagtgttgagctgtgactaatcacgaagataataatttttgaaagcaattcacaacgcatatggaagcaaataaaatttatcctctgctgtgactaatcacgaagataataatttttgaaagcaattcacaactaattgttatactctccaatctcctaactcgctgtgactaatcacgaagataataatttttgaaagcaattcacaacacttcaaagctatgcatttcctttgtttttgctgtgactaatcacgaagataataatttttgaaagcaattcacaacaaaaaaatcgtgatctgatatttttaaaggctgtgactaatcacgaagataataatttttgaaagcaattcacaacacgatgccgataaaaaatttcaattcaaccgctgtgactaatcacgaagataataatttttgaaagcaattcacaactatatctaattttatcatattcttcaaaaagctgtgactaatcacgaagataataatttttgaaagcaattcacaacacttgtcaccattatatcaatgcagttattgctgtgactaatcacgaagataataatttttgaaagcaattcacaacgcaatttaatcgtagccctatttgttaattgctgtgactaatcacgaagataataatttttgaaagcaattcacaacaggctcgttttcaacttccggtccatattcgctgtgactaatcacgaagataataatttttgaaagcaattcacaacaggatctgattgacacttaagcatccagaagctgtgactaatcacgaagataataatttttgaaagcaattcacaacacttttgcagcggttttctttcctggtatcgctgtgactaatcacgaagataataatttttgaaagcaattcacaacccaaagtcaatattttttccattcttagtggctgtgactaatcacgaagataataatttttgaaagcaattcacaactaatgggatgatgggctatgctcaggttgtgctgtgactaatcacgaagataataatttttgaaagcaattcacaacagtttcggtgtaaccaatattttgaaagttgctgtgactaatcacgaagataataatttttgaaagcaattcacaacaaaggttttctgcataattttctcctgattgctgtgactaatcacgaagataataatttttgaaagcaattcacaacaataatctttgtgagtctttaatttctcctgctgtgactaatcacgaagataataatttttgaaagcaattcacaacttgcaagaacgcagggatgtgatgctttttgctgtgactaatcacgaagataataatttttgaaagcaattcacaacctgtaacaaatggaggtaatatgtaatgtcgctgtgactaatcacgaagataataatttttgaaagcaattcacaactattagttaaatcagtaaattttataacaggctgtgactaatcacgaagataataatttttgaaagcaattcacaacagcacgaatttattgaaagatgtcaacaaggctgtgactaatcacgaagataataatttttgaaagcaattcacaactaaataaatttgctccagcatctccctcatgctgtgactaatcacgaagataataatttttgaaagcaattcacaaccgaaagtccctgatataatatcctgagtaagctgtgactaatcacgaagataataatttttgaaagcaattcacaactggcggaccactttcttgtcgaccttgccagctgtgactaatcacgaagataataatttttgaaagcaattcacaacttattaatgaaaaacaatttcaattgtcttgctgtgactaatcacgaagataataatttttgaaagcaattcacaacgagaaatataaagtttgggtaagtaatttggctgtgactaatcacgaagataataatttttgaaagcaattcacaaccttgtctttaaaaatgaaactaaaaaattctgctgtgactaatcacgaagataataatttttgaaagcaattcacaacacaaagtattgatgaattttatctcccaaagctgtgactcatcacgaagataataattaaaaatacctcccaacaaaaatataaagcaagaaaaaatccctctcattaagggacccgttttttatgtataaggaacacattcacaagagcaatattctcctaatgacggatcacatatgccaatatcataacagatatacttatatccgggtttgcaataaccagcacctcctttcacttgttttaactgatctctcgaaattttctttaaatttttcatagtatagttttaaattgttaagtaataaatatataaattattctctatttttggatttaaaataaaaaattacataaatttcgtgaaagatagatgtaaatttatgatagaagcgatgttgggtaaaatataataaggaaataaattgtttcagttcccgtttatttatacgatggtataatccctaacgttggtaggaaaaattacatttcttgatgtatggtaagggaagacccataaggtttttctatttttgtatccgaaaacaataaactttttaaacagttcaataatatgaaaaaaattagcgtaattgcattagtagcagtaggattgatggcagcatcatgtaccaataaagaaaaaacagacacatcagtagctactgagcaggcagttgctgaaagtaaaggtgaagtattggcagtagatgctacaacttctgtagtaaactggaaagctttccacaaaggaggttttgctccacgttggggaactcttaatgtaaagtcaggagatttaagtattgaaggtggacaagtggtagctggaaacttcaatatcgatatgacttctattaaagttgatcctgcatcagtaactgaaaaagataaaaaaccagcagatcttgaagctcaccttaaaaaccctgacttctttgatgtagagaaaaacccgacttcagatttcaaaattacaagtgtagcagacctaaaagaagcaccaaaagatgctgtagcaggagcaaacaaaacagtaagcggaaaccttacattaatggggaaaaccatgaatgtgactttccctgctaaagtagatgtagcagataacactgcggctattcaggctaaattcacagtaaacagaacagactggggaatcaaattcggaacttctgaagcagatcctgcagaatggatgattagcaaagacatcgaaattgctattgatgtaaaagcaaaaaaataaggtaataaactttctataaatcaagagctgtcttcatcaaggcagctctttgtttattcaatggatgattgttaagattacctaccttctggtcttattcttattattgcttattgcaatcaattaaaaatccatgaattctgaatgcgtacacaatattcacttcccaaatacagagggttaccatgtttttcagaccagaatccgtctaatatatcttggctcagacaacggtatacggcaacacctttataaattttgtggtcatcaccttcatagttaaagttaagcactaagatacggtctttataaaatcctgtaccgttctgtatatgatcgccaatgatccactgggcaataatgcgggcattttcatcaactgataaaactaatgtaccttgataagaagcctggtcagattcttcctgattacttccctttatagaataggttcctgccaaatcatgtactgtcatcgattcatttattatggatggcaaatttaaaaaatcttattctgataaatattataaatatcttgtaaagcgtaagacattcattatggatctttctcatctataaattaaactttatttttgcagcaaattaattttaaaatgattccttttctactcattgccaaccttattaccttcggagttttcggatttgataaactacaggctaaaagacatcaatggcgaatttccgagaatgttcttttaggcctttcattattaggtattataggagcagcttcgggaatgatcatctttaatcataaagtctctaaaaaatctttcctggttaaatttttcatcatcgttttaattgatgttgtattgttatatcgattgataaggcattgatttagaatatttaattttttataaaatatttttgaatccggttttttcttatatttatcattcaacaatcaaaaacaatataactatgaaaaatctaaaaaaaatgggaagaagcgaaatgaaaatgcttacaggtggaattgcaaaaggaatggtaagatgtaaggatccggatacttgtgcagtgagatggggatggcctaccgggttctccagtaattgcaatgatatggacattatatgtggaagcgcacctgccgtagatccatgtgaaacgtctttatgtatatagcagctcaagagtgttttagaacactctttttttatgcctctgtaaacgtgtattttaaacagaatattaattatttatttaatagaattgtttttcattaaaaatcactatttttgcactcgtaaaaatcctatatgcaaaacattagaaatattgcgattatcgcacacgttgaccacgggaagacgactttggttgacaaaatcatccacgcaaccaatattttcagagaaaatcaggagagtggagaattaattatggataacaatgaccttgaaagagaaagagggattaccatcttatccaagaatatttctgttacttataaagacactaaaattaacgtaattgatactcctggtcacgcggatttcggtggagaagtagagagagtattaaaaatggctgacggagttatcctgttagtggatgcgttcgaaggaccaatgccacaaacaagattcgtacttcagaaagctttagaattaggattgagaccattagtggttatcaataaagtagataaaccaaactgtcgtccggacgaagttcacgatcaggtatttgatttattcttcaaccttgaagcaactgaggagcaattagacttcccaacattctatggttcttctaagcaaggttggttcaacacttcattagagcaaactgaagatatcttaccattattagatggtattttacaatatgttcctgagcctaaagtaactgaaggaaatcttcagatgcagattacttctcttgatttctcttcattcttaggaagaattgcaatcggaaaagtaacaagaggggagatcaaagaatctcaatggattggtcttgcacaggcagatggtaaagttttgaaaggtaaagttaaagaactttatgttttcgaaggattaggaaagaaaaaagtaactgaagtacaagcaggagatatctgtgctgtagtaggtttcgatgcattccagatcggtgattctttcgtagatcttgagaaccctgagccattggaaagaacagctattgatgagcctacattgaacatgacgttctctatcaacaattcacctttcttcggtaaagacggtaaatatgttacttctaaccacctgaaagaaagattaacaaaagaattagagaaaaacttagcattaagagttcaacagactgatgatgcaaacactttcttagtattcggtagaggtattcttcacttatccgttttaattgaaactatgagaagagaagggtatgaaatgacaatcgggcagccacaggttatcctaagagaaattgacggagtaagctgtgagccttacgaatctttagtagttgatgttcctgaagagtatgcatcaagagttatcgacttagcaactcagagaaaaggtgaccttcacattatggaaactaaaggtgaaatgcagcacatggaattcgaaattccttcaagaggtttgatcggattacgttctcaaatgttgacagctactgcaggtgaagctattatggcacaccgtttcacagaatacaagcctttcaaaggagctattcctggaagaaataatggagtattgattagcaaaactacaggtcctgctacagaatattctattgctaaattacaggatagaggtaagttctttgttgatccgggtgaagaaatctacacagggatgattattggagaacaaaacaaacctggagacttggtagtaaatatcgtagaagcaaagcagttgaacaacatgagagcttctggtaaagataaagataccggtgttgctccgaaaatcttattctctcttgaagaatgtatggaatacatccaggctgatgaagctattgaggtaactccaaacttcatcagaatgagaaagaaaatcctttcagaagaagaaagaaaaagagttgaaagatcagcgaaagcttaataaatcctgatttacaaatcaatatcatatagaaaagcctcgaatttttcgaggctttttttctaaataatcggaaaaattgtttattttttcaaaagaatatccgaaatattaaaatataatttaaagtagttttacggctatgaaaatgagtaaactaaaacttatcgttttattgggagttcttgcgtcttacagcacctcatgttctactcagaacaatgttacgaagactcctcctgctaaaaatacaacaaaacctaataccggcaatactacaacccagccaaaacctcctgtggcagtaaagcctacaacaggaacttcaacggaagaaacgttcagaaccactcttcctgaaatcaaaagagagtttcgtggcgcatggattgccagcgttgccaatatcaactggccgtcaaaaaacaaccttactgtagagcagcagaaagctgaagccatcagtatgctggatatgctgaaagataataacttcaatgccgctatttttcagataagaccttctgcagatgctttatatacaagtaatattgaaccttggtcttacttcttgaccggagaaacagggacggctccttatccaagctatgatccattgttattctggatcgaagaagctcacaaaagaggattggaattacatgtttggttaaatccttatcgtgctcatcatacgaacggtggtacggtgaataggatgtctatggccaacagaatgtctgaccttgtagtgagattaaaaaacgggatgtattggtttgatccggctaacccgaaaacacaggatcatgtatccaacgtagtaaaggatattgtgaaaagatatgatattgatgctattcattttgatgattatttctatccatacgctacttacaacaaaggagcagatttcccggattatacaacatggagcgcttatcaaaaaagtggaggaaccttatcaagagaagactggagaagagataacgtcaataaatttgtagagcgaatctataaagagattcatgcagaaaaaaataatgtaagatttggaatcagcccatttggaatctggaaaccgggatatccggcagggattgtaggatcttcacaatttgatgagctatatgcagatgctaaattatggttaaataaaggttgggtagactatttttccccacagttgtattggcccatcgattcaaaagggcagagcttcgaagccttgttaaactggtggcagtcagaaaatacaatgaaacgtcacttatggccaggtttgaatacggttgagattaaaacttatgatcgtccaacagaaatcaagaaccaaattgagatttccagacaaatattaaagaatgatgcaggtgaaattcactggagcattgcgggattaactaaaaatccgggaatgcttccgacgctgaaaaatggtccatacagcgaaaaa

SEQ ID NO: 2168 - DNA, 24221 bp, synthetic construct
  source 1..24221: mol_type = other DNA
  misc_feature 1..24221: note = Synthetic
gggggttacagctcgtattattaaagtgatgatttttattacctatccacttgtttttctatcagcaatattgacaaaaattttagcaagaaaagataagaaattgagtacaagtcgagaagaaatttctgcgcttgcgagtattggaacagcagaaggaatttttggagagaaagagaatagaattattcaaaacctgattcgattgaaaagcattaagctctctgaaatcatgacacccagaacagtagttgtgatagcagatcaggagatgatgctgaaagattttatggatgatgaaaagtttatatatttttcaagaatccctatatacagtcaaacacgagataatattactgggtttgttttccggtctgatgtatttgaacaattagctcgggataaatttgaactaaaattgaaagatattagtaacgatgtattgaccttttcaaaagagactacactttttattgcttgggaagagttgataaaagaaaggcaacaaatctctatagtaactaatgagtatggcggtatggatggaattgcaacactggaagatattattgaaactttgttaggttttgaaattgtagatgaaaaagacaaagttgaagacatgcaaaaatatgccttagaaaagtgggaaaagaaacaagctgagaaagcggcttataaagctaaaaaaacttaatgttaagaattcctttatgaaaaacaattgtaggtttaatttttcttatctttgaaacatgtttaaaacgaataatacaaaatggtggagtcttaacgctttgagcgaataggagtctattgaaattatataagtcccattcgcatttgtgaatgggattttttttggaacaaactctaggaatagagtgttattttaaagagatgatactagatttaaataatactgcaaaacagtacaaaagaccttttctaattgctggtccttgtagtgctgagactgaagaacaagttcatagtgtagctaaggatttggcagaaaaatcaactacggcaattctaagagcgggtatttggaagccaagaacacgaccaaattcatttgaaggagtgggcgaagaagggttgaactggttagttaatgctggaaagaaaaatggtttacctactacaacagaggtagctaatgctaaacatgttgagttggctttaggtgcgggagttgatgttttgtggataggagctagaactacggttaacccattcgctgtgcaagaaattgctgatgcaatcaaaggaacaaagattacagtaatggttaaaaatccagtaaaccctgatttaatgctttggattggtgctttagaacgttttcagcaggcaggaatagatgatttgattgccatccatagagggttttctgtgtacaatcacccaaagtatagaaatgttccaaactgggaaattccaattgcattggttgagaaaatgccagatatccctttgatatgtgatccaagtcatatctctggtcggcgagatggattacaagaagttgcccaaaaggcaatggatttaaatttcgcaggcttaatgcttgagacgcataataaccctgatcaagcatggtctgatccaaaacaacaagtgacacccgacggattggttgatttaatgtcaaaactaaagttgagaaaagaacatctttccaaagatgaaatgagctttatcggattgatgcgaggcaaaattgctgatctggatgataaaatgtttagtatgctttcagaacgcatgaaaatagcggaagaagttgggatttataaacgtgagaacgacataacaattcttcagcaagaacactggaaagagattattgaaaaacgtttaagtcaatcggaggagttgaggttaacaccaaagtttgttcgttcagtaatggatgctattcaccaggagtctattcgtcatcaaacgaaagtcatgaaccctgatttgattgagtaagtttttaaagactgactggagtataagaattaaaccatgtgatttttcttcattctattcggcgaaatctttaaatttcagcttgattacttttttgcgatttagattaaaccccaacaagcttaagaatataagacacagtcattgccaatactgtaactgaaaagctagtgattatggttttaaaggagtatttcggaaaatatttgcaaaccaagaagctaatgaggagagtcaaaagtatcaatagaacccctggattataaataaaagattgaacaacatctcccttcattaaagccaaaaaagaccgctgtgtaccacaacctaaacattcaatacctaaatgttctttaaatgaacacttcagtaggtgatcatcgatagataaaaacataaactaaaatctagaaaaaggaccagcgcttgttattacagtccctacaattattaagtaagcaataagaaacaagaagaaaagaattgataagcataatcctataattgcacagattcttccagctttgactaattgttttgaactgtcatcatacattccaggattagcttgaataagcttgttagccttagtactcaatacaagtgcaataataccacagacaatacctggaacaccatagcatacacatccgggaaaaatagagcatatcccaagaactaatattccaacattattagggactttttttgtctcgaggttgttgatttctatattatcgtctagttcttccataattgtgtttttatctgttgtcaaaaatactatttatgtccaaaaagtaattgtttttctttaatctttttaaaatcattgagtttagtggtattatccatcccattttaaattaaaacgtcatgaattgcaactggatttgtctttaaaatcattgaattctgcttatatttgcgaacgttcacagaagaatattatggaaaaaattgccccttataaaccaaagaataaagtaagaatagtaacagcggcatcgctttttgatggccacgacgctgcaataaatattatgcgccgtatcattcaatccactggatgtgaagtgattcatcttggtcacgatagaagtgtcgaagaggttgtggattgtgcgattcaagaagatgtacaagcaattgcgatgacatcttaccaggggggacatacagaatatttaaaatacatgcacgacttactccaagaaaaaggagcgccgcaaatcaagatttttgccggtggtgggggtacaattctgccagaggagattaaggaacttcacgattatggagttacgcgtatttatcaccctgacgatggtcgtgaaatgggacttcaagggatgattaatgaccttgtacaacaatctgattttccagtaggcgaaaatgtgaaagtagacgtctctacgctcaaagaaaaaaatgatgcgaatttagctcatgttatttcggctgcggagaattatcctgaagagtctaaagcattactcgaagaaatacatcaacttgcggataaagtaaatactcctgttcttggaatcacaggaactggtggctcaggtaaatcttcactagtggatgagttagttagaaggtttttagtggatttcgatgataaaaatattgcagtaatctctgtggatccatctaagcgtaaaacaggtggggcattgcttggggatagaattagaatgaactctatttccagtaatcgtgtgtatatgcgttctttggctacgcgtcaatcgaatttggctttgtcaaaacacgttgcagaagcggttttggtgcttaaagcggctgaatacgatttgattatccttgaaacttcaggtattggtcagtctgatactgaaattttggatcattcagatgtaagtctctatgttatgacacctgaatatggggcagcgacacaattagagaaaatcgatatgttggattttgccgatgttattgcattaaataaattcgataaacgaggcgcacttgatgcattgagagatgtacgtaaacaataccaacgcaatcacaacttgtgggacacaaatgtagacgaaatgccagtttacggtacaattgcttctcagttcaatgaccctggaatgaatacgttgtacacggtattgattgatacgctgaataaaaacacaaaagcagagctgaattcgacatttgaaattacccaagaaatgtctgaaaaaatcttcgttattccacccgaaagaaccagatatttatctgaaatagcagaaaataatagagcctatgacaaatgggtagatcagcaagtggaagtggcaaataaactttatggttatcaaaaatcaattgacaatctagcggcaagcgaaatagaagataaagatcgtttgataaaaggtttgactgaagcatttgaaaatgaaaagatgaatttgaaccctcacaattgggaatcaattgaaaaatggggagaaacagttgaaaaatataaaaatccagagtttaaatttaaagttagagacaaggaattaagtattaaaacacatacagagtctttatctcatctacaaattccaaaaatatctttaccaaaatatacttcttggggggatactttaagatggattttacaagagaatgtacctggagaattcccttacacggcgggacttttcccattcaaaagagaaggggaggatccaacaagaatgtttgcaggggaaggtggtccagagcgtacaaacaaacgttttcactatgtgagtttgggaatgccagcgaagcgactttcaacagcgttcgattctgtgactttatacggaaatgatcctgacaaacgtcccgatatttacggtaagattggtaattcaggtgtttcgatttgttgtttagatgatgccaagaagctttactcaggttttgacttaagtgatccgaaaacgtctgtatctatgacgataaacggtcctgctccaatgttgcttggattttttatgaatgcagcggtcgatcaggcttgtgagaaatacatcaaagcaaatggtttagagaaagaggtgaaagcgaaagtggctaagatatttgcggataaaggaacaaagcagccagaatatcaaggagatttacccgaaggaaatgacggtttaggattgatgttactaggagtaactggagatcaagttttacctgctgatgtttattcaaagattaaggctgaaacaatggctgttgtccgtggaaccgttcaagcggatattctaaaagaagaccaagcacagaatacttgtattttctctacagaattcgcactgcgattgatgggagatgtacaggaatattttattgaaaagaaagtacgaaacttttactctgtatcaatttcaggctatcatatttctgaagcaggcgcaaacccaattacacaattggcacttacgctttccaatggctttacgtatgttgaatactacctgagtcgtggaatggatattaatgactttggtcccaacttatcgtttttcttctccaatggaatcgatccggaatacgctgtgattggacgtgtagctcgaagaatttggtcaaaagcattgaagcaaaaatacggagcgaacaaacgtgctcaaatgctgaaataccatattcagacgtctgggcgttcacttcatgcgcaggaaatcgattttaacgacattagaactacattacaggcactctatgctatatatgataactgtaactcattgcatacaaacgcatacgatgaagcgattacaacgccaacagaagagtcggttcgtcgagcaatggcaatacagttgatcatcaacaaagagtttggtttagcgaaaaatgaaaacccaattcaaggttctttcatcattgaagaattaacagaattagtagaagaagcagtacttgcagaatttgatagaatcactgaaagaggaggagtgcttggagctatggaaaccatgtatcagcgttctaagattcaagaagaatcattgtattatgaaacgctcaagcacaacggggatttcccaatcattggtgtgaatacttttaaaagttcaaaaggctcgccaaccatgcttccaaaagaagtaattcgtgcaactcctgcagaaaaggaatatcaaatcaatatgcttgaagacttgcatgtagcaagaaaggaagaagctgataaatggttgaaagaagtgcaagaagcagccatcaagaacgagaatatgttcgataaattgatggaggcttgtaaatattgttctttgggtcagattaccactgcgttgtttgatgttggtggacagtatagaaggaatatgtaaaggatttatcctttacactatgggtgggggattaatcccccacttttttattcctgctataacctgctataacttttaatatagttttcagtcaagaatactccccccacaaagttggatagtagaggttcgtcatttgtttttttctatgggattacgtctgaaccagtgtaacttctcctcgttatcattcgtcgaaatgatttggttccagactcaagtagtcgtttcgacgatggcgaaacgtagcagaaaattgcataatcaataaatacgtattatatttacaaaacataaatataattatcaatggcaacatttaccagttcacttcccaatcacctcttgaagcttttagaacagaaggcaaaggagctgggtatgcctaaaaacaagttgattgaaaaagcgttgagtatttatttggaccaattgaatcgtgcggattatgtgaagtcgtataagagaatggggaatgatgaagatattactcaaatagcagaagaagggatggaagattatctttctcaattagatcaggaagatgaagaaggttaagcaatgtgaaatatggttggtaaatctgaatccagcgaaaggaagtgagcaagcgggaacaagacctgtattagtggtgagtggaaacctgatgaatacacatttaaatgtggtaatttgctgtcctttaacgagtaaaatcaaaaattataaaggaaatataattctatcgcccaacaaacgaaataacctgacagctaaatctgaggtcatgacttttcatattcgctccatttcaaaagaccgtttgattaaaaaagtgggggagatcaacgaatcccaattaaaagagcttaagctctgtttggatgatatcttacggtattgaatttaacttactttacggtgtttttatctcagcagactcgatgcacgcattatcaattgaactgacttcgttttaaattatgttgatgaaggatgatttgaaatggctaaaagcttaaacatccaatcccatgccgaaaagtgttaacacctgttaaatcaaggtactgtgagtgtaaactgtgcgactaattgattgaaatgtagcattgagtaatccgctaacacacctttcaagtgcatctgaagaccgtccaagtggatatgaacaccttccaagtgcatctgaagactgtccaaatcgttatgaacaatgtcaaagtggttatgaacacctctcaagtgtatctgaacgactcccgagtgcatctgaacgttgtacaagtccgtctgaacagttcaccagagcatctgaagaggctttgggtgcgtctgagcgatgtacgccctcatctgaagaggtaaacgatgcgtctgaatggatgcttaagtagtaaagagaagtgttcagcaggatctgagagacgaatgagtgtttaattttgactcttcatttcgaagcagtcgacgttggtctctaaatcgggataacttagtacttaaatagcaatgcgatatttaaaagttcgggatttgtcgaattaagtctttttaaacatagtaaaataaaagagggaatgaacgagcgttcgattccctcttactaatcaacctaacctaaccacctaatacaaatgtagttaaaaatatttgttgtgcaaaatggtttggtgaggggatatgaaggaagattcaactggcaaatgcgacattaccgtttactaaattataaaatatattcttagggcagtcatattctaacttttccctgggtctgttatttattttgtgttgaaattcaactagttgttcttttgtgtaaatgcttaaatcatcttcttttttcacatattgtctaattaacttatttgcatgctcaatagatcctttctcccaagaacagtagggatgagcaaagtagatagctgcttttatctttttactgatttgtaaatgctgagcgaactcaggaccattgtctgttgttattgtatgcacaaaatctttgtatggaagcaaaagatttatgatttgattttttaacccttctgcattttttcctaaatcaagcttttctatgaagacaaaattggtcattctttctgtgagggttagaataacacctttttggttggcgcctataattgtatccatttcccagtcaccaaatcgagttttcatgtttactatttctggtctttcttcaatcgtggtgcgattagcaataggaaaatgttttccgacagctctttttctatatttgagttgatgccgaagattggtgtacaactttcctccttcctgtttgtcttttctaatcagctgataaatccgctcatgactaaccatttctatcttgtttcttgcacaatacccttcaatttgtttaggagaccattgttcattgaggtattttaaggctaccttttgacactcttcagtaaactttctatttgttgaaaagcgatccttacgatctctgtaatattcatctgcttttgcagcagaataatttccgctctttaacttatttctctttatttctcgataaatagttgagcgatcaaccccaagttccctagcgataaaatctttggtctgtttgagctttaaataggcttctatttgatacctttgctcaatagataaatgtttcatatgcaacttttaatgtggtaattaaaggataaagaaacgaatttatctactgagtccagatgtgtagttttaaaatattacacactggactttctagttttgagataaaaagttatttccaaagattttttctgacctcttttgagtgaggtcaaaaaatctttagaataactttctcaattaccattcattttaaaccttttgttgcatttactaattgaatattcagaatggaaagctgtcagtattaaatttagagataaagtgatggtggtaaatgatttgaaaaatctgaataaaaaagccccctgattatggacaaggggcgacccaaatgttttcacaacggaataatccttattgtgaattgctttcaaaattggactactaaagtaaatattatttctagttaaacaaaacaatactaaaactttttactacgtaaatagattacgttcatgaggtttaattttatcagaaaattaaacgatatgcaaagaaaagaatttattcgagctggaatactgacaggtgcaggactctctatagctaaaatagtaagtgcttcggaaaggaataacttaaacatgaatccgatttgtatatatgataattacttaaaaggaacaatctactaccaagaagcactgcagaaaattgattttactgaacctttatctccaaaattagaacgagaacctaataataaatatgaccattttgcaattgcagtttacgttcaaggtagaaagattggttatttaccagcttatgaaaatgtagtaactgctaaaatgttggatgcaggagttgaaacacaggtttttataaatattaatcaattgaaagaaattaaaaataatgattatattcgagacaccatttatgtccaactctacaccgaattactcacttctcgtgaaaatgttctaaatgcggacctagataatagtagatctgatgatgctgttgatcggtatcggcagggctttaggattgatgtatagaaattaaatattatatagatgaaagaatttaacaagatgaaaacagttttaggacttgatttgggaactaatagtattgggtgggcattggtgaaagaagcatcaaatgataaagaaaagtcaagtatcgttaaactaggtgtaagagtgattcaatatgatacattttctaagattgataaaagtggaaaagtttctgaatcaaaaaatcctatagaagattttgccactggaaaaggtctttcacctaatgcagcaagaactttgaagagaggtgccagaagaaacctacagagatataagttaagaaggaaaaacttactagaaattttattgaaaaataacattatacaaaacgacacagcactaactgaggtaggaaaagacacaactcatcaaactttaaagctaagagctaaaagtgctaaagagaaagttgaattagaggagtttgcacgtattcttttggccattaataaaaaacgtggctataaaagtagtcgtaaagtttcgaatgaagatgagggacaagttattgatggtatgtccattgctaaagaactttatgaaagagaaatcactccagggcaatatgttttagaactactaaataatgggaagaaatatattccggatttttataggtctgatttacaaaatgaatttgatgctatttgggaatttcaaaaacagttttaccctgatattttagatgataacctatataactctttaaagaatcaaggtaagcaaaatactcaaaaaagatttttagcaattaaacaaatttatactgctgaaaacaaaggaagtcgagatgaaaaaaaaatagaagcttatggatggagagcaaatgctataaaagaaaacctgaccattgaacaagttgcttttgtccttgttgaaattaataatgagttaaaaaagtcaagtggatacttaggagcgattagtgatagaagtaaagagttactctttaataaactaacagttggagagtatctttataatcaaattcatgaaaacccacatacttctttgaaaagtcaagtgttttatagacaagactatttagatgagttcgaaaagatttgggaaattcaagcaaagttttattcagttttaacaaaagaacttaaggaacaagtaagggatgttattattttctatcagcgcaaattgaaatctcaaaaagggcttgttagtttttgtcaatttgaaagttgggaaattgacaacaaagataagtatggagaattagtttttaataagttaagtggactgccgaaaaaaataacaattggtcagaaagtaattcctaagtcttcccctttatttcaagagttcaaaatttggcaaaatatcaataaccttgagtttagaaaaataaagggtaaacaaaccaatgataaagatttttatgtgttagacgaggaagatagaaatctactttttcaagagttgaatgttcgagggaagcttaccgaaaaagaattgtttaaattgctaggattgaaatcaaaagagtggaaaactaattatactgaaagtggattagaaggaaatagaacgaatgaagctctttacaatatatatcaagctattgctttaaatgcaggatatggacatgattggaataaaaaaaatgcaaaagaaataaaagaggaattagaagaagtttttccaagtttggggataaacgtaaatattttaaattttgatgctcttattgagggaaatgagtttgaaaagcaagaaagttaccaattgtggcatttgctttactctattgaagaagacgataaagtgagcaaagaagatcgattgatttatggtaataatagtgttacactaaaaaagaatttatgtaaaaaatttgggtttactcctgaacaagcaaatcttttagcgagtgtttcgttacaagatgattatggtaatctttccactaaagctataagaaagattatgccttatttagctgagggtatgaatttttatgaggctagtaaagaagctggatataatcactcaaactccttaagtaaggaggataatgataaacgagttttaaaaaacaagttagatatactacctaaaaatagtctaagaaaccctgttgttgagaaaattcttaatcaagttattaacttagtgaatcaggtagtggataaatatggaaagcctgatgagattcgtattgagttagctagagaattaaagaaatctgcaaaagaaaaggcagatgctgttaaatttataaattcaaacacctcattgaatgaagatgtacgaaacatcattaaaaaagaatttggatttgttcctacaagaaatgatgttattcgctataagctttggatggaattaaaagataataactataaatcactttttactaataaatatatttcaaaagataaaatattctcaaaagaaatagatattgagcatatcattccaaaagcgttattgttcgacgattctttttcgaataaaacacttgcatatagaaatgtaaaccttaagaaaggtgatagaactgctattgactttattactgaagattatgcaagtgaaaaagaacagtatctgggaagagtggaatcactttatcagtcaaatgcaatctcaagaggtaagtataaaaaattgcaaatgacaaaagaaaaactacctgaagattttatagaaagagatttaagaaacagtcaatatattgctaaaaaagcaaaatctatccttcaggacttaattagaaatcctattgtctcaacaacaggaagaataacagatgaacttagaaatgattgggatttagtaaatgttatgaaagaattaaatttacctaaataccgatcacttggcttgacagaaaaacaaactagatgggatgttggtcaggaaaaggaaaaagaggttgaagtgatttcaagttggactaaaagaaatgaccacagacatcatgcaatggatgcattaactgttgcgtttactacgcacaatcatatacaatatattaataacttgagtgctcgaaaaaatcaaaatagtgatatgcataaaactattttgaatgttgaaaagaaaataaagcataagaacgaaaatggcaagaatgtttttatatctcctatgcctaattttagaaaagaagctaaaaggcatatagaatcgattttaatatcgtttaaaccacgaaataaagttgtaacgcaaaacataaataaaacatcaaagaaaaaaggagttaacgaaaaaattcaattaacacctagagggcagatgcacaaagaaacagtttatggaaagataaaaagacctttgtccaagcctgtaaaaatctctaaaaaactcaacttagaacaagctgaattaatcattgacaagcaaatcagacaacttgttttagatcaccttttaaagtatagaaatgatccaacaaaagcgttcgatactaaaaccttaaaaaaggacccgattgtttggaataatagtgaattgaaacatattaaatgttttgaggaaatttttactattcgcaaagatattggtcccgatctaaaaatcgacaaagttattgatcctaaaattaagtcaatactgcaaaatagaataaaagaaatggggagcgctaaagatgcttttacggatatagaaaaaaatccaatttggataaacaaagacaaaggtatatgtataaaacgagtaactattactggtgtcagtaatgcagaagcccttcattctgccaaagatcattttggtaaagaaataattgatgaagaagggagtactaaagcagtagattttgtaagtactgggaataatcaccatgttgctatttatgaagatgaaaatggtgatcttcatgaggaagtagttcctttttacgaagctgtggctcgagtaaatgcaaacttaccaatcattaataaagaacataaaaatggatggagatttttatttactttaaaacaaaatgaaatgtttatatttcctaatgaagagaagatgtttgatcctaatggaattgatttagaggacgaaaagaattattatgaaattagccctaatttgtttagggtgcaaaagattggaagcaaagattattggtttaggcatcatttagaagcaacgctaaacgacattgaagatgtgacctataaaagaaaacggaatccaaaaagtataggtaatataattaaggttcgtttaaatcatttgggtgaaatagtcagaataggagagtattaacgctcccttataaactacattaatgtcgtatcgtattgagaagagtaagttttggatttatcaaaacatctccagctgttgactaggctgctcctttttaacctctttaatgccatggaataactccatcattccaaattgacgatcagtcacgtgtaaaatgcccacttttccttttttagggagtagcatttttacgcgctttatatgaacctctgcattttctctactggcacaaaaacgtagataaatggaaaattgaaacatggaaaacccatcggtaatcaatgcctttcgaaatttcgaagccacacgacgttctactttcgtctcagttggtaaatcaaaaaatacaagaatccacatagctctatattgatttaatcgggttaaaaatccatcgttactcataatacggggtataaaatttttcgggatacacctgcataacattcgtacaaagagtgagtagttcgactcattgctaccattaaagggcttttcttgccatctatttttacatcaattgcagggatgattaataattgttgctttatttcttttgttagtttttctatgttctctgtttgttcaacaatgctgtaaaccacttgatccacaaaagggcgataaggttccataatatcatccgccaaacaatatgcattgtatttattcgcatgatgaatacctaaggcgggtaataatccacttcctattaaggaacgtgcacaaattgcccttaaaatagcataaccgtaattcaacaaattatttggtgccattgctttttgacctctgtaaaaatcggaaatctcaaaaaaccgttcccaataaaaagcagcagcattggcctctttgtttgttgcgtcaccagacaatacttccctcgaccactttcgcaacttgtcattctgtttattgagaatcgccaatccattcgcctgattattaattttagcctgtattgtttgttgccataagttcttttttaatggaatggaagcttctaattgaaaacgaagtcgttcattaaattctgaatgaccactcaacggagaaattaaacttaaaggcaagtgctgctggttacaacaaacaatggctgcattttgatacgtcaacttttcaattaaccgattggtaaaagtaatttgatggtgttctaatataagcataccaatgtcctctatcggaactgttcgaacttcgtctttatcgggaaactttacaataagttgttcatcttttgtgctaaggtaagcagggttttcaaagaaaagtgtgcgtttgatcatggtgtcataaaattagtagtgtgaaaagggtacgcaattgactatcaaaaagtttcaaaaaatattttctaagtacatcattagaaaagaaataatggtcagattgttcaaggtgtttatacggaatgttttaatttttgatttctagtgaatccctataaacgagaaaaaccgcccttttcggggcggtctcctgtgaatcatcacataaaaataccaatttgaaagcaattcacaacgtctactaccaacatgtcaaaaggtaggctcctgtgaatcatcacataaaaataccaatttgaaagcaattcacaacctgacagttttacgaccttccagggtaagcctgtgaatcatcacataaaaataccaatttgaaagcaattcacaaccgaagagtacgcagcctgtacggcctgtatcctgtgaatcatcacataaaaataccaatttgaaagcaattcacaactacctctcccgactcatctatatctacgaacctgtgaatcatcacataaaaataccaatttgaaagcaattcacaactctcttcctgcagtattcgatttttgtcgacctgtgaatcatcacataaaaataccaatttgaaagcaattcacaacagttgcaccttctgccgctttctcagcttgcctgtgaatcatcacataaaaataccaatttgaaagcaattcacaactgcgtcctttcaagcttagagctgacggctcctgtgaatcatcacataaaaataccaatttgaaagcaattcacaactatagaccttaatctcgtgcacgtcgtccacctgtgaatcatcacataaaaataccaatttgaaagcaattcacaacaagttaattcaactattctagattcttcgacctgtgaatcatcacataaaaataccaatttgaaagcaattcacaacggcggtaacgcgggttgcgattgtgaaaatcctgtgaatcatcacataaaaataccaatttgaaagcaattcacaactagccgggacacaggcgggacaaagtaattcctgtgaatcatcacataaaaataccaatttgaaagcaattcacaaccacgaaccccttgtacatttgtaactatggcctgtgaatcatcacataaaaataccaatttgaaagcaattcacaaccaggtctggccaactgcgccattctagaaacctgtgaatcatcacataaaaataccaatttgaaagcaattcacaaccaaagaatgattcatacgccaaagaaaaaccctgtgaatcatcacataaaaataccaatttgaaagcaattcacaacttatcagaaagagttgaaattgaaaataggcctgtgaatcatcacataaaaataccaatttgaaagcaattcacaacgtagcgaattcactaatgaaagaactcatgcctgtgaatcatcacataaaaataccaatttgaaagcaattcacaaccgtggctggtttatggatctcaatatagaacctgtgaatcatcacataaaaataccaatttgaaagcaattcacaaccgcttggtgcttcacctaacgaaaaagacacctgtgaatcatcacataaaaataccaatttgaaagcaattcacaacactcaaaaacaaaaaatggaaatcgctcacctgtgaatcatcacataaaaataccaatttgaaagcaattcacaacactattaacctccagccttgtaaatgttttcctgtgaatcatcacataaaaataccaatttgaaagcaattcacaacactttagtatagtggtacttatcactcattcctgtgaatcatcacataaaaataccaatttgaaagcaattcacaacttatttaagtgaattaattgccgactttaacctgtgaatcatcacataaaaataccaatttgaaagcaattcacaactaatgggagaggttgcaccctcccttgtttcctgtgaatcatcacataaaaataccaatttgaaagcaattcacaactaacatgtaaagaatcttttctctaactgcctgtgaatcatcacataaaaataccaatttgaaagcaattcacaactgttgtcaaggtaggacattgcatagttttcctgtgaatcatcacataaaaataccaatttgaaagcaattcacaacaaccctactgttggtggctctctttaccttcctgtgaatcatcacataaaaataccaatttatgaatatactatctgtttttttcaatggagaacacgtttttatcttctccctttgccaaacccacaatcctaactatattagagcattaaattggtaagatgaaacactcaaaaacaattgatggtcatacgcacatattatatgatcacgaaaaagtagatacacaagaattgacgcaacgcagtcttgacttttataaccaaatggataaaaggcgctctgtgcgtactttttctgatgagagtattccacaggaagtaattgaaaacatcattaaaacagcttccacggcaccttccggagcgcacaaacagccgtggacattttgtgtggtttctaatcctgatttaaagaaaaaaattagagatgcagctgaagtagaggaacgcgaatcttacgaaagtagaatgagtgaacgatggaaagacgatttaaaacctttagcaacagatgcagtcaaaccttttttggaggaagcgccttatttaatagtactttgtaagaaagcctacgattttgatgcggatggaaacaaagtcaataattactacgtaaacgaatcagttggaattgctgcaggaatgttgatcacagccattcataatgcgggattagttacattgacacatacgccaagtccaatgaattttcttacagacctgctcaaaagaccaaaaaatgagcgagcgtttttacttttgcccgtcggctatccaaaagatccgacgtatgtacctgaactaaagcgtaagaacttggaagagattgcggttttttattgattgtatcgtggaatataataaatgtacgtgggaatatgtaggaacgttcctacatattccaaacgtctctagattctcttctccaagtctaaagtctaacatctaacatctcaactccctaaaactccctatgtaacgtttcccaaaccttattcacaggtaatcccatgacattgtaaaaacacccttcaattttttgcaccccaatttgaccaatccattcctgaataccataagctccagctttatcgaaaggttgaaaatgtttgatataataatcaatttcagcaagtgtcaatgttttaaaaaagacctttgtttttactgtaaaactcatttttttatcaggattatagaggtgaacaccagtaatgacttcgtggttttttcctgacagatcgagtaacatgtcttttgcttctttggcattttcagctttttcgagaatacgattgttcaaaactacaactgtatcagaagtgagtaatacttcatttgtttggattgcgtcttttaagggttgtgcctttaattccgataaatatgctggtactttttctgcgtccatgtcagaggggtagatttcttccacctccttttttctgacttcacaaacaaatcctaaatttttgattaattcaattcttctgggtgaagaggaacctaaaacaatttttttgttgaacatatataagttaaaaataatgaatcatgatggcccaatagagtggaagtaaaagtccaaatatcattgttattttgacccatccatgacttcttttgaattgtgatttagttttagctttgaaaagaaggataaaagtaattattatcgatactgcactgagaattaatggtgaaaaggctatataatcaataatatagtttcttccagcaaagagaaaaaatgacagaccaatagttataagcattagtgtcattgacattcctttcgtttttctcactccccaaataattggaattgttctagccttaatcattttgtcacctttgatgtcttcaatgtctttgataatttcacgtgtccaattgagtatgaaggcaaaaatccctaaactaaaaccaaggtatataggatattgataagcgctattaagtgtaaaagggaatgtataagttaattcattcccatctacctgttgattgtaaaatatacctactaaaattggaactaatgcagtgagtactgcaattattatattacctacgactaaagttctcttcaattgcatcgaataataccaaagtaaattaatagacagtaaatgaataaaaacataccaaaaagtactatttctatagctaaggtagatagcgagagcaaaagcaacaaagttaattacccaatgtaagagtatcgcccatcttctctttatgtgtttagagataatgattctattaggtcgatttactcggtcggctttaatgtcaaaataatcgttaatgatatttccagcagcagcgattagtacagtggagaaaacaagtaaaaagaaatcaaatgttcctaaataggattgtttaccagatgaaagaaaaatactatcgaagtaccaggctaagctgtacatcgtagcagcaataatcagcaagtttgctggacgtattaatcgaatgaaatatttcattttacaattcgatattctgtacgtctgttttcttgatgtgctttttctttggcttcttcagattcaagcatttcaatttcttcgtcagtatagatgggttgagattcaccatatcctttgtacgaaagacgacttttatctacgcctttctcaatgaggtattcataaacagcttttgctctattctctgataactcttgattcctttggtcgtctcctcgggtatctgtgtgccctccaatttcaacttttacagattcgttttcttttaaaaaacttactaacctgtttagctcgttaaaagactcctttcgaatgattgctttgtctaaatcaaagaagacattcgctaaagtaattgacccttcctttcctgtaggaattaaaggaacgtccatatggatagcttcttcaggttgctctatcatatcaaaattcttactaaaaaatgcataacctggataggatacattcaaagcatattttcttcctgtaggtaaagccactaaaaattcaccagaaatattatcagcttcagcttcaataacttgtttccctgttgaaagatcgactaattcaaatttacctcctaaaggttttttatctgtcgcatcataaactaaaccttcaaagtaggttgttttgacaggacgtaattcttctggcatttcgaagtagtaaatatccaactttccataacctccaggacgatcagaagcaaaaagtgctatttctccatcaggaccaacgagtaaagagttttcatcattttctgtatttattgggtatcctaagtttacaggatctccccaatttccaagtggatcttttctcgacatgtatatgtcataacctcccattcctatatgtccattagaagaaaaataaagcgtttgaccatcagggtgaatcaaaacagaggactccattgattctgtattgatattttgtggaagaggagtcggtttcctccacgatccatcatcgtttttaatactcatatagatatcacttctaagcgttcctcttcctccaactcgtcggataaaataaagtgttttaccatcagctgataatgaaggctgtgactcccatcgagcagagtttacgcctccgggtaagttttttggatttgtccatctacttcctaactttttagtgataaataagtcacaagacccatttccttctctattttcaccataattatatcctgttctatcggcacaagcaacaaaaatcaattcgcgtccatcagctgaaagtgttggagccccttcattgttggatgtgttaatgttatttggcattggtatagcttccatccagatattcttttcactcagttgagaaacgaaaaaatcttcttgtcctcttggtgtattgtcgctattaggaatctctcttgtgaaaagtaaagttcgaccgtcaacagtaattgttggaaaatattctggatgttccgtattgataccaggacctatattaattggtttaatatctaaagggtttttcatcgcttcaattgcaaactgagcattatctctcaatctttgagaagcgcgcatgagttcaggtgaaattgaacggctattactattgagcaccatatcaaaatacttcgtagcatcttcataatctccgttacgcatttgtaactcaccaatgtctagatataacagaccgttgaggttagcattgggattaatcctaagtgattttttataatgttcaaccgcttcttcgtaatccccatttaaacgataaaactcacctatcaattgatgtgcctctaggaaattctcatctttatcgagggctttttgtagtaagtctattccagcttgaaagtcaggtcgccctgtatctaagtctatgttttcctgaggagcatttcgagcttcgttaaaaagctttatggcttttttgttctttgtgccataaccactttgggctgttgcacaacctgaaagaaaaaatgagaataagagtatagaaactgaaaataatttcaacattttgtatgtttttatgggatattcatgaatttatgagtctgttgagaaattctccactttggatttttcttgacgtattcaattatttctggcaaaaactgttcctgttttgaccattctggttgaagaaacaattcacatccctgattcacacgttcggcatgcgtctcagcccactcaaagtcacttttattgaagatgacaactttgagttcatcggctaggtcgtaagcctcctcatcaggagctttaaatttttttggtgaaaagcagtaccaatccacatttcctatcaacggataacatccagaagtttcaattgctatttccttaccttgtttctttaattcgtctactaacgttgtcaagtcatacattgcgggttcaccacctgtaaggacaacgaaattcgttggggtagcttcaacagctgaaatcaacgtgtctaaatgaacttcaggatgtttttctttatcccaactatctttgacatcgcaccagacacagccaacatcacaaccaccaaaacgtatgaaataagctgcacgaccagaataatacccttcaccttgaatcgtgtaaaaggattccatcactggccaacttttgggtttttcttttttcgctttttccattagctcaaaagtagtgaaaaccttttaagaaccttcatctaaaataaagaattcaattgaaatgatttgtgttatggtagggtttgaactaacagagtgattaattcatcagcgttgtataccaattttgttgtaagcgcttatactcaatttgaaattcattgaggtatcgacgtgccttcaattcattttctgatgatcgatttttaagtgtatcatacacttttgaaattaaggcaataatgtttgaacctaacaaaaattcacttgtttttggattgacactatacgcttcataaacagcatctattttttctttttcttcgattttttcaatactgtgtggttcgtttcttgtgatgcgctcgtagtgcggtaacaattctgcacttaactcaacaaagtgacgcatcacatatactgcagagtttaatgattttatgttttttgacttcatagcttttcacttttctattattaaaacgtttttaaatggtaaatggttggttttagactttgatatatgctataaataccacatttatggtattgtacttaagttgctttagagttaattttgtattatgaaattgattgaaaaaaatctggttaatcttaaaaaaggggataaaggaattgtcgctagagtagagcagagcgctatttcccaaagattaatagaaatgggtctagttccagggactcattttgaaattcgctcaatttcaccatttggtgatccaattgccatccgattgaacgatttcgctattagtttacgattaacagatgctaagaatatttttgttactgagcagtaactaaatctttttcttttagttcaagccattttactttacgattcaaaggttggtaaagagaataattccatttttgctttatttcaggctcaaataaatcactccacaataattgattcaggttgttctttgtggcaatgtaaatgagttttgtatcacctacaaatagttggaatgcacctttatacatccattttgactctccaatccggagagatttacatttttctccaaaacaatccatccagttataaaatgcatttacggtgtgaagactatcttcaaattcccaaattgctaattcataaagaacactatctacggtaagctcgtgatagtatttttgctgaaaatctaagcgatctggaaaatgcttattgttgcttaactgttctttttgaacaaaaacggaattacttattcttgactgtataaaaagttctatcgaatcgggaatatgttcttcggtttgcactacagtgtcttctttataattatattctttcttcgcctgtggcaaaaactcttcaagatcaacagtttcacttttgttggaatcgtttgtacacgaga

SEQ ID NO: 2169 - DNA, 24221 bp, synthetic construct
  source 1..24221: mol_type = other DNA
  misc_feature 1..24221: note = Synthetic
tgtcatctccttttagttttttcacttctttttccgggacatcaatgatataaagcaaattcaggtaatctgtaaatttttcctgaattaaccaatatacagttgcttccagttctttttttaacgcaataggggttatttcaggaacaagatccagctgtacattggcatagttaaagtctttgtttagctgatttatcaaattctgataaagcttcaacttctcggcttcttctaataaagaaattatattcaattctgattccatctgtttttcttaaaatcagaaaatacaaacgatgttttattcgtttttataaacttttccattcttcattacaaaaaccacattttccagggttttcacattttttgtaggatcatcgttaacagcaactatatctgcaaagaacccttcttttaattgcccgagttcatctgcactacttaacaattctgcatttgttacagttgcagattgaatggcttctatagccggcatacctgcttctaccatatatccaaattctcttccattgataccatgaggaaaaacacccgcatctgtaccaaaagcaataggcactccttttttatatgcccttgcaaaagttccttgcaattgcggaccaacttctaatgctttaggcacgataatatccgggtagaatccgtctatcttagctttttctgccacatattttcctgcactaatcgtaggtaccatatacgatttatgctttttcattaactccatggtttcatcactcataaatgtaccatgttcaatagttttaattccggccttaacagctcttttcattccttcgtctccatgcgcatgagctgcagttaacattccgtaatcatttgctgttgaaactatcgattgtatttcttctattgtaaattgagaattacttccgtttttagcaacacttaaaaccccacctgtagcagtaattttaattacatctgccccatctttataacgctgacgtacagctttcctaccatcttccggagaattaacaactccgtcctttggccccgggtctccgagcaattctgccttacctccattagtcggatctccatgtcctccggttgaagaaataattttacccgctgtaaaaatacgtggtccatctactttaccggcatcaatagcttttctaagcgctatattaacacctgttcctcctaaatctctcacagttgtaaaaccagccatcaaagttctctttgcatatactgttgattgaaaagcgatatctgcttcattatctgtgtattttgcaacaaagcttctcgggttagtctcactctcaatgtgaacatgtaaatcaatcaatcccggcaaaacagttttgtcttttaaatctactgtaacatcttttcttcctgcttttaaaaagccgtctgaaatacttttaattttatttcctgatactacaattgttttattcaatagaacggttccgtttttagtatcaactattttaccgcaatgcaggtaagtatcctgtgcttttagttgagaaaaagaaataacgattaatagaaagagtatttttttcatttgcgattttttattttaatgtaaagtataaatcctcatctcatataaccattacaagatagatgaagatgtgtattcaaaattagcttcttattttttgttcccatttccaggccgataacattgcttcatctaggtcaagttctgctttccaccccagttcttcatttgcctttacagtatctgcatatgcactgataacatctccgggtctcctaccggttattttataatttaatttttctcctgaaacatgttcaaaacttttaatcacttctaatactgagcttcctctacctgtccccaggttaaaaacctcgtaacgttgtttattttttttattcaataagcgttgtaatgctatcacatgagctttagctaagtctactacatgaatataatctcttatacaagtgccatccggcgttggataatcgtctccaaaaacagaaagctggtctcttaatccaattgcagtttgtgtaataaaaggcaccaggttttgcggaataccaatcggtaattctcctatctctgcactttcatgtgctcctacaggattaaagtagcgtaatgctattgcttgtaattcttcatgagctttgcaagtatctgaaataatttcttctccaatttgtttcgtattaccatatggagattcagcatttttcactggcgcattttctgtaataggcatagcatctgcctgcccgtataccgtacaagaagaactaaaaataaaacttgctcctttcttcttaactaactcttttaacagataaacaagagagcttaggttattttcataatacaataatggattttctacactctcccctactgctttagaagctgcaaaatgaattactccttctatatcattatgccgatgaaaaaaatcttcaactttatttcgttcccgaagatttaatttttcaaataatggtttttttccggtgattgcagtaatcccgtccagtactttttctgacgcattggaaagatcatctataataaccacatcatatcctacgttttgcagttctacaaccgtatgagaaccaataaagcctaaaccacccgtaacaagtattttcatttttttatcgatttacaaactctataaccttagaagtaataaaattgatttgttcatcatctaattctgtatgcataggtaatgaaatcacctctttaaccaattgattggttactttaaaatctgcttcattataacgttcatctacatatgccttttgtcgatgtaacggaatcggataatacacaccacacggaattccattttcatttaaaaacttcactaaagcatccctgtctgtatccaaaactcttagtgtatactgatgaaatacatgacaagtacatttttcacaaaccgacgtgcatgtttttgctatttgcggtactataatagtgtcaatattttcaaaagcttttgtgtatttttctgctgcttcccttctttttttgttataagtatccagcaaaggaagttttgcccttaaaactgtcgcctgaatagaatctaatcttgaattcacaccaactacatcgtgatgataacgttgatacattccgtggtttacaactcctcttatcgtatgcgccaagtcatcatcatttgtaaaaatggctcctccgtctccataacaccctaaattcttagaagggaaaaatgaggtagaagctacatgtcctatcgctcccgttttcatacttgtaccatctacagatgtataagtcccccctattgcctgagcattatcttctatcacatataaattatgttctgctgctatttccataattgcatccatattggcactttggccaaataagtgtacaggaactattgcttttgttttgggtgtaatagcttttctaacagcttcagggtctatattaaaagtgtctttttctacatctacaagaaccggagttaattgaagcaatgctatgacttcaaccgtagcagcaaaagtaaaatcagctgtaattacctcatctccaggtttcaatcccaatcccatcattgctatttgcaaggcatctgtaccatttgcacatgggatcacgtgcttaacatctaaatattcttccagttctttttgaaaagcatgaacttccgggccatttataaatgctgcagatttaattacttcacttattgatgaatccacacgttcttttatagattcgtattgaccttgaaggtctaccatttgtatctttctcatgtaatactatatgcgttataattaaacaatattacgaaataaagcaacgatacccaatgaattttcagcaaagaatgtattttagcaggaaactaatttcactaagtgatttacatctataatatcttaattaccatcgttagtttttttttaaaactggcttcattttttaataaaaagctttccctttttgttaagggaaggagagttgtgtttaaaaccttaaaagataatattcactccaatgatcatgttatatggttccatgctgcgtctttaggagaatttgaacaagggcttccggttatagagcatgtaaaagttaaatatcctgaatataaaatattagtcacttttttctctccttctggttatgaagtaaaaaagaaccatcccgttgcagatatcattacttatttgcctatggatgccaggagtaatgttagaaaatttctgaatattgtaaatcccaaactagccatatttattaaatatgaattctggcctaactatttgaatcagcttaagaaaagaaaaataaatacactcatcatatcggcaatatttaaaaagaaacaagctttttttaaaccttatggtggctttatgaggtcttctttaaaaacattcaaccatttttttgtgcaagatgatgtttctaaagaattactaaagtctatcaattttgacaatgtaagtgtatctggagacacacgttttgacagggttaatgagattctaaaaaacgataactccctcccttttataaaagagtttaaacaagataagttgtgtattgttttaggaagcacctggaaagaggatgaaaatttacttattgaattcatcaacaattccaaacacaaggatgtaaaatatattattgctccacataatattaaaccaacacagatacaacagctaaaaacttcaatttcaaaaaaaacagtattatactcaaagagggaaggtaagagtttagctgaatacgatatttttattcttgatactattggtattctcaccaaagtgtacaactatgcagatatcgcttatgttggtggaggaatgggaactacagggcttcacaacacattagaacctgctgtatttggcattcctgtaattattgggaaaaattataatacttttaaagaagctgttgatcttgttagtattggaggtattatttccattaataatcaggaatcttttgatctaacatttaatcattttattaatgatagtacttatcgtaaagaaaccggaagaatagcaggagattatgtctctaaaaacagaggagccagcgaagaaatactaaatcatattacattattattagcaacaaatccttcttaaagaatctctttaaattcttgcacgaattacaaatcatttaatgagcatcaaccattaaataatttattcttcttgattacttctcccctgttaatcttgcggactaaaaatatggaaggaatgtctgtagcccattttttcaggcttaaaatgatcattataatttcgattcttgatacaacacccagaattatacatattaaaaagagaaggttgctatttgaattcaaaactaaatcaattaaaaatattagcaatgtaatggtccagaacttagctaaaatagaatgtgtagcgattgttcttttgaatttcagataactgataatatacgctaagacctctaatgcaacaattattaaaattggcaaatagttttcttttataaagatgctgtttaagtaaaaaaccgatgctattaccactatccaaaaaaactgatctacgttagagtcccaaatccttaatttctctgaagacacttctagttttctggcaataattccatcaaatatatcagtaagtaaaccgacaatcattaagacaacaattaaaacccgaaagttttcaacttttaaatacgcaatacttccaatcagtaaagcgataacaattctactataaattaataaaaacgggaggtttttcatctatacacttatcattacagtttttacaattgctgtctttttaattgacagagaatacagatcatcgtaatacattagataaggctaccaaatataatgttgcaaaaaataaattttgaatgttattcctgtgaagtcaggaatctaaataatacaaattattcttaaaaagctatagcaagatagtttctttatagttttattcaacccctagtacctctatctcaaaatataatgttgcatttggaggaattactccgcctgctccacgagctccgtaacccaaatctgcaggtatttttaaaatagctttgctgcctatcctcagttttgaaactccttcgtcccagcctttaataactctttcttgtcctaatggaaatgaaaaaggttcatttctatctacagaactatcgaattttgttccatcttcaagataaccaatgtaatgaactcttactcttttccctttttctggaaattcaccatcgctttctttgattactttaattcctaatcctgaatctgtatattcatgtcctagtttacggctttctacagcccattcttttaaaccttcctgtataaataaaatgtctgtagccgatatctttaattttttattctgacttatactgattaaatctgccagagttgctgaagccgataaaggaatacttttattttttttctttcccgttgataaccgaatcatttcttctccatcagtaaatacagcacaatacccttcaaaattctcattttgataacaaaaagtattgtcatttttattttcattacatgcatcacactgtgaaaatgctgataatgttatcgctaagaaaaaaaagaaactaaaagctatttttttatacatcgttattttttggctaatataattgctttcctctaaagtaaaacggtgaaatttgttaagcttttaacaagtctattttttattaatggcttctaattcataaagcaaccaggcatcaggatccaaaacaatagtatttacttgtttttctaccgggaggtcaaacttttgataacgatctgaaacctgaacagttttcactactgtactcccatctttataattgatttgaatatcaagaggaaaagtataatttacattttcttgcttctgatttacttctagttttaatgattttctggaagaattccattttacagctaactttggctgtcctgctttcattaaccattgttcaaagaaaacggataaatttttcccagaaacatcttccatcactttttgcaaatcacctgataacgcattgttatatttatattttttgtagtattcacgaatccctttccagaaaagctgatctcctaattctcttcgtaacatatgcaatacccatcctcctttttggtaagagttaggatttaataattgcatatagttgtctatttgcggatttactataggtacaaaattacgtttggcgtaatcaataattctttcacgttgttctttaactttttcaactaattcatctcgtccatatttactttcaaggtataggttagtgaaataggttgcaaaaccttcactaagccagatgtgatgccagtttttctctgaagccgaatttccaaaccattgatgcgctatttcatgtgcaattaatgcttcgctcctgccatcaccagtaacactattttctgcatagaaaatattacctgcattttccatccccccaaaacgggttttagattgaacatttgcaagttttttaaaaggatatgggccaatatgattgataaaataatccataattggagttgccaaagcataatcgctaaaaccgttatccctatcttgggggtacacccatgaagacaccggagttccatatacatctccctgattttctactgcaaaacgggaagcaccaataaccattacttttgtgggcaccggatctgtcattttccatctggacaaggttaaatcaccagaaacatttgttttctctgttaaaaccccatttccaatagtctgatagtgagatggcgcagtaatcacccactctacagttgctttgtctgatgggtgatcaactacaggcagccagtttttccctctatccggccaattatccccaaagaaagttcgttcgtcatatttgttttttgaaatgattaaaccatctccaggcacccctttatatgctatcttatatgttctgacctcatcgggttgcgttgtatttatattcaacaccaattgcgtatcattatgtgtaaaaggaacctgattttcactttctgtaacagacaaaacctccattcctttgccgtttgtatcttttttaactaaatccaggttaaattttgtaattccttttttaaaacggattttaacatcagcaacgctttcaatgacatcacttgcatccgataattttaaatcaaatgtataatgaagaacatctatagtttcatatcggtcataatgtttttgagcctttccgctaaaaaataaaaaagagagacaaaagacagctgcccatgttttattcagattgtttattttcattttacagataattttaaaagtaatttgatgaagatactatttttatttttcaaacatcttagctaagatttctttcatcattttagctgccaaaaaagcggtcatattttgaaaatctctattcgggttatattctacaatatcagccccgataacttcagcatcaacattctgaattaatcgaatcacttctctggatgtcaatccgccaggctcatgatgcgaaacacccggagcataagcaggatcaaatgcatctatatctaaagatatgtacaacggatttttaaattttgaaatggcatccaatttcaaatctttcatggggtggatttcaacattaaatttttctgcttgctctatttggtgcgtattcaatgtcctgatccccacttgtactaatcgctctacgccgccggtttccataatcctggcaaacggacaggcatgagaatatttatctccttcataattatcataaagatctgcatgagcatctatatgcaaaatatcaattacagggtgttttgaatgtagtgctttaataatagggtaagtaatggaatgatcgcctccaagtgtgaaaatttttgcatcttcttctaaatgacctccggtaatcttttcaatatcaaaatattcagaaatttcaaaatctcctttgtccgttatttgacctgtttctatggtaatcccattttcagcaaaaagattcatagatccacaatgtaatgcttctcttattagtggaggtgcaagacccgggccttgttgatacgaagactttttgtcaaattttattccctggacgttgatgttgtgcattgtaatttacagtttttagatcaaagcaaatttaatcatgaaatgatgcatcagaaaatatcttttcaatcaaaaagggggaatttccccttaagaaaactttttgtaaatacttaaattaaatgttcaaagctaatttagataaaataaggagttaataattaattgaaattaaataatctggtgatagatataagataaactcataccactttaaatgctttagctcatggttatgttattttaataaagtggtattcgtgaaacatttaaagcaaaaaagaaaacgacacaagaattaactcatgccgctttaaatgttttcacaacggaataatccttattgtgaattgctttcaaggtttaaatgtacaaaaagtatctgaagtaactaatatggtttcccgtaataaaacgaggttattattaattacttttaattaaaaattatagaaacattgcaaaaatcaacaaaaaatatatctaaataagccgtcttctgcagaagacggcttaaaaaagcaattcacaactagtcatatacattatatacaactaattaaggaaaaatagataatcaaatttgatttagagtaaaatttggacaattactcaaaacaatgaaagaaaaaacaaaagaatgaggttggaattcattctttttaaatgtttaatttaattgccaacctattttaaatacaaaagtatcatttttttagatatatttgtatatgactacaattttttttaaatgaaaaaaatcttaggattagatctcggtactaatagtattggctgggcgttagtaaatgaagcagaagatgataatgaaaaatcaacaatcatcaaattaggagttcgtgtaaacccactaactgcagatgaaaaaactaatttcgaaaagggccgtccgctttcaaccaatgcagacagaacgttaaaaagaggtgcaaggcgtaatttacagcgctataaacaacgtagaaaacaccttgtaaatattttaattaaaaatggatttattacaaaagattccccattaacagaaataggaaaagatactacttttcaaactttaaaattaagagctgcttcagccagggaaaaggtaagtcttgaagacctggctcgtgtacttttaaccataaacaaaaaacgtggatataagagtagtcgtaaagctcaaaatgaagaagacgggcaacttatagatgggatggcagtagcaaaaaaactatatgaaactcataaaactccgggacaatatgtacattatctgctaaaaaataataaaaaatacattccggatttttatcgttctgatcttcaaacagaatttgatgcaatttggaatgttcagaaaactttctatcctactatattaaacgatgaattgtataacaatctacagggtaaaaacaaatcgcaaacctgggcaatctgccaaaaaccatttaatattgaaggtattaaattaaaaggaactgctaatgagcaaaaactacagcgttatcaatttagagtaaatgcactcacccaatcattagaactggaacatttagccatagttctacaagaaattaataataacctcaataactctagtggatatctaggtgctatttcagacagaagtaaagagctttattttaataaggaaactgttggagaaaacctatataagcaacttcaaaaaaatccacatatatctttaaaaaatcaggtattctacaggcaagattatttagatgaatttgagcagatatgggaaactcaggctaaatatcattcaaagctaacattagacctaaaaaaagagataagagatactatcattttttatcaacgtaaattaaaatcgcaaaaaggattattgagtttttgccaatttgaaaattggcaacaggagtatattgaaaaagaaactggaaaatcaaaaacaagaactattggtaatcaggtaatttcaaaatcatctcccctatttcaagaattcaaaatttggcagaatctaaacaatttaatttttaaaaactcaataaataatgaagttattgaagtcacaaaactggatgacgatgtgcgtaatattttatttgaagaattaaatttaagaggcgacttgaagcccaataatatcttaaagcttttgtctaggtttctagaagttggaaaagtatctgaatggaaatgtaattttgaaaaaatagaaggtaatcttaccaataaaacactctataatagttatcaacaaatagcagataacgagggttatggatttgattgggcaaaaaaaacagctaaagagatcaatgaagaactaaaagcaatctttacagaaataaatattaatcctagcatattggattttaatgctgaaataaatggcaaagattttgataaacagccaagttatcaactatggcatttgctatattcagcagaagatgactctaaaattaatgaagaagataagctaatctacggaaactctaatgtagccttaaaaaagaaattacacctcaaatatggctttaaacctgaatatgcagccatgttagctaatatagccttgcagtcagactatggaaatttatcttctaaagctattcgtaaaatttatccttatttaaaatctggtaatgcatattccgatgcttgtaaattagcagggtataatcacgctaacagcttaactacaaaagaacttgaaaacagaaagcgaaaatctaaactagaattattaaaaaagaatagcttacgcaatccggtagtcgagaaaatcctgaatcaaatggtaaatgtaattaatcaggtagttgacgcttatggtagcccagatgaaatacgtatagaattagccagggagttaaaaaaatcggcaaaagaacgtagtgaaatgactaaaaatattgctgatgccaccaggcgtaatgaagatattaagaaaaccatctccaaagaatttggtatcccaaatcctactaaaacagatgtagttaggtatcgtttatggttagaattggaatcaagaggatttaaatcactattcacaaatcaatatattccaaaagaaaaattattttcaaaagaaattgatattgagcatattgttccaaaagctttgttatttgatgattctttttcaaataaaaccttagcctacagagatatcaaccttaaaaaaagagatagaactgcttttgattttatctctcaggaatatcaatcgaatatagaaagttataaagaacgtgtagaaagtctgtacgacaacggcaaaggagttattactaaagccaaacgaaacaaattgttattatctcaagcaaaattacccgaaggtttcattgaacgtgatctaagaaatagtcaatatatcgctaaaaaagcaaaacaaatgctatttgaagtttttgaaaaagttacagtgacctctggaagtattactaataaattaagagaagattggggtttaatcaatgtaatgaaagagcttaatttacaaaaatacagagaattaggtttaacaaaaattgaagaacgttgggatatagggcaagaaaaaattaaatctgccgaagtgataaaaaactggtctaagcgtaacgatcaccgacaccatgctatggacgcgcttactatagcattcacaagtcaaaatcacattcagtatctcaataatttaaatacttattacaatctaagaggaaacgaaaccgatttagaaaagagcaagctctttgccttaaaaaatagtattaccagaatttataaagaagataatggaaaggacaaacgaaaattcattcctccaatagacaactttcgctcagaagccaaaaagcatatagaatccattttaatctctttcaaaaacaaaaataaagttgctaccaaaaacatcaacaaaataaagctaaaaaataaagataattattattcaaaaatacagttgactcccagagggcaattacataaagaaactatttatggtaaatctaaacgtccaatggaaaaatcaataaaaatcaataaacactttacttctgaacaagtagaatttataatcaataaagagattaagaattgtattcttaatcatctagcaaagtatgataataacccagaagtagcttttgatactaagacactaaaaaaagaacctcttttatacaaaggtatctccctaaaagaagtacattgttttgaagaaatccacacaataagaaaagatattaatcctgataattttaaagataaaaaaaacattagtaaagttatagacggaaaaatcaaacaactattattgaacagattagcggcatataatggaaattctaaagaagctttttctgatttaaataaaaatcctatttggttagacaaaactaaaggtattcaaataaaacgagtcaccatttcgggtataaataatgctgaagctttacatcacaaaaaagatcatttgggtaaagaaattttagatataaatggcaggcctcaagctgtagattttgtaagtactggaaataatcatcatgtagctatttatagagataaaaacggaaaattacaggaaaaaatagtatcattctatgaagctgtcattagtgtaaattcaaaattaccaatcgttgataaagaatttaataaaaatttaggctgggaatttctttttactatgaaacaaaatgaaatgtttgtgtttccagatgataattttaatccaaatgaaatcgatttactaaatgaaaacaactatgctttaataagtcctcacttatttagagtacagaaaattgctactaaaaactatttcttcagacatcatttagaaacaactgttgaaacacagaaagagctaaaaggaatgacttacaaaccccaattaggacttaatgctattgaaggaattgttaaagtcaggattaatcacattggtaaaattgttcaaatcggagaatactagctatgatcaaacgcactctcttttttagcaatccggcgtatttaagcacccgtaatgaacaattggtgattaattttcctggtgaagataaaaatgaaactaccattcctatagaagatctggggtatgtgatattagaaaacccacaaattacagttactaatgggctcttaatgaaactagtgcaaaataaaaccgcaatagttacttgtgataaacaacacctcccttgtagttttttacagcctttggtcgggcatagtgaacaaactgagcgaatacaacaccaacttaacgccagtattccattaaaaaaacaattatggcagcaaaccgtaataactaaaattgagaatcaggccaatcatttattaaaacaaggcagaaacgctttgaagttaaaacgttgggtcaaagaagtaaaaagcggagacactcaaaaccatgaagctatagctgcagcttattattttcaacatctttttaagatcgaaggatttagtcgaaatcaaaaaggtatctcgcctaataatttattgaattacgggtatgcgattttacgggccattaccgccagagcattaataagtagtgggatgttacctagcgtaggaatttaccaccacaataaatacaatgctttttgcttagctgatgatattatggaaccttaccgtcctttcgtagattcattggtttatgatattgttgaaaccagcaactccatagaagagttaacggttcaaataaagtctgaattattacgtattccggctatagatgtaataattgatggaaaattaagtcctttgatgaatgcgatgagtagaactactaatagtttatatgaatgttttgcagggattagtcgtaaaattttatatccggagtttaactaaagttatattgagcgtaatcggggcttttttaatactatgaacgaaagtaatttttcacgtttaaatcagtacaaatctatgtgggtattagtattttttgatttaccaaccgaaactcgcttggaacgcaaagctgctaatcggttcaggaaaaatttaatagacgatggctttaatatgtttcagtttagtatttacatgcgattttgccccagtagagaaaatgcagcagtccatataagacgtactaaaaatgcacttccaaaaaaaggaaaagtagggatcatgcagattaccgataagcaatttggaatgatcgaattgtttcacggacaaaaagaaataccaccagaacctcccagtcagcaattagagcttttttagaaataaaaaatcgcattcttccttctaaatttaacaagaaaatctttttattttttgatttcagaacaacacataaaaaacaggataccaactcattacagcaagtatcctgtgaatcatccctaaagatagagaactgaaagcaattcacaacttagatgaagggttaataaatttttttattcctgtgaatcatccctaaagatagagaactgaaagcaattcacaactacgctctgggattcctttgccagaaataccctgtgaatcatccctaaagatagagaactgaaagcaattcacaacagaactctttatcaagaattagctatatttcctgtgaatcatccctaaagatagagaactgaaagcaattcacaactatcacctaaaggactctctataatggccccctgtgaatcatccctaaagatagagaactgaaagcaattcacaactaaaaatgcctgagccatgtcaggtttaaacctgtgaatcatccctaaagatagagaactgaaagcaattcacaacaattcttatcatacacccatcgctctaaagcctgtgaatcatccctaaagatagagaactgaaagcaattcacaacaaatcgtactatttcatctggtgcaattctcctgtgaatcatccctaaagatagagaactgaaagcaattcacaacaactttcgatgtaatcatagtcttgatctacctgtgaatcatccctaaagatagagaactgaaagcaattcacaacatatagttagaattattaagtgctttcaaacctgtgaatcatccctaaagatagagaactgaaagcaattcacaactagaaataccaccacttagcatctgtaacacctgtgaatcatccctaaagatagagaactgaaagcaattcacaacaatgaagaaaatgatgtctgaaatgcaacgcctgtgaatcatccctaaagatagagaactgaaagcaattcacaacatagacagcttgatatcgattttaaaaatacctgtgaatcatccctaaagatagagaactgaaagcaattcacaactatatcttctataactttcgaagaaggggacctgtgaatcatccctaaagatagagaactgaaagcaattcacaacacatctacaaaagtggtttattaccatctacctgtgaatcatccctaaagatagagaactgaaagcaattcacaactaaattaagacgattaatttctttagttatcctgtgaatcatccctaaagatagagaactgaaagcaattcacaacaatcagtatggtgttaagcttcataacaagcctgtgaatcatccctaaagatagagaactgaaagcaattcacaacttacttttatagatactttagatgcaaactcctgtgaatcatccctaaagatagagaactgaaagcaattcacaacaactttcgatgtaatcatagtcttgatctacctgtgaatcatccctaaagatagagaactgaaagcaattcacaacatatagttagaattattaagtgctttcaaacctgtgaatcatccctaaagatagagaactgaaagcaattcacaacatagacagcttgatatcgattttaaaaatacctgtgaatcatccctaaagatagagaactgaaagcaattcacaactatatcttctataactttcgaagaaggggacctgtgaatcatccctaaagatagagaactgaaagcaattcacaacatatgagtcgtagaggtaagtttatgggttcctgtgaatcatccctaaagatagagaactgaaagcaattcacaacaagtacaccttttgtatgttttaaaacaacctgtgaatcatccctaaaaatttttatcaaattttattccctggatgttgatgttatgcattataatttaaaatttagtcaaatctaaaacgattggaataataatcggcttccctttcaaagaaattatcgaaagctgtgtttgagtttaaatcttctattccaaataaagcgttaactactaaaaaattaaagtctgtataaaaaattttattatacgttttcaagaagcctgattcagtatttgcaaagagatcatttaaaggtttatccaaataagaatttacaaaagaaaaactttcatattgataagtatgaataagttcatgagctaaagcatcatcaccggcttgattatttaatatcaatacagaatttgtaaataacggaaccctaccattaacacgagcattttcaactctatttgggctaataaaatcggttgtaaaaacaaaagttcctgtttttaaacttctttcaaaatcaaactttccttgagatgcagttactatagttccagccaaagcaaaaggcataatcctgtattttaatttaaatttttctttggtattaatttcaaatcgattaaaccctatatttaaatgccacttctcccaaaaattaatgtttgacactgcattttctgtaatagaagtcccggctgcatttaaaactttagagggccatacatatacaaaatcatcttccctgtagaaagtacgtatcaatcgtttactttcaaaaaccagatatccgcctaacgctccctgtgcaaatcctttcaagaaagtttttccaaatttatcatttggtttcttattaataactgctcctataccgctaaaaacagaatgaataccaacattataaaacagtgcttgtgcatcattttgttgtgcttgtgaaatcttaaaaaaaagactggcaataattatgaatataatttttctcaaagcaattgtttttacaataaaaacagagccaatttagtaaaaataggaaagcatcagacttttaattttgcttgcattgacattatttgaattcctttagtataaaactctattgagttatttacaaaaaataatttttgaagtatttgttttctcattttttttgtattcatttgttttagcctttaaccaaaccttatgaaaaatatttctatatcctggttttttcattgttcaactaaaaaagattcaaaaaatcttaaggcaataaaaaaatgaaaattctcagaaaaaagatattgaaatcacgccttttagctaccagagaaaataaaattctggtattacaaaaggttggagacaaaattaaatacacacttcccggaggcattaaaaagaaaacagaatcttcaaaaaaagcattggtaagagaagtcgaagaagaaataggcgttaaaattgctcgtattgatttaaaatatattagttcgggagtatttgtcaaagaaggaataacaactattaaaagctattacagtctaaaaaaaccaatacaagacacccctgtagtcttagaattggataaattttctgctgtactctggctatcctggaaaaaggctattaaaaaaatggacctgtctgacaaactagctatcaaacaatactacaagaatttaaaggattgattcgtaaaagagtagtcatcttagatttcttcttctaatattaaaataaaaaagctctccgtttccgaagagctttttgtgcgggcgaaaggactcgaaccttcacacctcacggcactagatcctaagtctagcgtgtctaccaatttcaccacgcccgcaaaaatcgtgatttgtgggtgcaaatataaacaatcatttcaaattacaaatcttctcccattaaaaacttcttttttgtaattttatacactacaaattaaaatttcatggaaaatatatcctcctacgttcaggaaaataaagagcgttttattaatgaacttatcgatcttttaaaaataccatctgttagcgcagatccggctttttctcaagatgtacttaataccgcaaatactgtaaaagaagctttagagaaagttggatgtgatcatgtagaaatatgtgaaactccgggataccctattgtatatgcagaaaaaataataaatcctgatttacctacagtactggtatacggtcattacgatgtgcaaccaccagatcctttagatttatgggaaagcggaccttttgagcctattgttaaaaaaacagaattacatcctgaaggcgcaatttttgccagaggtgcctgtgatgataaaggacagttttacatgcatgtaaaagccctggaatttatgatagctacagatcaacttccctgcaatgttaaatttatgattgaaggagaagaagaagttggctcagaaagtttaagctggtttgtagaacgcaaccaggaaaaactatctaatgatgtgatcctgatttctgataccggaatgattagtaatacacaaccatctatcactacaggccttcgcggacttagctatgtagaagttgaagttaccggacccaacagagatttacattccggactttacggaggcgcagttgctaatccaatcaatattttatctaaaatgattgcatctcttcacgatgaaaacaatcatataactattccaggattctacgataaagtagaagagttgagcaaagaagaacgggaagaaatggctaaagctccgttttctttggaagcttataaaaaagcattagacattgatgctgttcatggagaaaacggatatacaacaaacgaaagaaattctataagacctactcttgatgttaatggtatttggggtggatatacaggagaaggtgcaaaaacggtaattgcaagtaaagcttatgccaaaatctctatgcgactggttcctaaccaggattggaaagagattaccgaattattcaccaaacactttgaaagtattgccccaaaaggagttactgtaaaagttactccgcatcacggtggtcaggggtacgtcacaccaatcgatagtattgggtacagggcagcatctaaagcctataatgacacttttggggttactcctattcctcagcgcagtggcggaagtatccctattgtatctttatttgagaaagagcttaagagtaaaactattttaatgggcttcggattggatagtgacgcgattcattctcctaatgaacactttggtgtcttcaattacttaaaaggaatcgaaaccattcctttatttttcaaatattttactgaattaaaaaaataaaaaatattttttttacttggaaacacccgattttattgggtgtttttttatttcttttattttaatgctctacaaatgtcgaatatattcatttttattctatatttgtagagttaattctaattaagtagaacatgaaattatcaaaagcagaagaacaactcatgaagtacatctggaaacttgaaaaagctttcatgaaagatctattagaagaataccctgatcctaaacctgcaactactacagttgccacgcttttaaaacgaatgacgggtaaaggctttatcaattacaaggagtatggaaagtccagagaatattttgcattgataaaaaaaacagattatttctcaaatcatttaaatggtcttatcaaaaacttttttaatgattctactgctcaatttgcatcttttttcacttctgaaaccaacttgagtaaagaagagttagaagatttaaaagctataatagatcaagaacttaaaaagaaataagtgatgttagtttatattttgaaatccagtatttgtttggcagccttcttggcattttataaactatgcctagaaaaagaaaatattcatcattttaagcggtactatctattatctgcaatagctatagctttaggtattcctttaattacttttacaacgtacattgagccttctactacagttattctggcgcctcagttttctcaggagataaacatacctattgaagtacctgttgaagaggtaacaccaaactatttatcgatttttttatggagtttatacagtttgggggtaatcatttttggagttcggtttattcgaaacttatcaaaaataatgtatcgtataaaaaataatcccaagtacaaaaaaaacaatatcatcaatgtattgcttcaaaatgctgtgtctccgcataccttctttaaatatatctttttaaacaaacagaagttcgaagcccgtgaaattccccaggaagttttctggcatgaagaagctcacgcaaaacaaaagcacagtattgacattctatgtattgaaatcttgcaggttattttatggtttaatcctcttatttatctggcaaaaaaagcgatcaggttaaatcatgaatttttagcagatcaagctgttctcaacaaaggagcttctacgacaatatatcaagaaattcttttaacattttcttcttcaaataatccttctgaattagcaaatgcaatcaattattcatcaatcaaaaaacgatttacaattatgaaaacacaaactccatcacaaaaaatatgggtcaggaatttactgcttcttcctctactagcagttttattatttggttttagcaatcgtatcgaaatcgaaaaagaagcattaaacgataccgcagaaagtttaaaaacaggcaatgaactaattttattggtgcataaagacgaaactattgagttaaattccaggaaattcaaaaaaacctcattaaaagaggtattaaaagattataaaacatccagcactgttgttattgcttatgaattgataataggtgaaacaaattcacaattaacacgtgatattaaaaatatttgcaaagaaagtggttttgattctattcaattctatgttcaatatggtgctactttagattcaaaaaatgaaaacgaagcacgctttaccaaagattatatcaaagagtatttaagattgagtcgaagcagctggagcctcgttatctcttcttttagaaggcacaagagtcagtacaaaaaaagattaaaccaatacaaagaagaaacagcaaagagtcggaaagaatttaattatttagccagtttatggaatgatttattagcagattaccaaagtatccctccaaacgagcgaaagtcatttaatgtgactatgccagctcatcctgatgataatcaaaaaactactgcttctcaaaatagattagaggaaaaagctttgtatgccagaagtatagaccttaaaataaaaaatgatggtagttttcaggtagatgacattaaaacctcaagaaaaaatctacagaaaaccttagcgtctattcatacagatcttactaaagaacaacgtgaaaaggttattaatattcatgtttcttctcaaggaaatatttcttatcaagatctggtattcatacaaaaagttgctacagaatatggatattttagaatagtaactcctcaagaagaaattgtacgttcaaagggaaatacccctatatcagatcgtgctgactcagattcaaaagccgtatcaaaagatattatcatctttatcgattcaaaaaatcaaatattattacaaaacaatgatcaggtaattaaagcttcatatttagaaaaagggttaaagaaatttaacagaggggatttttcagaaaaagatttaaaccatagaaaaattctggtaatctcagacatcaaagctagtttagcgttcacagaaaagatagtttcaaggttatctgaaatgggctttaaaaacatttttttagaagaggccagtacctttccaaataatagcattccgcctccacctccggtgaaaagtaaaaaaatctatcaggaaatcgcaacagccaagatgatcaaagaatacaatgattacatcaaaaagatacagagacttcctaaaaacaaacgagttgtcaaattaaaagaattggaacgtattgcatacatctataatttaatgactccggaacaaagaaaaaaagtagtgaattttaaagaagttattcctccaccgcctcctgcattccctgaagctccaaaagcagacaaaaaacaagggcctggaattccacctccaccgcctccggtaaaacatgagcaaatcaaaacagggtttgtaattataaatggggaaaagcattatcgcgttacaaataatgggaagtcaaaatattataatcgtcagggagttgaagtcactaaaaatggaaaaatcctgaataatggcaaacaaacaaatgctactgatgtaattccgggacaatatatagttgctgtttatcaagatgataaaattgtaagtgagtttaatgaaaataaaaagtgatacttaagtttaagaactccagatgaaacaatattcaaaatcaatctgagtatttataaaattagaactatcaaaaaaagcctcgtgaatacggggcttttttacacaacattttgttataaatcagcgttatattaattcatctatcaaaatacgttatcatgcttaaacgcttttttattatgtgttctggtgcagacacagatattcttgacaattgttctaagggagaacaaaataaatatacaggtattggcgccactgttttttttactgctgtgatggcatttatagcttcggcttatgcattgtataccgtatttgataatgtatttactgctattttcttcggactcgtatggggattgcttattttcaacttagacaggtatattgtctctactataaaaaaaagagattcttttaagtatgaattattacaagctgctccaagaattattttagc

SEQ ID NO: 2170 - DNA, 24221 bp, synthetic construct
  misc_feature 1..24221: note = Synthetic
  source 1..24221: mol_type = other DNA
ttttcaaaaagcaagtacaaggaatgaaggacgagtacgaccgttatgtgaattacataaactctggagatatagtacttttatctgctgccgaagctatttctttacgcataaaaggtaaaggtgctaactacgaagagtacttacgtaatgttcaaaaacaattagctaacgtaactaacaaaaccaaagcacaagttggtcagttgcagtatgtaaatgacgaacttcaaaaagtaatttcttacaacgcttttgataagtataaagatggtataaatgaacaaatagattcttctgaaaatcttttaaagattattggtttacttcaagaagaaaagcaaaaattcgctaattcatcaaatccaatcgaacaggaaaaattcaaattccttgatgaaaaagaaattgaaaacattaagaaagctgatgatgcagcaaagtcattaattgatactttaaaagaagaattcaatcctttagatactataaataaaaagtttgatactgaaattgaacttttaaagtataagcttgaaaaagcaaaagatgatattgaaaaacaaaagattgtcattgctattgaacaagttgaaactaaacgtacagaagctttagaagacactccaacaaatgacaagtatgtaaatgaaattcttaagaagtatcaaactttagagcagaaaaaacaaaagattattgatgattcgaatcgtgagattaaacgaatgcaagaaaacttgcaaaaagaattaaataaaactggttctgtctctccagaaacaattactcaatacgaaaatgtaattaaggagataaagaataagcaaatcgaagctgttggtgcagtagattctgagattttaaagaagtcaaaaggttggattcaaatatttggagattattccaataagtctggaactcaattacgtaaaattcttgaccaaatacgaactgagttaaataatcccaattcaaaacttagcgaacaagataaaaaagcttatcaagatcagtttaaaggaattaaagaaaaactagaaaaggataatccttttgataatttaatagactcttttaatgtttttaaggagggggttaaaaaaggttttaaggacattgatggtagtgtaagtttagatagtattcgaggtttgattggtggtattcaaggagctattaatgaaactttaagtcttgctgaagatttaggtattaatgtttcggattcaacaaaagatgctgttcagttaggagctgatttatttaatgctggtgctgatatagcagaaggtattgcaagtaaagatcctgttaaaattattcaaggtctagcgaaagctgttaaatcagttctaaactttaatgacaagaagaaacaacgtcaaattaaacgttaccaacaagctgttgatgatttagcacgatcatttaaaaatcttcaatacgaaactgacaaagctcttggtggtgatacttacaagaatcagcgaacgatgcttgataaccttaccaagcaacaagaggagtatcgtaaaatgattaaaactgaacagtctcgtaaaaagacagatcaaggtaagattaaagaatggcaacaagcaattattgaacttgatcaatccaaacaagatttacttgattctttagcacaagacattttacaaactaatgcaaaggatttagcaaatactttaggtgatgctttagcagaagcttttggtaaaggagaagatgctgctaaatcatttgaaaaagtagctaatgacgttcttaaaaatgcaattttaaatcaacttaaaaaggaatttttagaaaagcaactacaaggggctttagataaactaaaaaaagacatgggcggtgatgacgaaggtaattttgagtttaatggactttctcaggaagaacaagaaaagtttagggaacgtttaaaagagatttctaaaaacttttcaggagcattagaaatgtatagtgatttattcaaggatttagaaatggacccgaatgaaaattctttaagtggtgctatttcagggatgtcacaagaaactgcaagtatcgtagctggacaagtaaatgcgatgagacttcttattgtagaagcaaataaacaacgtgatttatcaaataaatttttaatgcagcagcttgatagattagccaatatagatgctaatacaagaatgatggagcctttgctaaataaattaattgataaagtagataaactaggagaaaatagaagttatggattttaaatatataaaaaaagaagctttaaaaagagcaattgacaatgatatctgtgaagagtgggctgcaagaattaatcatactgttaatgtagatgaactacttgatatgtatattgaaggtatagacttttctttttcaacagagtttttatcgaatgatttctttagaagaaatttaaaaggtcacatggaacataaaggtattttcttagacgataatccaatactagaaaatgtaaaaaagatagtttgtttaggtgattcaagacttaatctaataggtaatcaatatttggtttctgaagtttttttacgagataaaactaaagctaaaatagttgctaaagactctgcttttatcatggttgatatttttgacgatgtagatttagaagtaattgcaaatgatagttctaaagtttgtgtaaacgtctataaaggagcaaaggttagttttaaacaacttgatgatagctatgtaaaaatagttaaaaagaaaactaaaacatttaaataatggcagcagtagtttatttattagataatatatctttcaaaaattacaatgttttagtttctgattcctctgggattttcgacaaaacgaaatttaaggaaggagttaaaaaagactggtccgatgaacatggttttgatgtggatttacaaaatagatttaaagattcgcgaacaatttcaatttcttgttttgttcacgcaaaatcattaaaagaaacgattgaaaaatataatgcttttttgaacgaaattgacaaaaagggtagtagacgcatatcagtaatcgttgatagtctaagaatggaatgtcaagtttttagggataattcagcagaaactaatcttatatataatgattctgatgctgtagcaacttttacgttaaatctaattgaaaatttccctgttaaaaggatcttacaatcaaaatctaagacaacaactattactatttcttccaataaagttatggtaattaattggggtgatggagtagaacaatacacaacttcatcaaatcaaaattatactcatacttatttagatgaaaatgtttattatccgattataatgggtgatttagatgctattacacaattccaaactaatgcagatatcttatggagcaaatattagttattagaccaaatggagaagagtatttgcttgaagatcgtgcagcctttagaataattaattctatttctcagaaaacggaattaagaagtaatgatactattgatattgatataacaagtagaaattttcatgattttaaaataggtgatacattttattacttaggtaggaaatatactttaaatcaaattcctagatatcaaaagaacagcagaaacgaatatcaatattctgcaacattcgaaggagtaatgtatgaccttcgtcgtgcttcttatgatgtaaatattgatactactggatcagcaatttatggagaaacattaacagctgatttagaattattcgcacgagttttaattgaaaacgctaatcgtgtatttacagataagtggggtttaggtgaaattactgaaggtacagaaacaaaaactattacattttcagaagaagataattgcttaggggttttacagaagttatgtgatgaatatgatactgattttacaatttctacagatgaaaatggtttaaataaaattaattttctacaagtaggagaagaaattcctcttgaatttaaagtaggttttaataaagggctttataatttgattcgtgaaaaagttgatagttcagatattattacaagattaaaagtttatggttctgatcaaaatttaggaacttcttatcgttcgaataaattagtgttaccaggaaagaacaaacctaattcttatattgaaagtgctgatgcaattcagcgttttgggatttatgaagcggttaaattatttgatgatatttatccgaaaagaataggaatagttgcatctattaattctgattctccttataaattctctgattcttcaatggattttgatttaaacgaaaaggatgaaaatggaactaagtatttaatcgcaggatctgctgcaaaaattcattttaatactggtgcattggctggatatgaatttgatgttcacgcttacaaccattctaataaagaatttcatatcataaagtttgcagatgaaaatggttatgaatttccatctaaagataataatgcttttcgaattaccccaggcgatgaatatgttattttaaatattcaaatgccacaaacgtatgttgataatactgaaaatgaattgcttcaaaaagcaaatgaatatctatctgataaacttgaaccaaatgttcaatattcaatggatattgatacattatacctacaaagacaattaaatgaaactgtaatagagtttttcaaagtaggagatttcatcaaggtaattgatgaagattttggtataaatcgatttataagaataaaatcaattgaaagggatttaagaaatccatttgattataaacttgtattatcagattcaaaagtttcaaatcttgtttctggaactattgctggtgaaataaagaatataaacaacattattaagattaacgaccttaataatccagcaaaagctcgtagaaattggaaagacgcacaagaggttcttaacatggtttttgatgttgaaggtgattattatacggaaaaaatcaaaccaaattcaattgagactacacatttacaagttggagcaaagtctatgcaatttaatctaattgattctttttttgaacctaatataaatggaaatccaaatatcctaagatggtcaagttgtactcttgttcattttacgattgaagaaaatataagagattggcaaataggcgcaagtacgaaaaatcttgaagcaaataaaccttactacatctacgcaagatgtaataaagataattcaattggaataattgatgttactgaatttcagtacacagttgatcaaggaaattactattattttctaattggaatagttaattcttatgataatgaaattaaagcaagagaagtttctttaatgtatggtttttctactgtttctggaaggtttatcaaagcgggtagaattgaatcgagtggaggaggaaacacttattttgatttagatactggtgaaataagtggtaaaataacgtttacaaatgattctccagcttttaatcaagttagagattcaattgaaatcggaggaaggaatttaattgagaatagcagttttgagaatgagtacaactttattgatcttcataatgttaatttcgaaagaacctcaaattatggaggtattttaccaaaatatggtagtaaatttttagtagcattcaacaatgcacaaacctattttttttattttggtcttcaaaaaattgaaattgaaaaatcatctgattatatactttctttcaattatattcttccttttagttccgatcacctgcaaataagttttatttatgataatggatatgaagctatgccaattacagaaacaactcaactttcttatgattggggtataaaaagaacatttgttaaatttactacaccaagtaatgctaaaacattatatgtaagatttgatgcttttacaatgaattggctttgcttagatggcataaagttggaaaaaggaaataaggctacagattggagtccagctccagaagatgttcaaaaacaaattactgaactagataatacaatgaaaaggattgatggagtaacttcttttctaggcactacgatagatcaaaatgtgattgcaacaggtgttttaatggttggttctgaatttcaatcaaacgcaggattaagtggattaaatgagagtggttcaaagtctgttagactttgggcaggtggaactgctcaaaacagaaataaagcagcatggaatacattggatgatggtactatgaacttctatcatcctaatgggcaaatagcttttaaattcggtttagagaatggtgtatttgcaatgaatggttatcataaagacggttacttaatgtttaaacttgacccaaaccgtggattagttaacgttgcttattctcaagaaagttggtctgaaagaaagttctttcaagtaccagttacaaatttaaacgctacagatgatcaaataagagtttacttaactccattaataactcaatctaatggaatttatactatagaacaatctaagcttaattatcaatgttgggagtatttcaatggaacaattccttcaaatgcagattggcaacagtataatggctataaatcaaataacacttccagaaccttaaatatacctaatggctggtatttgcaaaattatggtccattagaacaagattcaagctcacttaaacctgctatttcaatagtatatattgaaaatggtgttgaaagactaaatagaattatagtaatgactaatttataaataatgggaaaatttaatttaaaacaaaaatcaatatctgaaatacttagtgaagatattactgatgaacttaaagttgcttatgcttttaattatgaaaataatgaaaaacctaaggcaattaattttcaattaacaaatattaatgaacctggaaaaatattattagctggaagcttatatacagaaacaggacaatttgatttaaagacagcaaaagaaattgaaaatataggtcaaatcattgataagattaaggcttctataaacgagataaataatttatattctcaaatagatgtatcctaactttttcctaagttctaaatcagaaacctttaattaatctctgctaccataattttacatcaacattgttgcgccaataacaatgtgtatgaaacaaaaattatttactactagatttaagcgttgtctagcttatttgacgttatttttaacgcctataatattactctttacaaacaaaattaagctgactgaaaaggaacgatttgagttcttcatttcaagctttttcaaacttacgcctatagcatttttaattaattctgcttttaattggcacgctgaaaatgaatctttcttatatggtttatatgctgttatgtttattaatgcatttataggagttcttacacatcgtaaactgaaaagcttcgatataggcgagttctttaaatcaactttaataacggttgttgtagtttttggggtttatttttccttagatcaaattgataattctattccagacggtttcctttctgttgcatttacttcatctattcaaatcataacattattatacccgattgccaagataatgcgtaatagcttcattttgacgaatggaaaatttccaccagagtttttaattgaaaaactgtacaactacgaacgcgatggaaacattaaagaatttttagaaataattaaaaaagaagagtaatgcttatagattttcagaaaaaatacggattagttacggatggtgtttttggtaaaaatacagctcgtaaaattgctgaagtttttaatataaaacatccagctttattctttggtcaggtttgtcatgaatcagcaaacttaactttaaaagaagagaatttaaattatactgcagcaagattacaacaagtttttcctaagtattttcaaacttattctaaagctaaaatgtatgagagaaatcctcaaaaattagctaacctagtttatggtggacgtatgggaaatattaatcctaacgatggttattattttcgtggccgtggagctgttcagttaacagggcgtaacaattacaaggaattcgaaaattggcttattaaaaaaggattatgcaaaccaaatgagattatgttgaacccagatttagtttggaaagattattatattgaatctgctatattcttttttgataaaaataacctttggaacatcgcagatataaaaactcttacaaaaagagttaacggtggtttaaatggattacaagatcgaattaataaaacgaatcaatatgcaaaatggttttaattatcgaatagcaatgctcatttcattgctaatagttttttgtttatcaagttgcagaacttcaaaaaaatcaattgaaaaaagtagaattgaatttgaaaagaatgaagtaaagaaaaataatgttgattcttctgtattaatccaaaaggatgatgctttaaataaagttgattctttatcttggagtaattatatgaaagaactaaatttctcatttaatggagttaataataatgacgagttagaaattattaaaactgataatggatggaaatttaaaggaaaaggatttataaatggaaaatcaactgataaaaaaaatgattcgattataaaatcaaatacccatcaagtaaagaatgaagtatctaaggttaattctagatcaaaaacagaattagaatcaaataacagtcaaataacagttgacaaagaaaaagacaaattttctattggtcctacttttggagtattaatattagcattaataattattctttattatgtaattagaaggtttaaatattaaaattttatcttttaaaatttaacattataaaagataaaattatcaaaataaataactaaatttatgaatcatatgtgatttttaattacatacaacttggttaaaataagaggtacagtaagtaattactgtacctttttttataagaattaacaatttaattattttatgtaaataacaaatatttatatttacaataatcaataggtgttaatatcacttataggtttgttttttaccttaaatagctcaccttatgttgagctatttttaatataaattttaacaataattatttattaataattatagatattattatatttatgaagcaagtattattacatggattacttgtttagtttagtattggtaacccagcaggattattctgttgggtttttattttttgtaaacacatatgaagttaatatgatggttttcagactttactatttcttctaaaacattgttgttaaaattgtatattttttatacaattattaaaaaaaaataaatatattagcaacggctattcaagtagctatataggttttaggttgttgggattggttatccctcaaatcttgagagaggcactaaacctctctcttttttttctgaaaaaagtctaaaatgtttgcgtattgtttgcgtgaaattttaaaggatttttataaagaggttaaattactgaatttaaaggtattgagaagtgtgttttaattcttgattttcacaacggaataatccttattgtgagttcctttcattacaaatgtacaatataaaattatagttaagattacggaaaaccgtaattgtatatttttttattttcataaattgaaacaaaatttatatacagggtaaaataggagatataaaattactcctagaagtgatctataacaaatgttaattatataatattgtaaataatctgttgtgtgtttttaaattaaagaaagcttgttctctatactaaactctttcagaatttcattcgaactaatagtttttatgagactattcaaagtacacaataagggcgattttaattaaaaatactagttatctgataatttttatgacctatctcaaaattttgaattaaaatgataaaaaatatactcggtttagatttgggtaccaattctattggttgggcatttgttaaagagactgtaaataataccaaacaatctataatagaaaaaattggtgttagagttaatccattaactactgatgaacaaacaaattttgaaaaaggaaagcccattaccacaaatgcagggagaactttagcaagatcatcacgcagaaacttacaacgatacaaacttcgtcgtgacaatttaattaaaatattaaaagaaaataaatggattaccgatgaaactattttagcagaaaacggaaatcaaacaactttcgaaacatttaggcttagagcgttagctgcagaagagaatttaaatttaagcgatttatctcgcgtattattaatgattaataaaaagcgtgggtataaaagttctcgtaaagtaaataatacagaagatggacaattaatagatggaatggccattgctaaaaagctttacgaagaaaatttaacgccaggtcaatatgtacatgattcactaaaatctgggaataaaaggattccagatttttatcgttcagatttacaaaatgaattgaatgctatttgggaatatcaaaaacagttctatttggaattattaacagataatttaaaagaagaattaaatggtaaaggaaaaatagcaacttggactactttaaaagttcctttttctttagagagtatcaaacgagaaaagaaaagagatgaattgaagtttgaaaattatcaatggagaaatgatgctttacaacaacaattaaatttagaacaattaacgattgttttacaggaaattaatacacagatctataattcttcaggttatttgggcgcaatctctgatagaagtaaggagttatattttaatcaacaaactgtaggacaatatcaatatttacaattaaaaaataatcctcatgctcgtttaaaagctcaagttttttacagacaagattacttagatgaatttgaaaaaatatgggaagtacaagcaaaaggacgtgaagatgttttaacaaataacctaaaagaggatatacgtgacgttattattttctatcaacgtaaattaaaatctcataagggattaatttctttgtgtgaatttgaacaaaaagaaattattataaacggaaagaaaaagaatgtaggtttacgagttattccgaaatcttctccattatttcaggaatttaaaatttggcaaaaactgcacaatgtcaaattaaagaataaagaaacaaaggaagtttttacgcttaatgagcaagataaaatcatgttgtttgaagagctaaatttaaaaggaaatttagctgctgataaagtattagctcttttatatgacaaaccaaaagaatgggaattaaattataaagaattagatggtaatcgtaccaatcaggctttatacaatgcctatctatctattcttgataatgaaaagtgcgatattagaggagcattaaaattaaaactaaacaaagatgaaattttaattaatgatgtagaaattccttcttttgagattaaagcattaatggaatccatttttgaaaagaataatatagactcttcagtcttaagttttaatgcagaattagaaggaaaggaatttgaacaacaatcgtcttataaattatggcatttgttatatgcttatgaggaagatgattctttaacaggaatggatactttatatcgcttgttaatgcacaagttcggtttcgaattagaacaagcaaaggttattggaaacatagcttttcaggatgattacggaagtttaagtgctaaggcaattcgtaaaatattcccatatataaaagaaagtgaatatagcaaagcctgcgagtatgtgtctatagaatataatttgcctaattatcgttattctaaaaattatttatcaaaagaagaaatagataaacgtgttttaaaagagagattagatgttttatcaaaaaatagtttacgaaatcctgttgtagaaaaggtaatgaaccaaatgattaatgtcgtaaatacattaattgatacagagaatgataaattagaagaaaaggggaagccaagagattttcgttttgatgaaattagaatagaattagctcgagaacttaaaaaaagtgcaaaagaaagggaagagcttacaaaacaaattaattctgcaaaattagctcatgataaaattgtaaaaattttacaaacacaagatggaataaaatttcctactagaaatgatattattcgatataagctatatcaggaactaaaaaataatggatatagggatttatataccaatcaatatataaatagagaagacatttttactaaaaaatacgatatagatcatatcattcctcaatctcgtttatttgataatagcttttccaacaagacattagttcctcgaaatataaatttagccaaaggcaacaagacagcttatgattatattttagatgtttttggaattgataaattaaacgaatttaagaagagagtagaagctttatataacgaaaaagaagatggaatttctaaggcaaaaaataaaaaattgctaatgacaggaaatgaaattggagaaggttttatagagagagatttaagagattcgcagtatatagcgaaaaaagcaaaagaaatattatttcagattgccaaaattgttgtctctacctctggttctgtaagtgatcgtttacgtgaagattggggattagtaagtttaatgaaagaaattaatttagaaaaatatcaaaactctggattaacagaaactcagaaaacaaaagatggacgtttaaaagaagttattgtaggttggtctaagcgtagtgattacagacatcaagcaatgaatgctttaacaattgcttttactaaatgcgcatttattcaatacttaagtaatttaaattctcgtaaaaataaagatgctgaaaagcatgaaacgattatcgaaatagaaaaaaaagaaacacattataaggttgatgagaaaggcaataaaaaattggtatttaatgagccaatgcctaatttcagaaaagtagcgaaacaacatttagaatctgttttagtctctcataaaccgaaaaataaaattgttacgagaaatataaataagataaaaggaagcgataaaattcaaattacattaactcctagaggacaaatgcataaagaaacagtttacggaaaaataaaacaacctgtaataaaggaggaaaaagtttcagcaaagtttaatgaagaaacaatacaaaaagtttcaaatccaacttatcgagctttattatttcatcgattaaagaaaaatgattatgatcctaaaaaagcatttgcaggtaaaaatacattatctaaaaatcctatcttattagaagatggatcacagttacctgagaaagtaaaattaacatggttagaggattattatactattcgaaaagaagttagtccagatttaaagctagataaaattattgatgaaggtgtaaaacgaatattgcagcaaagattaaatttgtttaatggagatgcaaaaaaagcattttctgatttagatcaaaatcctatttggttgaatgaagaaaaaggaattgcaataaaacgtgttactattttaggtgtaaaaaatgcagaatctctacatgtaaagaaagatcatttaggaaaagaaattttagacaacgaaggtaattttattcctgtagattttgttaacaccggtaataatcatcatgtggctatttatgaagatgagaaaggaaatttacaagaaaaaatagtttctttttatgaagctgtagcaagagtaaaccaaaatttaccagttgtagataagcagtataatcaacatttaggttggagctttaaatttacaatgaaacagaatgaaatgtttgttttttcttcggatgattttaatcctttagagatagatttactagataaaacaaatcaaccattaataagtaaacatttatatagagtacaaaaaattgcgactaaagattatttttttagacatcatttagaaactaaagttgatgatgtaaacgaactgaaaaatataacatggaaaagagaaggtattagtggagttaaaaatataataaaagttcgcacgaatcatttaggagatattgtagaagtaggagagtattaaaaataagattataattgaaaattaaataattagtttaaacaacttcagtttatagaaatcaaaaaaatccgataataaattactttactatcggattttgtattttttactataatgttctttatacttataatttaaaaggttttaaatataagatttactactcttttaaaaagtaataaaatttaaaaggaactcacaatcacaaaagaaatgcgataaaaaaccttgtagttacaattacagtataaagttgtaaaatttgaaaggaactcgcaactataagccgttttgttaaattttaaaattattgtatttatttagaattgtaaaaattctaaatatcccgttcgagtttttaatgaaaggaactcacaacggttagtaatttatttagcaatatgctcgtgttgtaactacacgtataaaattataaaaaaaatagaatgttatatcaaatttttaattttttttattgaacatttaatttaataaactaattaaatgttttagattatctatatcgtatttaaacgctttaatgtgtccaggtattttactaaaaataactccactgtaatgtgtaatgacaatgtgtttattatggctgtaataaaaataatcaccaccacaattattgtcaaactccttaaacccaagatttagtaattcttctttcatagtgcttcaattttaactgtttatgtaaatatctgttaagcgaataatcaactattataccatttgaattaaaaaaataaaattaaattaacgaaaatagtgttaaatttatttcattgttattttgtcccgaaaataggcgctctcatgaggatttttaataataaaaatagcgtcacaaaatagtcttatttattttatcaatagtagttctataaattgcgataaaactatccctatatttgtaagagaaatttaattattccaacttaataacaatcaaaataaaattcacttcacatcatgaaaatattattgtcgccagctaagatgatgaatcttcaaacagaagcaaaatggaaagctacaacgccacaatttttaggacattcacaagagattatggatgtaatgaaaaaaatgaatgcaacagacttagaaaaattaatgaaaatttctaaagaaattgctgaaatgaatgtagagagaaatcaactttggagaccaaaaccattggcaaaacaatctattcctgctgtatttgcttttaaaggagaagtttacagaggcttagatgcagaaacattagacgaaaatgcgatagaatatttaaatagaaatgcttttttactttctggtttatatggcatacttcgccctttagacaagattatgttatatcgtctagaaatgggatctaaactagatgtaaatggatctaaatatttatatggtttttggaaaaaagttttaactccattttttaattcaaaactaaaaagaggagagtttatattaaatctagcaagtaatgaatatgtaaaagttttggatgttgatgccttaaaaattccaacgattgatgtagagtttcaggattacaaaaacggagaattaaagaaaattatgatgtattttaagcacgcacgtggcgcaatggcgagatattgtgctgtgaataatgtacaaacattagatgaggtaaaagcgtttgatgtagacggttatcgttatgatgataacctttctacaaaagacaaattagtttttacacgatagttttctttaaaaaataattgatataaaagactacttttagtggtctttttcttatttttagaacatatatgatagaagatattatacataatttacccattaaaattatttactctttcgaatctttgattaaagagctagaaaactctgactataattttggagaatttaaagcttttttagagtacataaaagaaactaaaccagctttaatacatggtgtagataatttcgatgaatttgagcaattaataaaagatatagagccaattattgataaaataatacctaaaccactaacaaaatataatttaaaagccataacatttcctttttctaataaatttctttttaaaacagaacgacttaaagaattattggatcaaaaagaatctagattaaaatttaattttgaaaatatagattacgaaactttatataagttttgttgcacattcattttatctaaatattataacattaatttagatttagaaatctctaatcaattagaaatagagaataaaaatggttacataacttatttaggaactgatataaataacgattatttttctatttatccttctgaaaagaaatatgaattgacagaagaggaggtagaagaattattaaataattacgaaaatacagcgctttggttagaaaaaattcctgtaggttcttggattgcaaaaggatttaatttagtttccttttttgatcataccacagaaattgctctgtctaatttaaaaacgaaattaatatcttatggggagccatttgatgctttgaaaactgatattgtttcagcattaaaatctgtttttagaattaatgatttacaagttggtttttctgcttataattccgataaagatcaattggagataagcaatttaaatcacatgaatgtcagtatgattttagatgataaaaatcgtcttaaaatgaatgagatttgttgtgctaatttaaaaagtaaaatttcttcatcagatttttatgttgtttcgaatgtagataaaatgctagcaaaatttcctgacgataaaatgttgggaattattaaagaaaaagaaatacaaagtttaattctttatccattaaaaaataaaaacgagtgtttaggaattttagaattagcttctaaatctccaggcgcatttaatcgtattaatgcaaatgttttaaaagagattacaccattattcgaagaatctatttatcgacataatgtagagttagaaaatcaaattaatgcatttatacaaaccgagtacacttcattacatgccagtgtagattggaaatttagagagaaagcgatagattatattacacatgtaaccaatacaaaacaaaaatctcaggtttcttttctaaatgtctatcccatgtatggagaaatagatgtaagaaattcttctgttattcgaaatgagtgtatgaaaattgattatcaaaatcaattaaatttcttgatagaagtttgtcaagaattatacaaaagaagccagaaatctaaattcttaaattatattgatacattagaagatttcttatcgagaatagataatgtagataaaatttattttgagacagagttgtttgattatattaatttaaatatacatccagaaattccgaaatatgtacatgataatgagaagtctgttatagcaaaatatcttaaaaaattagataaagtaacaggtttgtattatgttgaacgtaaaaagtttgatcaagctatacagactataaactctttactgtctaataaattagatgtattgcaaaatgaggctcaacaaatttttcctcattattatgaacgatttaaaacagatggaatagattataacttatatgtaggtagaagtatttctccacaaaaaaagtttaattatgagcatgtaaaaaagattagattttggcaattacaatccacaattttgttggagcaattgtataaaatgtcttcaaataaaatacctttgaaaattgaagttgcctctttaatatttgcaaccaacacgacactagatattttgtttaagttagatgaaaaacgatttgatgtaaatggttataataatgccaaatacgaaattgtaaaaaagagaattagtaaagcatttataaaagatagtacagagagggttaatcaaccaggcaaaatttgtatcatttattcagaagatttattaagagaagagtatacaaattatattaatttattgattaaagataatttcttgaagaatgatatagagtatcttgaagtaaatgatttacagggtgtaaatggattatttgcaattagagtttctataaattatgagcgtgatataccacaatgtacagaaacagaaatagaagtagaattaaattgataaaatatatatgaacgatacagtattattaaatatgtctctagaagctaatgcagaagagatttggaatgttttgacgaatgtggatacatttaataattgtttcgataatacatctatagaagtagatgaatttaaatcaggtaatgtggttaaatttgttacagatgtaaatggagaaaaagtaatagatgaagcggctataagatcttgttatacaaacgaacgtttatcttatggttataaaaaacaaaatacaacgaatgaaatagacgtttcttttacattaaaaccttctggtaattttacttatttaacaatagaaggaagaaatttttcggatgatttcgatcgatctcattcagaaaataactggattaatatgatgcaaggaataaagaaatacattcagaataaataaaaaaaataaccttcaaaaaattgaaggttattttttttatcttaatattctgtttaaaatccgaaattaaatccgaatacaactcgacctggatcttgtcctttaaagtatgaaattgttgcagttacagattgtgctccatttaaccaaattccaccaccagtagaagtatgccatttattagagtcttctccttgtaaccatacacgtccataatcagcaccaacaaaaacacctaatctcataggaacaatcgctttaaagcgtaatgcatcgtaacgcaagtcagaagtttgtaaaaagactttatgacctgtaaaacgtcctaatcggtaacctcttaaatcttggtcacctcctaagtttgccatttggtaaaactctataaaatctccccaaacagcttttcctttcaacatagacgcaatagttaatctaccattagcagacactttgtgtgtaaatcctaaattaatttctgtataaaaattattacgttgaaattctgctaaattagaaatccattttgcatttgctaaaaatgtcattcctaattttggtaaagactcattatcataatttctgaaagtatatttagcaccaacttctccaaagttttgtcctttaaaaacttctctataaatatctacattttcatttccaacaatacgatctaaattttcttcaatctttttgtaactataagttgcagaaaaatctaatcgaccattgttatttaatattttaaatatagatggaccaaaactataactttctaaacgaacacgattataatccattcctaatcgtttttgttcattaattgtttcattaccaaaaccaaagaaattcgtactaaatgttggactagtatgtgtagcattaatatctaaattccattttccaatagcttttgtaaatgttcctttgtattttgcttcccaaccaccagttgcaaaaaagtaatttaattgtaagttatgacgttgagagtaaggtttacgatcaaaaccattaactgtataagtaggcgataagcctatttttacaccatcatctggattataaccaccatttggtagcattgtaaagaaattatattttggttgtttataatcgtatgtgttaatttcataatcatcaacaaagttttttgctgttaaaaaactagattcagctgcatcgccaccgttcgcataatcataaatttttattctagaagaacgttttacttcatacgtatcatcatctacacctccaataattctaattaaaatagcttgtgttggtttaccatcaactttaaattgatcttttccatttaaaccatataatctaatttcttttgtttcttttttattaaaatcctcatcaaatattaatgtatcattagaatagattttgatatttgtttttccttttggataacgagtaataataaaattatcatccttatctgttccttttaaaacgacaagacgtctaagtgttttattatattcctcagcaaatttttccaatttagctttacgcttaataagattacttataacctcatcatcatattctcttttggtttcttcaggaattaattcaaacgattttctgatatagtcatccgttaaatgctcttgtatgtatcgtgcctgttttttccattcttctaaattagaagattgtaaaatggctaaatctaaaggatatggttctctgttaaaccacttttcactttttatatcatctttaaaatcttgcatatgtcttaatgcaggaattctcataattacattaaaaagcaaaccatcatatctaggaaatgcttgatctctatctctaggaataggtttatatacagttagtttatcattcttataaactccccatctccattgatctgcatgtctatcccaatcaccaattaacatatcaaataaacgagctcgcatataagcttctttatctacacttactttcgtatttttatgtatagctgcaagcatatcatctgtgcttacaatgttttttggaaagccaaatataccatccttaaaactagacataggacgctcttcgatcatatataattcatcaccaaaatgttcattatattcgtccaaagcttcttgttttggtacataatataattttggtgttgcgtgcataatatcaagaggttccattaaattagcaactgttaatggataataaggatgatttgtcgtgtaaaaatccattaagaatttttctgtaaatgatccttcaaattcatttgctatatatttattcttaaaggcaacttgctgaataaattgtgtagcacttttcttaacagaacgcatattatattcttgtcctttgttatctgctaagcgtaaacttcttgtttgatgtcctccacccattctaataggagttaatcctccatataaattttctagattaactgtattagcagatatttgctgactgtaaatatcacgataatgttttcctaaaaagaattcataagatttagatttttctgtcatcttagttggataaacagaagtctctttttttgcaggcatgcgtttatcatcataaacttttgccaagtatactttctttttttctgtaacttgtttagataataaaagttctggatcattttcggcaaatttgtaaaaatttactttagatgctccgttatcataaatgtctaaaactgcatatcctttatctccgtaagaaaaatcgtttttaccaactgcttttgcagattcattttcagaaccagatccactaataatttgttttacatttctattttgaatgtattgtaaattatgatcatgaccagaaactacaataacattgtctctgttctcaattaaagtagctatacgagatgcaagttctctatatctaaaattatttacatcttgtgggcttaaacctgttgtacttctcaataaattaataaatgaaccgataacaggtaacggaactttaaatttatcaccaaaaggataaagctgttttttgaaatcatattgccctccatgttttccgttagaaaataacggatgatgcatcgcaataacagttgttttattttgtagtttatttaaacgagattctaattcctcgaagaaaccttctctcgatttaatatcacatttttcatttatttcaggatgattgtcccaattttgcaaataccattcagaatcaattaaaacataacctatactatcatttacattaatatttgttataggacaagcatcttttggtaaaaaagattttttatcgtctaattgtttttttatgattttttcttgttctttaagacctttcattccatttttccaatcatcatctcctggaataaaaatagtttgtcctttaaagtcttttgctaaatctaactgaatttgtagtttttctctacttgttgtataagccttttttgtagaatctgtgacaattccgttctctgatacattatctccaaggaaaaataaataatcgttagaatcagcttttttaaattgattctttaaaatatctatattcttcttgttgccatttgcatctatatttccagcatcacctattaaatagattgactgaatctttttaccctcaacttcttgtattctttcagttcttatattttttccatattgggaatggtttgtagcacaagatgacatatagaaaatacctactagagcaagaaagggataatgcaattttttgttattcggcattggaaataatttcatacatttaaacattaaaaacttataatgaatcaatcattattaaacatagaaaactacgttttcaatctcttcaaagataatctttctttagactttacgtatcataattttatgcatactgtaaaagttgtagaagcaataaaaaacttagcttcagaagaggctattactgacattgaaaaagaaaaattaataatagctggctggtttcacgatactggttatacgaagtctgtagaaaaacatgaagctgaaagtatagcaatagctagagagtatttaagctcatttaattactcggaagattttatacaagatatagaaagatatattaatgctacagatgtgcattacgaaccaaaaaatattgaagaagctattataaaagatgctgataattttcatttaggacaagaagattatccaaaaatatcagaacttttaagaagtgaaatttttaatatctgtaaaaaagaattttctgactatgagtggcatctacaaaatagaacttattttcttaatgttcatcattattacacagattcagcaaaaagaaattggcagagtgggaaagaagataatttaatttacactcaaaataaaataaaagaaatagaagctgttggtgaagggcctaataaatacgaactaaaaaagagaaaagccgacaaaattcaacaaccagatagaggagtagatacactttttagaataacacttaataatcatacaagacttagtgatattgctgatagtaaagcaaatattttattatcggtaaatgcaattgttatttctatcgctttatctactttaattccaaagttggctagcccaaaaaatgaatatttacttttaccggcaattataatgcttctttctagtgtagcatccatcatatttgcaattttagcaactaaaccaaatgttacatacgaatcttttaacgaagaggatgttaaaaacagaaaagtaaacttgttgttttttggtaattttcatcaaatggctttagaaagatacgaagaggctgtacaagagttaatgaaagatagagattatttatataattctatgacaagagatttatattatctaggtaaagtattagaaagaaagtataaactattaagtattacgtataccatttttatgattggtacaattttatctgtattatcttttgcatacgcattactaacaaaccttaattagatttttttaattcatacaaatgataaaaagtgaactaaaaagtaaattcattgaaggtatttttttttctaatttctttttgattttactctcttttgcgcttaatatagaaactataataaagattggattaccgtttaattctttagaatattatatgtttattacttcggcaacggtattattttatctgtatgcttatcgtattccaaaaagtattaataactcaactaatttaaggacattattttacgtaaataatagaaaatttataaaactatttacaactattttattaataatttgtgtgtattctagtttagttttatttggaaaaagtttctctaattttgatttaatttcatggaaatggacattaattttagtttttacagcattagttagtataggttattatgactatcagataggtgtatcattaagaagag

SEQ ID NO: 2171 - DNA, 24218 bp, synthetic construct
  misc_feature 1..24218: note = Synthetic
  source 1..24218: mol_type = other DNA
aagtctccaaaaaagtttatatttgcattccaacctaaaaaatcattatagatgaaaggacaaaataaactttttatagcaatattactagggcttattataggaatcggattaggcggatttgttcatttgcaatatccagatagtgcagaaggcttttccaaaaacataaaattgctagggaccatttttatcagacttgttcagatgattattgctccgcttgtattcaccactttggtagtgggtattgctaaaatgagtgatataaaaatgataggtagagtaggtactaaagcaatgttgtggtttttaacggcttctttagtttctctaatgatagggcttgtatttgtaaattggctagaaccaggtaaagtaactcaactcccagtacaagatgcaagtgcggcggcagaaatcgtaaataacagtaaaggcttctcactagaagattttgtaaagcatattattcctaaaagtttatttgaagcttttgccactaatgaagtattgcaaatcgtagtattttcaataatgtttggggtgtctctttctcagttaggagaagctcattccaagccaattatcaaagcctttgatatttgtgcccacgccattcttaaaatggtagggtacattatgtgggtggctccattaggagtattaggtgctattgcggcagttgttgccactaatggttttgagatatttatggtttatgccatttacctcagagatttcttttttgccttagctattctgtggttagttttgtgtattgtaggctatttaattctcggcaatagattgtttgatttattgaaaagaattaaagagccattacttattgcattctcaactacaagctccgaggctgtttttccaaaacttgtagaagagttagaaaagtttggtgctaataataggatagtgtcatttatactccccttagggtattcatttaatcttgatggaagtatgatgtatatgacctttgcatctatctttattgctcaaatttatggagtagatatgtctattgggcaacaaatcacaatgcttctggttcttatgcttacttccaaagggattgcaggtgtacctcgagcaagtttagtaattattgtagctacttgttcgatgtttggaattccaccagaaggcattgctcttatattaccaatagaccatttttgtgatatgggaagaagtatgactaatgtactaggtaatgcactagcgacttctgcagtttctaaatgggaaggacaactagaagaacctacagaaaacatataaaataaagcaatttacaacaaaataaatccttaaatttgtatttctaaaaagaaaagaatgataaaaaaagatagagtattagcttttttgaaagaggtggaggtagatgatttggtgaataatgtccaggttatgggtaatgacgtctatattgatatgacggcacattctccagcaatgcacgagaaaaaaaagctagaagccgcaatgaaacaagcctttgcttctgaatttggtgaagaggttattttaaagttgaaaatcgtttctccagagccttcggaagctcagcttaaccaaatcaaaggaaaggaaataccaggtattaaaaatatcgttgctattgcttctggaaaaggtggtgtgggaaaatctacagtagccgctaatcttgcgatatctttagttaaaatgggctttaaagtaggtttactagatgccgacatctatggtccttctgtacctactatgtttgatacagaaggacaaaaacctatttctgttgaagaaaatggcagaaacctaatgaagcctattgaaaattacggggttaaaatgttatctattggttatttctctggggctaatcaagcggtagtgtggagaggacctatggctgcaaaagctcttaaccaaatgctaagagatgccgcttggggtgaattagattttttattgatagacctacctccaggaacaggggatattcatctttctattatacaagaagtacctgtaacgggggctgttattgtaagtacgccacagcatattgctctcgcagatgttaagaaagggattgcaatgttccaaatggaaagcatcaatattcctgttttaggcttaatagagaatatggcttatttcacgccagaagagttgcctgataataaatattatatctttggcaagcaaggagcacaatatatggcggaagatttgggcatacctgtactaggtgaaattcctcttatccaaagtatcagagaagcgggtgatgtgggaagaccagcggctttgcaagatgattctaaaattgcagatatctatacagaaaccactcagaaaatggtggaaagtttggtagaaagaaataaaaatttgcctcctacagaagccgttaaaataaccactatggcaggatgttcccaaaaaaattaattaccatattatatttttaaagagttaaaataaagatggaaaataatagtatagaagtaagagtagaaaatgctttagaaagtattcgtccttttcttaataaagatggtggagatatagagctcatcaaaatagaagacactgtagtctatgtgaaattactaggtaactgctctgggtgtcctgtaagtttctccacaatgaagctaggcgtagaaaatacagttaaagaaaaagttcctgaaattacacgagtggaaaatgtagaatagtttataaattataaaaaaggcttatctaatttattacagataagcctttttgttttgtaatttaattcttgttcttcacatccatataataaaacattggaatgatgagcaataaaattataggttgaataacaaacctacgaacataaaaagctaaaagcaatcctgagtcaaattccgtataaactagatagagatagataggaaaagtaatcaaaaaaactaataacattaaaacacaagctaacattgtctttgttttatctttaaaaagaaaataaacaatgattagcgaaaaaaataaattaagtatcagcctaaaaagatgtcctgaaacaagttttccccactgaaaaacggggaatactttggctccatccatcattttgaaatagattaaaaaaggatcataaaatagagtttcttctaaaaaacgaacccctattaaaccaataataccgagtataacaaatacaagattacctttgaacttcatctttcagtacaaaaaatttaatccaaataatccataataaaaccacacttccgtaaataatcgcagggaatatataatcatgggcagctttaccataagatggatattcaagtagcactacatttattccaacaatcctaagtatgtttatgatatacagaaatataactcctgcaaaaacaaaaataaaagtcttaaaacctctataaaatgcaaaaataaatgctataaaaagtattattacagatacagcattacaaccttccaccattctagacacatactcctcacctacataataccacaaagtattatgttctggttgaggtatggcttgtgatggataccctatgttattctgtatcaaagtacattggttggctatatgtattgacaagccatctaaaccttcttgagtatttaaataaaactgataaactcccagcaagactaaataaactaataaaaatcttaataggatttttagtgtgggtttaaaatcttcaaacataaagggcaaaggtaatgaaataacttattattaaagaaaaacctctaaaagttggaaaataaaaactttctagaggttttgtgtttctgttatggtaatttttactacgaattttctaacacatattggaacataagaggtgcacaaatcgtagcatcactctctacaataaatttaggtgtgtctatatccaattttccccaagtgattttctcatttggtactgccccagagtatgaaccgtaagaagtggttgaatctgatatttggcagaaataagaccaaaatggaatatcatgcatttccatatcttgataaagcattggtaccacacagatagggaaatctcccgcaatacctcctccaatttggaagaaaccaactcccttaccaccacagtttttagtgtaccaattagctagataagtcatatactctatccctgatttcatcgtagaaggctttagctctcctttgatacaatagctagcaaagatattccccattgtagaatcctcccaacctggtacaacgataggcaaatttttctcagctgctgctaacatccatgagttctctttcggtatttcatagtactgctcaagtacaccagataataacattttatacatatactcgtgagggaaatatctttctcctttcgattctgcttctttccaaatttctacaatatgtttctgaagtcttctaaaagcctcctcttctggaatgcaagtatccgttacacggttaagacctctctctaataaatcccactcttgctgaggtgttaaatctctataattaggcactctctcataatgagaatgagcaactaagttcatcaaatcttcctctaaattagctcctgtacaagaaatgatttgaactttatcttgtcttatcatttctgctaaaatcttacccatctctgcagtggacattgctcccgctaaggtaatcatcattttaccaccatcttttaggtgagctacatagcctttagaagcatctactaatgcagcagcattaaagtgtaaatagtatttttctataaattcagtaatcggtttactcataattttttatttatcgcaaatataaggatttttagatttatacctatctaatctcatttacttaaaagtaaaaagtcgaagtataaacttcgacttttttatcttattactacaattattgattggtaaaaatcaaactgttaatatttgttacttactgccaccaaacaatccacctaatagaccgcctagtcctccactttgttgtttgttgtctcctccgcctaagacacttcctaaaatatcattcagcggattaccgcctccttgttgtgattgtccaccacctagaacacttcctagtaaatccgtaagaggattacctccaccaccttgttgtgcctcctgagaaccttgtcctaaaatgcctcctagcaaatccgaaagtcctcctcctgaagttacattattttctctcttttgttttcctatatatcccataataacaggagctaacatcgccatcaaaggacctattttatccatagaaatccctgtattttgagaaagctgattctccacagttgattttttgtctccgaaaatatgacttagaatgctattaccttcctcttgtctattttctacctggcttacatcatctaagatgctaccgtcgtggtctctttctaaagcattattaagagcctcagcttctttttcatctttagatttatttctaaggtaagaaattaccagtggtgttgccactaccaataaagccataatttgacttttgctaattccaaactttgattctgctttttctgctacttgtgttcctgggtttcctgtgataaggtctaataaactcattttaatttaaatttttatattgttttgtaacctatcaaaaaccattcctaatttttaaatataggtacattactgcatgcttccccgaacatcaaagatttaacaattggctttaatttttcaactaactcaatataagcattttctggaatattttcatctgtacaaccttttactaaaactcttttatcttttagattagaaaaatcataatcatttagagcttgatgcataatgagtagctctaactcatctttatcaccataaattaccttcttagcaactccagataattgagatgcaatcaaaaaataagcccacaaagggacaatggcttccgcagagttatagatgtaaacataagcatctttatatgagtctaactctagccccttcactttttctctgaaatctttttctttgagaaccaattcttggaataaaaatggtttcaaatctatccctaaccttttccctttaggcactaaagaagataaatcaaaattaactaatccgctttctgcgactttatttttaatctctgacattgcttttataaatgagtttagcccatcaattatttaaaattgatattatactttatgtttttgtagtcgtctagacttgcttttaaagagcctaccgcaagctccgcttttagttccacggggatatgattagcatcgtttgttacccacattgttactccttcttggtctttaaatactcttccactaattaccgaagggataattttaagacattctaccttaccaaatttggttcttttggtttctacacctgcaattctcaactggaaaggaaacatctcatcgtcaatccatacattcatttttatgcttgttcctacttttaatgcagaattatctctacttcttaagtagtagaaagcggaaagcatatcttgtatgcccttgacagattttagagttttagaaccattagatggggttttcttatcggttaaaataagtgtttggttagaatgattaaaaactgtctctaaatgctgtctataactaccctcttgcacatttcgtacatagaaactaggtaatgcagtgctgatattgatatagctttcataaaggtcttctaccttgaagaaagcccttacagctcctgtggttttacctgtgccttttacataataatgaggctcgcctttataggttgtctccttaatattaagtgtagcatagcctgcgtttaatattccataatgaattctataagtcaaagtttctccagacttaatattagtaatttgcgaccacaaacttgccgaaattacaagagtcattaaatataatatctttttcatacttttaaaatttacaaatactttgccaactcaccctataacattatggtttatataactaaagttacgatatagtttcaacaaaattagtacatttgcaaagatatataatttaattccaaagttttttacatattatgattactacagatttactcattataggagcgggacctacggggctttttgccgtttttgaagcaggattattaaaacttaaatgccacatcatagacgctttgccacaacctggtggacaattagcagaactttatcctaagaaacctatttttgatataccaggctatccatctgtaaatgctggagagttggtggataatttaatggaacagattaaacaatttcaaccagggtttactctagcagaaactgccgtaagtctagaaaaaatagatgatgaatggtttgaagtaattactaataaaggaacggtacaccgtgctaaagcggtagcgatagcaggaggattaggtacttttgaactaagaaaacctcttctcgaaaacttagaaaaatatgaggaaaatggtgtggaatattttgtaaaagccccagaagtctttagagataaaaaaattgtaattgcagggggaggagattcggctttggattggagtattttcttatctaatgtagctaaagaggttactttggtacacagaagaaatgagtttagaggagcgttagattctgtagaaaaagtacaagaactgaaaaaccaagggaagattaaccttgttacacctgcggaagtggtagagcttaaaggtgctaacactttagaaagtattgtgatagagcgtgagggtgagaaaacagaaatagagacagattatttcattcctctttttgggctcacaccaaagctcggtcctattgctaattggggactagaaatagagaaaaactctataaaagtaaataacgctctagactatcaaaccaatagagaaggaatttatgctattggagacatcaacacttatcctggtaaattaaaactgattttatgtggcttccatgaggcaactttaatgtgccaaagcgtttacaacaggcttaatcctggtaagaaatatgtgctaaaatacactacggtgagcggtgttgatgggtttgatgggagtagaaaagaggcagagaaagcggttgttaaaaaaatagactaaagattatggcagatgttcaattaaagattactgatagagagggcgtacagcacgatatagtagcccctacagatatgtctatgaaccttatggaggtgataagagcctacgaattggcagaggaaggtactgtaggtgtctgtggcggaatggcgatgtgtgcgtcttgtcaggtttatgttcttaatgatgtgcctctacctgaaaaaagtgacgaggaagaagctatgctttctgaagcttttgatgttaaggataactcccgtctaggctgccaaatccatatcacagaagagattgatggtttggaggtggagatagcaccatattcctaaaattaaaataaacgagaggtagcttaaaacctctcgttttaatttcttatagaaaaggttctttagtttctttgaactcttttatgagtctttcaaaaacttcatctactgagatgatgtcgtctataagtgcggaaacttgtccaatttcaagttcgccttcatctaaatcgccctcaaacatacccttcttggctcttgctctgcctaatgcttgttttagagcttctgtatcccttctattttcataaagtttttctaggtcgtagaagaatttgttttttagcaatctgacgggagcgagttctttcaaagtaagctgagtgtctccttctttagcttccactattttctgtttaaaggattcgtgagaacttgcctctattgtagcagcaaatctagagcctatttgtactccgtcggctccgagcatcattgctgcttttatctgttgtcctgtagcgattcctcctgcggcaataaggggtgtgctaatatgtttgctcacattaggaataaggcagaaagtggtggtctcgtctcttccgttatgtccaccggcttcaaatccttcagcaacaactgcatctacaccagcttcttcacattttattgcaaattttagagaagaaaccacgtgagctacttttatgccttctttttgtaaagtttcggtgtaggttttgggatttcctgctgaggtaaacactattttaatttgctcctccataatgatgttgatgatttcatctaggttaggataaagcatagggatattaacgccaaagggtttattggtagcttttttgcatttttggagatgttcttttaaaacatcagggtacatacttccagcacctatcagcccgagacctccagcgttagaaacagcagaggctaatcgccagccactatgccataccataccaccttgtatgatagggtattgtatattaaaaagctccgaaattctatttttcatatttttagttattgggtttgggggataaagttacaaaaattgaggttattttattaaactgatttttttagaggaggatatataataaaaaaacgaggtgctgtttcagcccccgtaataaatgttttcacaacggaatgttccttattgtgaattgctttcagcgacaaatttagatataaatatcataatgacaaaatatttattaactttatatgctgaaaataaacagtaattcacaaccaatcaaagacatatgataaattatggaaatagaaaaagattatctcctacaagacttaagaagaagtttggacctccttctcaaaagaagtgccattctccccaataaggattggagcccttatttctatggattatttagcttctttcatcaatttcttttacaaagatacaaagaataattgataatgtctttgattggaatttgtttttttttgtatgtttgtaaaataaaaattattaccatctgaaaaacagtatattaaaaatgaaaacaatattaggattagacttaggtaccaactctataggttgggcgttggttaaagaagcagaaaattcaaatgagaaatctgaaattattaaattaggcgttcgtgtaaatcctctaacagtagatgaaaaaacgaattttgaagcagggagacccttatctaccaatgctgatagaacagctaaaagaagtgcgagaagaaatttacaacgctataaactcagaagaaaaaatttaatagacttgttgattaaaaatcagctgattgataaagatacaccactaaccgaaattggtaaaaataccacccatcaaactttagagttaagagccaaggcagcgagagaacgaatagaattagaagatttagcccgtgtatttttagcgattaacaaaaagagaggctacagaagcagtagaaaagtaaataatgaagaagaaggacaagcggttgatggtatggcagtagctaaaaagttgtatgacgaaaacttaacgccagggcagtacgcctatgaattgctatcaaaaggtaaaaaatatgtacctgatttctaccgttcggatttacaagcggaatttaatgctatttgggaatatcaaaagcagttttatgcagatatattagatgacgaattatataatgccttaaaaggacaaggacaacaaaatagccgaaaaagatttcttgccattaaaggggtttatactgccgaaaataaagggaaaagagatgatgtaaagctacgacattacaaatggcgttccgaagctatttcaaaaaaaataaatatagaagaagtagcgtatgtattagtagaaattaataatgacctcaataaatccagtgggtatttaggggcgatttcagatagaagcaaggaattgtattttaataaagaaactgtaggcgaaaacctttggaaacaaatacagaaaaatccgcatacttcactaaagaaccaagttttctatcgtcaagattatttagatgaatttgagcaaatttgggaaacacaagctcaatttcacccacaattaacacttgccttaaaggagcaaattcgtgatgtgatcattttttatcaacgaaaattaaaatctcaaaaaggtttattgagtttctgccagtttgaaagttgggaaatagaacgaaaagatgaaaatggcaatgttattctcaataaaaccacccaactacccaaaaggcagacggtaggtaggcgtgttgctcctaaatcttctccgctatttcaagaatttaaaatatggcagaatatcaataatttagaggtgacaaaaattagtgagggagcttcaaagaataaaaaggaaacagagactttaagtgatgatgagcgaaaattattatttgaagaattaaatctaagaggaaatctctcacaaaaagaggtgttacaaattttaggtttaaaagataaagaatacaaaacgaatttttcagaaggtttggaaggcaaccgaaccaatgccgctttattcaatatctatcagcaaattgcagagaatgagggctatggatttgattggtctaaaaaatccgctcaagagattaaggaggaattaaaagcagtatttccacaaataggtattcaggctgatattttagactttaatgcaaatttagacggaaaagaatttgaaaatcaagcctcttatcaattgtggcatttgttgtattctgccgaggaagatgataaaatcaacgaagaagaccaaatcatttacgggaactctgcagtcagtttaaaaaagaaactttgtgaaaaatttggttttactcccgaatatgccaaatggatagcgaatgtttccttgcaagatgattacggaaatttatcaaccaaagcgatgcgtaaaatcattccgtatcttatagacggaaacgattattcggaagcctgtgcattagcagggtataatcattctaatagtttgactaaagaagaaaacgataatagagaattgttggataaattagaacttttacctaaaaacagcttacgcaatcctgtggtggaaaaaatacttaaccaaatggttaatgtagttaatcaagtgattgaaacctatggcaaacccgatgaagtgcgtattgaattagccagagaactgaaaaaaagtgcagagaaacgagctgaaatgaccaaaagcatcaacgaagccacacgaagaaatgaagatattaaaaaactcattactaaagatttcggcattcccaatcctactaaaagcgatgtggttcgttatcgtttatgggaagagttagcacctttagcctataaagatgtttttactggtaaacaaattaaaaaggaagatttattttcatcaaaaatagatatagaacacattattccgaaggcattattatttgatgattctttctctaataaaactttagtttttagggaaaccaatcttaaaaaagcagaccgaacggcttatgattttatagaaagtgattataatgcaacacttgatgattatatccaacgggtagaaacgctttataataatactaagggaactatctctaaaggcaaaagaaataaactcttgatggctcaaaaaaatctgcccgatggatttattgaaagagatttgcgtaatagccaatacattgctaaaaaagcaaaggcgatgttatatcaagtgtttaaggatgtgaatgttacctctggaagtattaccgatagactgcgagaagattgggatttaatcaatgtgatgaaagaattgaattttcctaaatataaggctttaggactgacagagatagaggagcgttatgatattgggcaagaaaaaacaaaaagagtagaagtaattaccgattggacaaaacgaaacgaccatagacaccacgcaatgaatgcactcacagtggctttcacaacaagtagtcatattcaatatttaaactaccttaatgcaagaaaaaatgaatctcacaaagaacataaaaacattaaagggattgagaataagataacgcataagcaaaaggataaacgaaaatttattccaccaatgcctaactttagagaggaagccaaaaagcatatagaaaccattttggtttcgattaaaaataaaaataaggtttacaccaaaaacatcaataaaaccaagaaaaagtcaggccacaataccaaagaacaactaacgccacgaggacaattacataaagaaacagtttatgggaaatccaaaagaccgatgagtaagcctactaaaatcaataaaaattttagtttagaacaggctcaacttattatcaatgtacaggaaaaagaattggtacttcgtcatttagctcaatttgacaataatccagcagttgcttttgatacaaaaacactcaaaaaaatgccattacttaaaaatggtgaacctttgaaagaagtgttgtgttttgaggaaatttttacgattagaaaagacattactcctgatttaaagattgaaaaggtggtggatgaaaaaataaaagctattttagagcaacgcaaaaaagattttggaggtaatgcaaaagaagccttttcagatttagacaagaaccctatatggcttaacaaaaaaaaaggaatttgcatcaagcgagtaaccattacaggagtaagtaacgccgaagctctacaccatcaaaaagaccatttaggcagggaaattttggacgataatgggaatcctatacctgcggattttgtaagcacagggaataatcatcatttggcggtatatcttgattcagaaggtaagttacaagacaatatagtttctttttatgaggcagtagtgagaacaagtcaagggttacctgttgttgataaaggattaaataaagatttaggatggaagtttttgttttccttaaaacaaaatgaaatgtttgtttttcctaatgatgattttgatataaatgactttgatttattagatgataaaaaagcagaattaatcagtaaacatttatacagagttcaaaagatatctaaagtttccgcaggaaatagttttgttagagatattgtatttaggcatcacttagaaacaacagtaaaggaggttaaagaattaaaagacatttcttacattcaattgaaaagtttagaaggattaagaaatatcaaaaaagtccgtatcaatcatatcggaaaaatagttcaagtcggcgaatattaaaaataatggattatgctataccgttctatctacattggtaatccagcttatctgaagctaaaagaccagcaaatgaaaatcatttgcccggaaaccaaagcagaaaaaggaagcatctctgtagaagatttaggactattgatgcttgaccattttcaaatcactatttctcatcagcttatacaaaagttgatgggaaataatgtagtggttatcagttgcgatgcccatcatttacctcacggcattatgttgcctttgtatgggcattccgaatattctgaacgggtgaaatatcagcttgaagccagcgaacctttaaagaaaaatctttggaagcaagttgttgagagtaaaatcaataatcaatcggaggttctaaagcgtttaggaaactattatgaacctatgctggagtataaagaacaagtaaaaagtggcgataccaccaatatggaaggcattgcggcacagcattattggaaatatttaattgctccagattttctaagggaacgatttggcgattcgcctaatcaattttttaactttggttattcggtgctgagaagtattgtggcaagagcgatagtagaaacgggtctgttgcctgtattagggatttttcataagaacaaatacaatccttactgcttggcggacgatttaatggaaccttaccgtccgtttgtagattttttggtaatggaatggttagaaaattaccctgaaagtgaagagttaaccaaagattttaaagcatttatgttaaatatagcgactttagatgtgagaattgaaaataagctaagacctttaatcgtagctgtaaaaacgagtgtagtttctgtttataaatgttataccggagaaaaaagacaactatctgtgcctgagttttatgaagtttaatcgttttaatgcttatcgagttatgtgggttatggtgttatatgatttaccaacagaaaccaaagcgatgcgtaaagcggctcagctattccgaaaacggcttgaagacgatgggtttagtcttttccaattttccatttatatacggcattgcccaagtcgtgaaaatgcagaagtacacatcaaaagagtaaaatcaatacttcccaagcacggtaaggtggctatcatgagtattacagataaacagtttggagatatagaaattttctttgcgagagctaaagaagaacccaaaccaacctatcagcaattagaacttttttagaaacagaaaaaaggatttactaaagtagaaatagacaagaaatagtgaaaaatctaatcctaataaaaagcaaaacccattgaaaaacaacgggtttattttttgaggttgcgaactatcacaaagatagtaaaaattgaaagcaattcacaacttagaaatgcgtctgtatcagaacaagccagttgcgaactatcacaaagatagtaaaaattgaaagcaattcacaactttcctgcccttaataattttagcgataaagttgcgaactatcacaaagatagtaaaaattgaaagcaattcacaactaacccgccaaatcgcctgtttggaaaatagttgcgaactatcacaaagatagtaaaaattgaaagcaattcacaactattgttgctaaatgctcttagtataaagagttgcgaactatcacaaagatagtaaaaattgaaagcaattcacaacacacgcacgaggcgtaatttatgtacgaaagttgcgaactatcacaaagatagtaaaaattgaaagcaattcacaactctggcggcgccacccaaaaaaagttgtcggttgcgaactatcacaaagatagtaaaaattgaaagcaattcacaacgcctgtgcctgtgcgtatgagttagaggctgttgcgaactatcacaaagatagtaaaaattgaaagcaattcacaacgtgtcgctaaactttaaattttcgtgatatgttgcgaactatcacaaagatagtaaaaattgaaagcaattcacaacgctatgggtgcgtggctagactttgtagaagttgcgaactatcacaaagatagtaaaaattgaaagcaattcacaacgcacaattcacacttaaaaaacaaaataggttgcgaactatcacaaagatagtaaaaattgaaagcaattcacaactatgcggtttgtcatcactagaaaacagatggcttaaataacttctatctagtaacaggtcttttgttaggtcttttcgtttaatacctagctcttttatctgttcctgtatccacgaggtatgtatatcttctattttcataatattattttaagaagatgtatatcattcctgctaaagctaaaaaataaatattatctgctctaaagataaactaaatctaatagttatatcttgctcaaatggttctttcgagaaaatatttttaatcaattttataaattctttcatttgaaaaaatatttctaaatttgcctttagaagtaagggggacaaagcctcctttgtttcaggatataacagactgggaattttctgtttcatctcggctttaagtttcgcaacaaacttaaaacctttttcattttcataaactgattttgaactcaaaatctaacttcataaaaaataaatttaagctacaaactaccacaaagatagtgaaaattgaaagcaattcataatgttactgtttgttattggttttatttttaagatataaaacacgcctccaattatgtaaaccgacacaattaaatactaaattaaaaatccctatactcccaaaatccattacaatgtagtaggaattataaatgatataaaaaatagaaaatacaataagtataaaatatagtatagagtttttcatttttataaattgcaagctgttacaaatatagtaaaaaagagctacctccaagaggtagctctatgtttttaaattgagatattcagtctactttaaagtaatattgtctatttgtacagtagtggttacagtagtgttacctacatattcaaaaaagatataaccttttcctgtagtaggaattgtaaattcgccactatctacccaatcggcagcatagccattagtatttccttttgaaagagtaaacttagaagtaatatctattaggtcggttttatttacaactccgccaggtgtatatttcgtagtgtaatatactttaagagcgtctcctgtgtagtaaccatcttttgtttggaaagagagtttagaagagccagtaaattcagcaggaactataaagtaagtgctaacatcagcattggctctaaatgcacttatttggatataattgttaccgctaaaagttttttgctcccaaaaacgatttccgaatacagaatagttaatgtatttaggatctgcaatccttttgaaattagtaactgtagatacattatcaaaagcttcagtcattgtcttattatattctggagcattgccacctaaaacatttttggaacttacaaatctttcttgttcaaatttaacatcgtttaaatcacgaatgtagagttgccatgttacatttcgtccagaaacatatttgtttacaactacggtaatgtctccgctctccgtaggtaaagttttccctgcgaaacgagcaaaaccactatttcttactacagcagtgttgtcctctctatctactaaagttctatcaacagtttgtctattgactgcatcggcataagtaattttaccatcagcctctgaaaattgcacccctttaatagtaactagagtattgatgtattcatctttagtagcttctgcaatggagtttactactctaggagtaatggctttgatgtccatagtattacctccacaaacgccagtaatgaagtctctcatattaccttctggtatttgtcctgttgggtttacatagcctaatttaaccacctctctgtctaaaccaacagaaagcccattagctctaactcttacacgagatcctacagggtagtctgtatataagaaagttttgttgatggcaacttggatacctgcggtaggattttcggtattgtcttgtatggtaagttgtttgtaaaagttaccaccttcatcggaagaaattacatatccttcaaaaataacaggggcgtctgtttctccattagggatggtgtagttacttacgaagtttacaggtgttggagccaatgttttaaaatctttaatggtagttgtaggttccgagaactggttgctacattggattgcaggtgtgtcaaacttatcgtcgtgtacgcaagaggttaatgctccaaaactgagggctattaacgaagtttttaaatatgttgttgttttcattttttattgtgttaaatattaaaatttagaatcttacttgtagattgataaaatagtttctaccctgtgtaaagaaatatctaggtgcaaaattaggatactctctgtcgtagtctcttctaaagtctgcaaagttcacatttcttgtttgctcaaagcctccagtagcatatttagtattgtcaagcacattgttcacagttgcactaattaggacataatatttgcctaacatccaagatttacccgcattgatgttaaagaaataagcgacagggagtttaacttgagcggtaactcttttgtattcctcctccgaaattcctgcatacggtgtttctgttactgggttgtttacaaagaagtcagaacgaatgagaggagatggatctaggaaattactgccaagatagttccagttagcacctacccaccagtatttaggagaactatattttactcctagagagtaggcttcttgtggtgtgcctccttgtctaaagtttttgatgtaagaagttccgtagctggtgtaaagtttttcgttcgggaacattcccaccgcatccgaagcgaagtacacctcaggattattggtatagatgtatttaccataattggcaaccccattaacggtaatagtaggcgttacttttacctctacacctagttctgcccccatatttctacggttcacattagacattacttgtgttacaaatgcacttctcgcactagtggtgttgccttcgctatctacaccatctagttttattccatcagcaaagaaacgctgtacattagtatcattttgtgtgtttataaggaatgcggtagctctcactttaacaaatggagaagagaccatatagctaatatcattagccgaaactatggtgtttttaatattaggtgcgatggcactgtttactcttgcattgatgaacaaattattgaggtaaggagcttgggaatagtaggcactattataaactaagaaatttctaccatctaatttatagattacctgaccttttaagccgaaattccagtagtcttggttttcggattttcctaatgcatctttgtaaagatagtggttaaaatgcccttctctattattagtgatgtaagccgctagggcagatacgaaaatatcaaaattacctgtgctaaatttcaaagcagggtttatcttagtttcttgtcttcggaaagtgtagtcataacctattttatcgcctacttttttatgagtgttttcttctccttcgttgaataaacctgaaagcttaggctggttggtagaggcaaaagggtctccgttaagagcgtattgtgctcctagtaagtcttttatctctctatattggtttgataaataatttctgtaagaagcgttgatgaatagctgagtcttgtcagaaaaattatgaacaaaatgagttcctacattccaaactttgtcatcattaacatcatttactaggaaataaaccgcttgttctctatttctattagcgaggtaaagcctatcccaatttatttgggtgtagttttggtcattgctttcccatctgtttttagttatttccagttgagctatatcggagtcgctagggttggctaatccagcaaaatagcttggtaaatttctgtagtatagaggagaggggttctgagcgttataccaatctagtctagaagccttgtctttaccaaattggtaagaaacagtagtccaaagctgagatctgctgcttatcttccagtaatctgtaagttgtagtatcggttggaatccttttcttactctttcacttcttttctcgccatcttgccatccccagaaagcattgtaatgtacaccattataatctattacctcttgggtgttagggctagcagtacttctacggtaaggagagcctattaagtttaaggtaagtgtatgtttgtcatttacttttttctcaattcctaggtaagctccgtaagcatcatagaaagtaccttcttgtatcccttcttgtgcccatcttctagctcccattacagtaaacgcccaaccctttttattcattccagaagagtatcttaaggaagttctgttacgatagtttctgttggtaagagattgggtaaattggaaacctttgcggtattcacttgctttcatatttttgtagaccacagagccaacgcctccgaaagcgtactcagaaggagagtggtttactgcaatttcagggtatcttgtgatttcattaagtcctccccagttgccataatctacattgccattatcggcattttccatagagataccattcatcataacctcgcttcttctaccatctatacctcttggtctgaaccaatagaatcctaaatcaaaggcagcaatattactgaatacatctctagaagactgtaatagtcctaatgttgcttgtgaggaagactcgtccatactgctattgtcatctagcaatactactcctaattccgaatttttaaggttagaaaaaagagtaataatccccaagtcttttcttttttcattttcaaaaacatcaaactctaggactttggtttcgtagttaggttgagttactaccatttggtaatgtccaggttttaaatctacaaattggaaatatccaattttgtctgcctttacatcgtcattggcttctcttaggtcggctactgcattttcaatgggttttccatcggcatctttcacatacgcatagactgtggtttgtgcatagtaataagatgcaggcaataaacagaacatagagactaatgataatttcttaatcataacattctttttttcttaatttatcttttgaataaaacgattattcaatccacaaaattaagtcaattttttgacaagttttgatgaaattaagaatttttaacatctgatatttatcacgagtatgtgagattgctttagggcaagggttttgtccctaataatgttttatgtattgttaattaaaattaacccgttgtgcattatgaaatgaaaaaaacaagagttgtttattagactgaaaatcagtatattgtttttgctataaaacgatataaatgaacaacttagagcaaatatatgaaagaattttggaagttttaggactttttcagaaaatcaactgattagttatcagagaagaacacctaaaatgagcgatttagaagtcataagtcttaatattactgctgaatacttgagtattgatagcgaattacagttatttagaaaattgccaaactctctgataaacaaaattgaaagaagtgtttacaataagcgaaaacgaagactatccctacaaacagagcaaattagacagcgtatttcgatggagttcaatgagtttgaagatattttatcgttgatagcatgccaatgaaagtttgtgaaaacgctcgttctactcgttcaaaatttgtaaagagcaatcctattcttcaccaacatatggttattgtgcttcacagaaattatatttctatggctataaactacacgcagtatgttctttaaatggtgtgattaagaattttgatataagcctgcatccgttcacgacatccactatttaaaagatattggtgagcaaatgcgaaactgtactttaattggagatagaggctatttatcagcaaaagttcaaatagatttatttaactatgctaatattaaattagatacaccaatgagaagtaatcagaaagattatattcctcaattttcattgtacaagaaaagcgaaaacgaattgagacatttttctctcaactttgcgaccaatttatgattaaaagaaactatgctaaaacttttgaaggctttaaacaaggataatcagtaaaataaccgccgcaacggttattcaatatatcaataaatttatcttccaaagaaaattaaatcatctaaaaatcagtattatttaaaatgcacaacgagttaaaattaattttaacttagtgttcacttcaaaatcactaattttgctcaaaattagaatctaggtttaaaaacttatttaaaaataaatgaaaatgaaaaagatattttctctcttaacattgggactttttttaaccagtttttctcaaacaggtaagctgagaagaatggcaacggtgggtttctataatgtggaaaacctttgggataccattcagtcggcagattatatagatggaacgctaccgcctaatcaccctcgttttcatagaagtgtgccaatagattcggtaaagtatttggagcgtgaggactataaaggtgagtggtctgactctaaacttataggtaaaaaagtggttcgttttcagggttcttcagaagagtttacacctaagagtgccaaaaattataatacgagtatttataatcaaaaattaatcaatgcagctagggttatttctgagttaggagcttcggttactaagacagcaccggtagtagtgggtcttcttgaggtagagaaccgtcaggtagtggaggatttggtaaaacaacctgctttaaaaagatacgattacggagtaattcattataactcttatgattatagaggtatagatgtggctctcatttatcagaaaagaagatttagctctacttacagcactaaaaaagaactcaaaatatacaatgaggaaggaaagagagagtatactcgtgatttgttggtggtttcgggatatttagacggagagaaagttgctttttttgtcaatcactggccgtctagaagaggaggtgaagccgtttctcttcctaaaagaaatgctgcggctcagttgctaagagtacagatggatagtgtaagggctttagatgctaataccaaattgatagctatgggagattttaatgatgatcccattagtagtagtttgaagaattacttaaaagcagtaggaagtaccaaagagctaagcccagaatatccttatctaaacttaatgtatcctttgtataagaagggggtggcgtctttagcgtatcgtgatgctcctaacttgttcgaccaaattatagtttctgaaaatttggttagtccaaaagatgcttcttattctatttttagaacagaagtttatgcacctgcttatcttatcaacaaggaaggtagttttaaagggtatccattccgttcttgggacggggataaatttacaggagggtatagcgatcactttcctgtgtttacaatactttacaaggaagttaattagagtacttatcttataaataaataagaggttgtcttagtttagggcaacctcttttttgttttcataaaaactattatctttaaggactaaaaaaaataggaaacctatggatttgcaattcaataaaaacgaagatttaaaccgattgaaactttcagaaatcaatcagttattagctaaaataaagaaaggagggggagaaaaacgcttagaaaaactcagaagtgaaggtaaaatgacggctagagagcgtatagattacctcttagatgataataaagatagcatagagataggggctttcgcagggtttgaaatgtatgaagagcacggagggtgtcctagtgctggtg

SEQ ID NO: 2172 - DNA, 24218 bp, synthetic construct
  misc_feature 1..24218: note = Synthetic
  source 1..24218: mol_type = other DNA
aaaattatctcatgtggtttcagccatagacggcgaatccgtttataaaggttgtgccttaggcttgcctaaatgttctgaaacccaaccatgtcccgttcactttaaatttaaatccataagagaagaattaagtaaaatgttgttatcaaccagtttaaaggatttaatagacggattggataggggagaaactttcttaaaaataaaataaatattaataaaattaaattatttactcaatggaaaccatgtttaaaaaagctacagtaggagaaatagtagctgaaaattataaaactgcagcagtattttcaaaacataaaattgatttttgttgcaaaggagacagaactttagaacaagtttgcgaaaaaaaatcagtagattattcaaccttagttaatgaattgaatgaggtaataaaagataaatcttctggtgaagattttaatacttggccattagatcaattatctgattacattgttagaacctatcatgagtatataagagaaaaaatcccaccattaacacagtttttaactaaggtagataaagtacatggagatggacatcctgaattgcatgaaatcttagccatatttttagaatctgctgaggatttacaaactcatttaagaaaagaagagatgattttatttccatttattaaacaaatgactcaggcaaaaaacaatggtcaaccattgcctactcctccttttggtagcgttgaaaatcctattgaaatgatgaaagatgaccattcaatagaaggagatagatttagaaaaatttcagaattgtctaataattatacacctcctgaaggagcttgtaatacttataaagtatctttggctatgcttcaagaatttgaagaaaaattgcacgagcatattcatttagaaaataatattctatttcctaaagccattcagttagaaagtactttttaaattattttatttttcaatgaacaagagctgggttctattaaatctatccaatctattaattgtttcgtttctaggaataatacttagatttttccagctctttcatactaaatatttatatggaaattatttacatacacattcccatgtagccattttaggttggatgtttttatctttttttattgcaatctactatttttttatacctaaaaataatggtaatctaaaaaaatttaagacactttacattatttcgcaaataagtgtttggggtatgttgctaagttttccctttcaaggctatgaatcaatttccatagctttttcaaccatacatattttatgtgcttatgcctttgtatggctaatatggaaaaatataaatttgaaggaatatgaccaaaaattcttaaaaacttccctcatatttatggttatttccaccttagggatatggggtttaggaggtgtaatatcaatagttggtaaaaattcatttttatatcacttagctatacagttttttttacattttcaaattcagggatggtttctatttgctttatgggcatgtttatttaagttgataaaaaataaattatccatttatccaaactatagcaaagcgtttttcaatttaaatctaattgcagtaatattttccttttccttacctattttaaaatatcaggaaaatcaaattccttatctaaatatttttctacatctaagtagtattttaaacttcattgccttgttaatttatttaaaacatattcatcctaagattaaaactataataaatagtgaacctgcttattgttccatggcgtatcatacctttttattaagttatattttaaaaataattgtacctatatttttacttatttctaattctattaacgaaataataattataaataatttttacataggatttatacatcttacagttttaggagtttattccttttttatattttttttaatgagtcttaatattgaaaaaagaaatttaaataaattcaccttaggattaggcttagtgatcatagcctttataataactgaactattattaatgattcagggtttctttatctattttaatttaggaagtttaaaattttattatccactaataattagttcttccatcttatttcccattgggattgtattgattttattaaattttcttccacagaggataaataaatttaaataaatttgatttattgactaatagttagaattttttttcagttatacaattttggattataagttttattataaaatttagcataagcaaccaactgttcttcagttgtaaaatttcgcacatttaattttccaaaagttttaaatttattaaacattttattaaaatttttattttgtaaagaatctttaaatattgaaattgaaactctagttctatatccaggattatcttttattttcataggtaataaattaactttttcaactaagaatgaatcaagttcattatatttaatatattttagtttactaggatttaaatagatgtaaagatatttagttgaatcagatataaatattagtttttcactattaaataatacaagtgttgcttcttggtttttgttcggtataaagcgtccttggtcttcaaaaaaataaattgttgaatcattataaaatataaaattgtacaacccataaatgccctgattttttagttttgagttgctaaacttagaattaagttttgatttgttatatttagctaaaatgaatatatcatctttattattcattaaaaaagtattctcgctttttttacaggaaaacaataaaaatacgaatccaatagcaagcgatatatattcaattggtattgatctatatatttccataaaacaatattaaatatatttaattgttaaaactttatataatttataaaatttcaaaataaggtattaactctaatactaatttttatattacaaaaaagatatatcaacaatataaacattcaatttctaggaatatatatacataaatcttatttttgcagtacatccattgaaataatatcatgtcacaaacttctcatgaatttgatacgattataaataactgccaaactttatttaaaaataaaatgctggattatggagcggcttggagaatattaagattaccctctttaaccgatcaaatctatataaaagcgaacagaatcagaaccattcaagaaaaaggagagcaaaaagtggaagaaaatattgacaatgaatttattgcaattgttaactattccataatgtcactgattcaattggaaaaaggagtagccaatcaaccggatttaagtgttgagcaagctttagaatggtatgtaaaaaaagccgaggaagctaaaaatctaatgttagctaaaaatcatgactatggagaagcttggcgagatttacgtataagctccataacagatctaattttacaaaaattgttaagagtaaaacaaatcgaagataacatgggaaaaacaatagtttcagaaggtttggaagccaattattttgatatcgttaactatgcagtatttgcacttattctcttaaacaatcaagaaaataataaatgaaatatatcacccatttagttagaattattgtagggattatttttattatatcaggatttgtaaaaaccattgatcccatagggttttcttataaattagaagagtattttggacccggagtatttaacattccaatattagaaaactttgcattgcccctttcaattctatttgtaattcttgaagtgttagtaggggtgttgttactcttaggaatgtggaaaagattaacagtatatttacttcttacacttatcgtgttttttacttttttaaccttttattccgcctattttaataaagtaacagattgcggttgttttggagatgctttaaagttaaccccttggatgtcttttattaaagacattatcctattagtaatgattatatttttagtaaggcaaatcagatttataaaaccatttttaaaatacaaaacaaataaaataatagttatattgtcattaattctatgtatagtagtggcttaccaaggaattgctcatttaccaattatagattttagaccttatgctgttggaaaagatttaaaaaaaggcatgcaagacggaagtccacaggttgaatccattgtatataccttagaaaatttaaaaaataaagaagagaaaaggatgacttctgatgagtatattaattcaaatatatgggctgatacattaacttggaagattaaaaattctgatattaaaataattaaagaaggagttttaccctctgtgcatgactttattattgattgtggaggtcaagatcgaacagaatccattttagaagaaaataaaatagtggtgattacggtgccttatgcagaaaaaatgagtttattagaaaaagcaaagcttaaaaaaattatttcggatttaaaagttaaaaggcttaagtacgtacttatggctaatgatccacaaaaattaagaattccaaacgcatgtatatcagaccaaaccaccataaaaaccattaatagaagtaatccaggatttatggtattaaaaaaaggaatagtagttgctaaatatcatggggatgactttccatccttaaaaaaaattgaaaaattataataaatatttgaatttaaaatgagaaaaaaaatagttgctggaaactggaaaatgaataaaacgctttctgaagccaatactttattagctgaaatagattcttacgtaaaaactaacgatcctaaatgtgaagtagttgtaggaattccttacctatatttagcgaatgctaaagaaaaatatgaaaatttaaatatttatgctgaagatgtttcagaacatcagtcaggggcttatacgggagaaatttcagcagaaatgcttaaatctgttcatgtagatggagctatcattggacattccgaaagaagacaataccataaagaaaccgatgagcaaattggagctaaggttaaaattgctttagaaaatggtttaactccaattttttgtaacggagaattattagaggaaagaaagtcaggaaaacactttgaagttgtaaaaaaacaaacagaagttgctctttttcaattgtccccagaggaaattaaaaaagtagtgatcgcttacgaaccggtttgggctataggtacaggagagacagctaccccagaacaagcacaagaaattcatgcgtatattcgttcattaatagcagaaaaatacggaaaagaaattgctgatgaaatttctattttatatggaggaagtgttaaaccagccaatgccaaagaaattttttctaaacctgatgttgacggtggattaattggcggagcatccttaaatattaaggattttggagctctaattcagacatattcagatttataattaataatatataaataagaaaacgcttatataaagcgttttttttatttagtcataaatatataatttttatttaggaggagataaaaatataaaaggcttacaaggaatgtttcttagaattgtataaagtataattacgattaatgcaattttaccaaactgattggaaaatataaaaccttgctgaaattttttatttttaaaaaaataaacttctataattacatataatagatatataaataaaggaataaaataaataaatatattgtactgcaaagctttccaaaattcaccatgtagaagaaaatgaaaagctctttgtcctccacatcctggacagtttaaatctgtaaatttcttaaaagagcatgtaaaacctaaattagtttcttctggatttatataataataaaaaactactaaaaatataagtgagaataggaatactaaccctattaaaattttaaaacctttattcattatctaaaaactttaaaaacatctatgcgctcaaggtctacataggcgaattagtccaaatttaaaattccttttatggtagtaaaaaatataggaaaaataatattgataattatacctatggcaaataatccaatggcaataagagatagaatcttagccgtttgagaagatcttttagcccccaaataatcttgaagaataaatttatctttaacttgattagcataaacaatagctattattcctaaaattaaacttaaacaattaaaagaacaacaagaaataaaggttgcaataatagctaaaggcatatgagtattcggaagaataggagtactatttaattgatcaaattcagaatctgaataaaaattatcgttgtactgcatatctaatagtagtgttacgttgaacattaaataacaaatataagtgaatatttaaaaagaaattaataatcgttgaaaaacaattaaatttgaagatctaatcactagaactatgaaagcacttattattgttgatatgcaaaatgacttcctacccgatggaagtttggctgttgaaaatggcaatgatataatacccaaaataaatagtattcaagccaactatgatttggtggtagcaacccaagattggcatccaaaaaatcataaaagttttataactcaacatcctaataacagagtgtttgaccaaattcaattagaaggtttaaagcaaactctatggccagaacattgtgtgcaaggtacccaaggcgcagaattttcatctttattaaatcaaaactcaattgaagcaatttttagaaaaggaatggatgaaaatattgatagttacagtggtttttttgacaatggaaaaaagaaaagtacaggtttaggagaatacttaaaagcaaaaaaaataaaagaaatacatgtttgcggtttagcggcagatttttgtgtgtattatacagccaaagatgccttagatcttggttttaaaacttctattattgagaatgcaaccattgctataaatccacttaattttaatgaaataaaaataaattttcaagaaaaaggaggagaaatcattcaattataataatagtttatgaataacatatatttaaagaataaacatttctaaacaaatgtttattctttaaacatttgtttgaaatctatggattctttgcccggaagaatttgattaagcacaattccaataattgaggctaaggccatgccttccaatgaaaataaatctcccacatgtatagcggcaccccctataccaatcactaaaataaccgaagcaattattaaattacgtttcaggctaaaatcaactttattttctaccaacattcgaagtccactggaggctataatcccgaaaagaagaatagaaactccgcccataacaggagttggaatagtacttaataccgctgctatcttaccacaaaaaccaaataatatagcaaagatagctgctccaatgaagagataaatgctataagctctagttatggcaagaacaccaatattttccccataggtggtattgggcggtccacctaatagagccgcaaacatggttgcaaccccatcgcccaacatagatttatccaatccaggatctttgattaaatctttatctacaactttgcttagcaccaattgatgtccaatatgttcagcaataggtactatagatacaggaatcattagcaataatatacgagttgaaatgcccggggtataatctataaatggaaatgtgaagggaggaatttcaaaccaatcagcctgtaaaactgtagtgaaatttaccaatcctagaaaggaagaaaataagtatccaccaacgatgcctattaatacaggaatcacactcaaaaaacctttagtaaacacagcaaccagtatggttattgataaggttacaaaaccaacggcaacatattttagatcgtatccctgtgtgtcaatgttatttgttaccatacctacagctgttgatgctaatcctaagccaattaccataatcactggtcctacaacaataggaggaagtagtttcatgagccattgggtgcccactttagaaattaaaagggctacgcaagcataggtgagacccacaaaaaaacagcccactaaaaaatctccagaacctactccagagttaggatcagtagctaaacttttcgctactaaaataggatttataaaagcaaaagaagaacctaaataagaaggaacttttcccttcgtaattataataaaagtaagggttgctattccgctggataccagagcaacagcaggactcattccagttaaagcaggtaccaataccgttgagccaaacattgcaaataaatgctgtatacttaataatatccattgtaaaaacctggggcgctcattgatttgcaaaatcactctagaatttttatctttcatcgtatatttatctaaataaattaatatcgtcctaaattaaaatttttctaaataaactaagtattaattgagtttaaaaaacattaacggctggcaaaaataattctttgttagatttttacaaggtagattaaaaaaaaataaggaaaaaagattaaatttattagtaaattaaaataaatttaatcgttatgatcatagactcattaaataatatatctaaatataccgctttacatcccttgtttcctaaagcttttgaatacattcaaaatttagatataaaaaatttaaaaataggtacatttccaatacagaatcaggatatttttgctataattaatgaaagtgctatgggtacaattaaagatacccacttagaagcacacaatcaatacatagatatacaagtgcccttttcaaaaacggaaatgtttggctgggctccccgatctatattaagaaatccattgactgaatatgatgaaatagaagatattcagtattttaaagatcattattcattcacttttgaattacaaccagaaaattttgtaattttttttccacaagatgcgcatgctccatgtctaggggaaggtaatattcttaagttggttataaaaataaaagttataccttaaaatcactaagactaaaataatttaattaagctattaattcttgagaattaatagcttctcaaaagcttttctagaagtacctctaaaggtaacctctccacaaaatttatatcctaatttattaaaaatggctagcatgccagcattgtcaaaattagtatctgctttaatgctctgtatattattatttattgcaaattcttcaataaaactcatcattttcttagctaaacctttgcccaaatagttttctgatattgctacacgatgaaaaactacaaagtcgccattgctaagccaattaccttcaatattactataagcaggttcatcattaatgaaaagagcacaatacccaaccacttttccatcgtttaccagtacatatcctgcattagagtcaatatccttttcaattacctgagggttaggatatccatcttgccattgtttactaccctcagcttttcttcttgcgatggcttgttgtaatatttcccaaataacttcaatgtcttccttgtttgcttttctaaatgttaattccataattgatatgagtggagataaatttttataaaaataagagttttttttaaaaatttagatttataaatgaattaaataaacatccgagtttaaatctactactttggtttaggatataataggcaattatttaaataatagtaaacattaacaatagaaggaattaagactaaaattggcttagaatttcaaatacttataaattatttcaataaaaaaagacgagttgccccgtcttaaatgttttcacaacggaataatccttattgtgagtcctttcactgcaaatatagataaatttttttaaatgaatacctattaaagataaatatttatgtatattgtgtcaatataatatattattcacaaatttatgaaacatattttaggtctggacttagggactacatccatcggatgggcgttggttaaagaagcggaagatacaaatgaaaaatcttccatagtaaaagtaggagtaagggtaaaccctttaacggtagatgagcaaaccaattttgaaaagggtaaaccgattactactaatgcagttagagctcaagcacgatcagctcgaagaaatctacaacgctataagctacgtagagaaaatcttgtcaaaatacttatagaaaatcatatcattgattcctcaaccatattagcagaaaatggtaaaaatacaactttccaaatttgtgaactacgtgccaaagccgctcaggaagttttaagccttacagatttcgcaagagttttattagccataaataaaaaaagaggttacaaaagtagtcggaaagtgaatactactgaagacggtcaattgatcgacggaatggaaatagccaaaaaattatatgaggatcatttaaccccggggcagtacgtttatcagaattctattaataaaaaattttcaatccctgaattttatcgatccgatttagaaaatgaatttttacgcgtttgggaatttcaaaaacagttttattcagaaatattgacggatgaacttaaagaaaatattaaaggcagaaataaaactcaaacatgggctatattaaaagagtccttgcagttagtaggcattaagagagacaaaaaaggaaaagagctacgtttagagaactaccaatggagaaacgatgctctagtactacaactaaacttagaaactttggcaattgttctacaagaaatcaacggacaaattgcaggatcctcgggatatttaggagcaatcagcgaccgaagtaaggaactatatttcaataaacaaacggtagggcagtatttatacagccaattgcaaaaaaataaacatgcgcgtttaagagggcaagtattttatagacaagattatttggatgaatttgaaaaaatttgggaagtacaagcccaacaacaccaagaacttaccagtgaattaaaagaaaaaattagagacgttataattttttaccaacgtaaactaaagtctaaaaaaaaccttattagcctttgtgaatttgagcaaagagaaattaaagacaaaaacggaaaagcacgcaccgttggtttgcgagtagcaccaaaatcttctccattatttcaagaagttaagatttggcaacagttgcacaatgtaaagataaaacataaaaaaacgggtgaagagttagatttgtgccaagaagataaaaatttactttttgaagaactaaatttaaaaggttacatgagtgccgaacaagtcctaaatattttaggcaagggtaaggaatacaagttaaactacaaagtactggaaggaaatcttaccaacgaacaattgtacaataaatatttagatattttagacctatcaggatacgatctacgtaaaaattttaaagttagtaccgggaaagaagaagtaaacctaaaagatataaaattagatgctcatgaaataaaaaatacagtgcaagcgatctttgaagatttaggaattgatactgaaatactaaattttcattcagaatgggaaggtgaacaatttcaaaaacaaccggcttaccagctttggcatcttttatattcttacaatgaagatgatataccgccagagataaaaaaagaatcccgtaccggaatggaatatttatacgtacagttgcataaaaaattcggctttactttagagcaagccaagcgattaggaacggtagtttttaaagatgattacggaagtttaagcaccaaagcattaaagaaaatatcggtatatatcaaagaaaatgactacgcacaagcctgtgcattggcaggatacagacattccaaaaactctttaacccaagaagaattagcccaaagaaaactaaaagacaggttggaaaatcttcctaagaacagcttaagaaatccagtggttgaaaaaatattaaaccaaatggtaaatgttgtaaatactatattggatagtgaaaacgaccgattagaagcacaaggccaggaacgaaattttaagttggatgaaattcgtgtagaactagcccgcgagttgaaaaaaaatgctaaagaaagagaggaactttctaaacaagtggaatccgcccataaataccatcaaaaaataattgaaattttacagcaagcaccctttcatattaaaaatccaagccgtaacgatattattcgttacaaactttaccaagaacttaaaatcaatggttataaagacttatataccaaccaatacatagaaccccaaaatttattttctaacttgtacgacattgatcatatactaccgaaagctcttttgtttgacgatagtttttctaacaaaactctatcccccaaaaaaattaatagagataagagtgcaagtacagcctacgattatattttaaacaattatggtccccaagggttggaagatttcatagcaagagtagaaaatctttataaagccaaggagagaggaattactgaggcgaaatataaaaaactactaaaaaaagctacggaaattggagacggttttatagaaagagatttaagagatacccaatacatagccaaaaaagccaaagatttattgtttcaaattactcctacggtggtctctaccaccggttcggttactcaaaaattaagggaagactggggcttgttaaatgtaatgaaggaactgaatttacccaaatacaggcaagcaggcttaacagaaatcatagataataaaaaaggggaacaaattatagattggaccaagagaaatgaccatcgccatcatgccatggatgcacttaccgttgcatttactaaaccttcccatattcaatatttaaattataaaaatgcaaggtcaaatgaaaatcatccctttcatccgataattacagccattgaagataaagaacttataaaagtgaaaagcaaatccggaaaaaataaatctttatttaaggaaccccttcccaattttagacaacaagcgcgagaacacttagaaacagtattaatctctcataaaaataaaaataaggtagttactaaaaacaaaaacaaaattgcaggcaattctaaaatacaagatactcttacccctagagggcagatgcataaagaaaccatctatggtaaaattaaacaatgtgtttacaaagaatataggataaatgcttcatttgacgaaccaaccattcttaaaatttgcaattctttacacagaaatttactcttaaaaagactcaaagaaaataacaacgatcctaaaaaagcctttacaggtaaaaattcgttgagcaaaaatcctatttatttggatgatgataaaaaagaaactttgcctgacaaggttaaattacgcgagttggaagagagatttaccataagaaaaaatgttgatcctaaattgaatattgaaaaagtggttgacgagggaattaagcaaattttaaagcagagattgttggattatggaaacaatcctaaagttgctttttctaatttagatgaaaatcccatttggttaaataagaaaaaaaataaagctttacgtagggtaactatttttggagttattaatgctgaacctttgcatacaaaaaaagatcatttaggaaaagagatattaaacgagaaaggccacccaataccggtagattacattagtacaggtaataatcatcatgtggctatctatagagatgaaaaggggaatttgcaagaaaaagtagtttcatttatggaagctgtagaaagaaaaaatcaacatttgcctgtgatcgataaaacctaccaacaagacttgggttggacgtttttatttaccttaaaacaaaatgaaatgtttgttttcccttctgaagatttccatcctgctgaaataaatttactggataaaaaaaattaccatcttatcagcaagcatttatttagagtacaaaagttaacgacaaaagagtattattttagacatcatttagaaaccaatgttgagacccatgcaaaaactaaagatttgacatggaaaagagtaggattgtcaggaattgaaaatattgttaaagttagactcaatcatttaggtgagattgtacaaaccggcgaatattaaaattgtaaacccatgcttaagcgaaccatctatgtaggcaatcctgcctatttaaaactgaaagatcaccagttaaatgttgaagatcctgcaacgggaataattaatggtatagttcccgtggaagatatgggctttttgctacttgatcattctcaaattactttgacacatccccttatggtggctttgcaacagaacaatgtaggaattataagctgtgatgcctaccatttgcccatttccttaatgttaccgctggccgggcatgtggaacattcccgtaggctcagagaacaaacaaatctttccgaacctttgcgcaaacaattgtggaaacaaacggtggaaactaaaatttatcaacaaaaatgtttattacaaaaactagggcattcttttgaaccaatgttagagtatatgaacgaggtaaaatctggagataccaccaatagagaagggatagctgcccaatactattggaaacaaatgtttgagaattttacccgagaacgaaaaggagaaacacccaaccaatttctaaattatggctacagccttttaagaagtatggtagcaagagctttggttagttccggcttaaatccaaccctagggctgtttcataaaaataaatataacccttacgggctggcagatgatgttatggaaccctatcgtccttttgtggatgaaatggtagtggaatggttgcaacagtatccccaagaagaaaaactttctaaagctgccaaaatgcattttttgcaattggctacacgggatgtacggttggaaggtagtaaaaaaccattactgatagccttaagctcaaccaccagttccctttataaatgtataatcggagaaaaccgaatcattcggtatcctgaatttgtatgagctttagtcgttacaatgcatatagaatcatgtgggtattagtattgtttgatttaccaaccgaaaccaaaaagcaaagaagtcaagcctctaaatttagaagggatttgttggacgatgggtttactatgtttcaattttctatttatttacgcaattgccccagtaaagaaaatgccgatgtgcatataaaaagagttaaaaataaactgccccagtacggaaaagtaggaattattagtatcactgacaagcaattttcccaaatggaaatattcttttccaaacaagcctccaatttacctttaactccccaacaattagaaatgttttagtttaggaaattaaaaagccataagaaaaagtttttttcttatggcttttaattctttttttaatcctatttgagtttctaaataattatctatcaaccctttgtaggattagaggttgtaacaactactgtaaagatacaaaatgaaaggaactcacaacagactttgagttagggtatgctccgggaatgttgtaacaactactgtaaagatacaaaatgaaaggaactcacaacagtcgcaccgtatattgcatctttttgaatgttgtaacaactactgtaaagatacaaaatgaaaggaactcacaactatctaaaattaatttcatatctaaaatatgttgtaacaactactgtaaagatacaaaatgaaaggaactcacaacagtagcatcattaggtcttgtaatatctccgttgtaacaactactgtaaagatacaaaatgaaaggaactcacaactgcttttttttataacattatctaatgaaggttgtaacaactactgtaaagatacaaaatgaaaggagctcacaacatgtagttcattctttactttcttgtacttgttgtaacaactgctgtaaagatacaaaatgaaaggaactcacaacatacgatgacgggcaacctttaccaggcgcgttgtaacaactgctgtaaagatacaaaatgaaaggagctcacaaagaatgataataatgtcaaaaacttgttattattgttacaactactgtaaagatataaatggaaagggactcacaaacctttatagttataaaaatatccttgtttaaacttttacaaaggtataaaatttaatttatcaaacaaggcatatcatgatagtttaatatattatattattaacctaatttttaaaaagtttcattttcaatacttcaatactagatataaactaaaaagatcgtggtatgctttataaaacaagaatattttaaaatcaccactataccttgttttcagagcttaatttatattgaagttattaaataattaaatagaaaaagcatccgtattgatacggatgcttttttataggttgatatttttcaattattaattcattttgaaaccccttctataaaatctaccgtaaggatctacgtattttacagaaacagtaccgttgtaattttttaataatctttcaatgtctttgtcactatttacaggtttatcattgatttccataataatgaaaccttcgtttattccaatggatctaagttttccgttggcatccacgttggtaacaaccaccccggattcaagcccgtaattcactttttcttgctcggttaaagaagtaaattctcctcctaatttttcagtcaccgataaatctgctttagtttttacagaagttcctccttgtgcgtcttttacttttactttaaaagattttaaactaccgtctctcataatcgttacagaaacgttgtctcccggtctcttttcaccaataattccggaaagggtagggaagtttcttatagtaaccccatcaatttgggtaataatatctcctttttttatgccagcatctttagcgccaccgtcttcctgaacttcggtaactaaaaccccttgttgagatttgtaagaagttttattttttgcattgtattgtttaaccgcagaatcatcactcatatctaaagccccaatccctaaatatcctctttgcaccaaaccgtattttctaatatcttctacaatttttttagcaatgttagacggtacagcaaagctataaccttcaaaagtacccgcaccggaatgggaagcaatagcagtatttatacctataagatcgccgttggtattaaccaaagcaccaccactattcccagggtttacagccgcatcggtttgtataaaagattcaatagggtttttagagttagatcttagtatatctaaactacgtcctttggctgagataatccccgcagtcacggtagaagttaatccaaatggattacccacagctaaaacccattcacccacctttacattgtccgaatcataaaaatttaaaaaaggcaagcctttttcttcaatttttagtaaagctatgtctgaattgggatcagtcccaactaaggtagcggtataagttttttggttgttaagggtaatttcgattttatcagcgccgtcaataacatgattgttggttactatataaccgtctgatgagataattactccggaacctaaaccgttaggtgtatctttgggttgttgaggttgtgatcttcgaggtgaattattaaaaggatctccgaaaaagaaatcaaaaggatcaataaactgttgtctttgttgctgtgggctgtaggaagaataattcttaacgcttaccactgcattgatggttttttcagcggctaccgttagatcgggcgggttatagcttgcagtgctatagcttgccgattggaaatagcctttttcattttggtcttttttaaatatttcgaaatcactaagatttgtgttttttttcattgcagaaaaaacacctacggacagtgcagctcctgcaactcccataaggatataagaagctacttttttaatttgaaatttgctttttttattattcatagtcattaaactaaattgaattattagttatttctcatttcaaaagtagtaccaaattactagtttgtctgtggtttaacatatatttaccgagtacctgacagcttatagttttcatatttttttacaaataatttgtatagatttgcttcctaaaataaaagtaaatttaaggatgaaaaatattttatccattcagtcacatgtcgtatttgggcatgcaggaaatagtgccgcagagttccctatgcaacgatgtggggtaggtgtgtggtctttaaataccgtacaattttccaatcacacacagtatggtaaatggacgggtgaggttatgcctgcccaccacttattggaaattgttgaaggtatagacaacatacaacaattaaataaatgtaatgctattctaaacggttatattggctctccggaacagggaaaagctattttagaaatagtaaaaaaaattaaatccatcaatccgaatgctatttatttttgcgaccctgtgatggggcatccagagaaaggctgcatagtagcggaaggagtatcagatttttttaaaaatgaagccattcaagtaagtgacattatggcgcctaatttattagaacttgaaatactgacaggcttaaccatcaatcatatggacgatgttttgcaaggaatcaagatattacaccaaaaaggggtgaacattgtattagtgaaacatttaagcaaagcagctaaaagttcagatcaatttgaaatgatcctatctacgaaggacgaagtttggcatattgcacgacctttatttgattttggtactcgacaaccggtaggagttggagatttaacctcaggtttattgttgacgcatttattactaggtaaaaatggtaaagaagcattggaagcgactactgcagccgtttatgcggtaatgttggaaacctataagcggggagaatatgaattgcaattggtagcggcgcaagaagaaattgctaatccttcccaacattttgaagctataaaaatataattttctaaattttccttagatacattatattttctcgataattagaggaaaattcttgcttatatccgtaagtgtaaaattttatatcaatatagggatttaaggttgatacaaaattttctaattcttttaaaaccttcggttttgaaaaaggtgctaaaaaaattaatgctggttcaaattttaattttaacggttagggtgcagagggttaaataacaaaaaattattatttacatcaattggtaattacatggagttgttcaagagttaccatccattccttattgaactaagtaatagttaaatgagacagatcataaataatttcccaatgtttttttaattgagtagcaatccataacaaaaataaacctgcgtaaagtagagaaattgcaatgtctattttaaatattccattaccttttaaaaaaggagctaaagcataaataattagtataaataaaaacagggttaaaaaaaaactacaataaaaaaaactatctttagccctgctttaaaattaattccataaaatttatactctttcataaaactactcgtgccaatgtttttgtctccttaatttatggaatttgattgtatgaatttgtaaaaactttctttatgctggtctgatatggtaatgtattgctgatggataatgacttgatttttttctatggattgtatatgttcaagagagataataaaagatctatgtacccgcataaatcgatctttgggtaactcttcttccaatttttttaaactcattaaagttagaattggtttaggctcatcttttaaccaaattttcacataatcttttaaaccttctatatataaaattttatgaaagcttatttttatttgtctgtattctgactttacaaaaaaatactccggagattgttttttatctaactctttttgctcttttgcatgaattaattcaaaccattctttcgctttgtttgtcgctaatataaattccttataatcaaaaggttttaaaagataatccaatgcatttactttatatccttctagggcatattgatcgaatgccgttgtaaatattattttggtatggtcttttatggtttctgccaattgtaagccattcaattctggcatttgtatatctaaaaaaattaaatcaactttttgtttatttatgaagtccagaacttcaatagcgttgttaaattttcctattagttctaaatacgccgtttggtttacataattttcaattagttgaagcgccataggctcatcatctacgattatgcaagatattttattggaattcatttgtttttaatttaatctctaaattaacaataaattcattcccacaaatttctgaactatattcgtattgattgggatataaaagatccaatcttttttttaagttttgtataccaattccggaaccgcttttatccgttatacttttttgaaaattatggtttttagaaaataaagaaattctatcctcccacaatttcatggaaaattctatcacagaagtttgtgtggcggaaactccgtgtttaaatgcattttcaataattgaaataaataataaaggaggaatttgtatggatgaactaattttaggaaagtttactttcacttgggttttctctgtaagccttagcttcattaactcaatatatttgtttaaaaattctatctctttttctaatcgtacggtttctgtattggattcatagagcaaatatctcatcagcttgcttaagctatgtatggtttctttagctttttccggtgaaatatctaccaatgaatatatattgtttaaagaattgaagaaaaaatgaggttgaatttggtattttaaatgctgcaactcggcttgcaatttataattttcaacttcatttttttctgattcagtttttacccaacgttcgctaatacgaaatgcaagagcaaataccatgggaataatcatagaaatgctatcaaaatatataaaaaaggaacgtgagggtctggatggtcttctaaaatgaggatcttctgtaagcagtttaaatattaactcgtgctttaatatcactaatagagctataacaataacatttattgttataaaaattaaaattttattgttgaaaataaatttttttatcagccataaataattaatataaaacaaaaaagcatagattaataaagatacccaggaccttcttgctacaaacgataattcttcttgtccataagagaataaataaggcgaaatgaaaagtactccccaaacgacaaagtgcagaaaatatactaattttttgttttgtaaaaggcgaaatttattcatatcttaatgcatcaatagggtctaaatcagaggcttttttggcaggataccatccaaaaaatattccggtaactgtacatactgcgaaggaaataaatatggaaaaaagagttatgcttaccggccagcctgcaaaagttttaatactgtacgtagatattaaaccaattaaaactcctatggctcctcctgtaaaactaataagaatagattctattaagaattgcataagaatatcttttcctttggctcctacagccattctcaaacctatttctcgggtacgttcttttacggatacatacataatattcataatgcctattcctcctacaagcaaggaaatgcttgcaattgccactaaaagtatagttagcatttcgctggtggaattcatggttgaaagtatttcttgttgagaggaaatattaaagttatctggatcggatgaatttaattgatgggattccctcattaatgttgtaagctgatctactgcattggatgcttgttcttcgctaacggctgatgcaacaatggaatttaggtaagttatagctaaaactcttttttgtattgttgtaaaaggtgctaaaattatattgtcttggtcttgcccaaaagcattctcccctttagggctaagggttcctataacttttaatgggattttattgaaacgaatgatttgtcctatgggattttctccattgggaaataaattatctataaccgttttacctaaaatgcagactttagaataagaattgacttcttgtgttgtgaacatacttccatcaagaatttctaaattcctaatagatagatattccggagtaaccccgtagagagttgtaggccagttgttagctccatgtatggattgtccactgccattaaccaccggggaaatttctgtgattaaattggcatttttgctaagaaaatttagatcctttaaggttaaagtttgagaagcactcatatctaaacgtacgcctccttgtcttccagcccctgggcgtatggttataatattggaacccatggaagaaagactgtcttttatactttgtttagaaccttctccaatggctagcatagcaattacggaagcaacaccaatgatgattcctagcatagttagcaaagttctcatcttattaagcaaaatcgctcgaaatgatattttaaaaaggttagataagttcattttaatcggttttgttggataatttttgtaattcatccgaggcattaagtctatttttaatagcttcgtctttaataataaaaccatcttttagaactatggttctatgactaaataaagctatatcgggttcgtgagttacaaatgcaatggtaattccttgttcgttaagttcttgaaatagtgccataacttcataggaggttttggtatctaaattaccggtagcttcgtctgcaagtaatattactgggtgattcactaaagctcttgcaatagctacccgttgctgttgacctccggatagttggctgggaacatgggttaacctactttccaaacccactctcttcaaagctgttaccgctcgttctctacgttctttggaagacaccgttgaattgtacataagtggtagttctgcattgtctatgcaggtggttcttggcaatagattataagcctgaaagacaaatcctattttttcatttctaattctagccaactgatctttggataaatttttaactcttactccgtctaattcataagtaccttcggaaggctggtctaaacatccaagaatatttaaaagggtagattttcctgatccactggaacccataatggttaaaaattctccttcttgaaccgtaagatttattccttttagcgcttgaacaatctctgaccccattttaaattctctttttaaattttctatatgtataatgggtttactcatctcatgtatttttaattatttgtaaaggttccttttaaactaaatatttaaggaatcaactattttttcttacttgctccaggtcttttaggcataaaaggactgctttcttgtttgtttgaagatgtaccgtcttgcttatttttcatactataaacaacttcatcgcctacttttaaaccacttataacttcaacatttattccatcgctttcgccaattttcactaatttttgttctaaaattccttgtttgtttctgatccacacatatttatcgtcatcattacttttattaatggtacttattttagtatttaattgatgttctttattgtatatttccaaaattttaggatccatggtgaaatttaatgccttagccggtaaagtaataatatcatttaattcttttgtataaatggtaacagttgcggttaatccgggttttaattttaaattgctgttatctgtaacaataataactgtataggttactacattagaggttacagtggctcctaaacgtacttgattaaccgtaccgttaaaagtaatggaaggataagcatcaaccgtaaaagttactctttgcccaacttgtacatttcctatatcagcctcatctacattggcttccacttgcatttttgtaagatcttgagcaattgtaaatagagtaggagtgctcatggaagctgcaacggtttgcccttcttctacttctttagtgacgataactccgtctataggggaatagatgttcgcata

SEQ ID NO: 2173 - DNA, 24218 bp, synthetic construct
  source 1..24218: mol_type = other DNA
  misc_feature 1..24218: note = Synthetic
attccaactgttgccacaggatcaataccattaacgtctcctaatacttccatagctaatgcaggtggaccagccatatttgtatcaaaaggatacgtacctggtgttatggtatttccaaaaatgtacgttccgctggtcggtgattgcgcacctaagttaataaaacttggtgtttgtactcctcctccaggatttataatgttgtattgtaacggcccagcatttacgctaaatcggatgaattctgttggtgttccaccacaagcaactaggtttgctgttgcagttggatttgctattgctgctgtagtaacaatagtttgccctgttgcattatcaagtccatccattacaatcgtaataggaatagaacaagcaaccgcagtgtaactatgtgttcctgttgttactgtggcaaatcctaatgtttgtcctcctgtatctttgtaaatcacgtatccattggttactagagcaccactacaatttactacagttcctgaaacatttacaggtaccgttgacaaagtagctggaagtgttaaggaagttgctccagtatacggtccataagttcctgtagaaactacggtaccgcatggatctgtaactgtaatggttaatacttgtccacttggaatttttccacttacgacaccacttgcattggtaacggcacttcttgaaaaagtactgtatgaaatggttacggtcatcccagataatggtgtagttgttcccgattgcacaacagtggcatcaaaatttactacaggaaatggtgcatcgcaattccagaatgaaaaatgggttacttgtgctacaaagtgcgttccgttgttgatagctactccttcttctacccaaactcctgaattttcatcaaaggaccatgttggtattgaacctggcgccgctcccatttggctaggatgaattggaatttcaatttgtgcaggatttgtaatttgtaatttttctccagcacttcctctcatttctacactgatcattccatacgaacctaaagcaacttcttgataattggcgtcaattccatacaattctccaggcatggtattagcagtatcttccgataaaggatctaaatagtttgcagtaacgtagacattaccattgtatggatttccgttttcatccatgaaaccaccattaaagcgaatgtatgtttcaccaatttcttctgaattaatggatatttcgccaccatcagatgtaattacttgcgcattacctaaactgaatagtttgatagtaaatgaattagatcccgtaggtaccataacacgcgatccgttggagtatccttgtgcagatgcttgtgcgtaggcaaagttttggtttacaatgacattgataaaggatacgataccatttgcatctgtaacttcttgttgtccacccaaggttaccgtagcgcctataatcggctgattgtcttcatcaatgactctacctataaaatttccttctacttctcttcctttgtactctctgagcgctctttcaatgcgttctgagtctgcattttcggctttttgtgtggtagtagcagttacggcgtcttgcggtatttgctcttctttttggcaggcaagtatggtcactaagattaaggtacatagcgccaaatactttttaaaattttttttcatggtgtattggtgttgattaaataattcctactctattaaagcttttcggaattcgcttacgcgatacaaccattagaaattggggaaaggtattattgtaaaatagagtgcaaaaagtgtggtataaaagtaggtaaggtgtaagtatccatatttttgtatctttttaaacaataattaagtaattaaaaacttactataaatatacgtaattatgtaagaaaagttttaagtaaaacacttacaatgtttactgtttaaacggatttatgaacacggagtacttttgttagtttttatgaattagttgaataaactttcatacaaaatagaaagttaagaaatgtagaaacaagaaaggcgagtaaccaactcaattttaaaatttaaaatactgaaaatcaatattttaaattttaactttaagctgttttaagcacaaaacgtattcatttttgtattcagttttactattaatagattataaaattattaaaaaaggatgaaaagagaagtatctattttcttttttataattttttaccaaaacaaaactaagtttaagtaattacggaaagccgtaaaattcagaaatactttatgtataacttaccaacaattaaaagtgctgaatagtagccaaaaatcaaattctattttgattattcatcaccaaattataccaattaaactatacaatgcgactttagaggcgaagttgctttgatctcatagaacgccgtgaatattttgcatagccgtagctacggaaaatagtcgcaaggaattaggagaccaaatgaacgagtttatatattgtattgtatagtttaattggtatgaatctccaaacttcagaagacataataagaattcaatttcaaaatttaaaatacccaatagtagaaggttatatttctaaaatttgaaattatgctaaaaccgtaattcaattacttttaaaacataaaattatgtataatacattaaaagttatgttttataaataaaataatagtactttcacaactcaaaacaaagttttttcctcttaaatagtaggttttaaactattatttttaagaggaaaccttgttgataatttaagtttttctgaaatatctaaatctatattctccccaaatctaaatgatagatactaaaaaaactcaaactcctttgattgtattgctacgattattaattatttaaagtaaaaattatgaagcaaaaatttgcaaactatttcaaactaggaatccttcttgtaggactttctttatttctacaaggctgtcaagatgacgatcagcttgttgttcaaaacgaacattctcatctgcaaaaagggagaattgaaaactacagtaagctcaactcttttgtagaaaaaattaaaaagaaatcagacaccataactgatggcaaaacaacatctttagaacaaataaacggttttgatatcctctacaatcaagacatgtttatacaggacgagaatggtcttactaccttttctattccaatttacaaacacaaccaagaggggaaaacatttagcaaccttatcgtaaaattcagtgacactgcaccaacagaagcatttattttaaattattatccaacggatgcgtatatggatgcagcagctgttgatgagcaaacaccgtttgcagggaaaataaattcagagcccgtgagttatgacggtagtcttgatcacataaaaagtttgggagaagactgcacaacaattatcgtaaaatattgcaattttggtgaagaagatggtggtgtacatttaggtggacaaaattgtacggtcggttattattggtttgaaacctataccttatgtcccgatgatgaacctagtttagtggatacgccatcatcaccaggaggtagtggaacagaatctacaacgaatcctattgattattcaaatgcaggaactagttctaacactacttctataactacacaaaaccctgtggttgtaccaaatgtgccagacatttataatgatcttggtattgacatcccattagaaatgttagaatgggtaaacagaccagaaaatgaagactttaagcaggaaataaaagatttactaaatgaggaagatccaataaatagaaaagaacttgaagcatatttattgataaagtctgaaacatcagatactccgtggcaagattattcgggaacttttagaaatgttacatccttaccatattcacaaattcgacatgaaattgataatgttaaagggtatacatatactgaatacaaacttaacaatggtgatacaattttagatggggatttcgcgcaaacaattacgaacggtgtttctcatactgccgaaccattacctataattttttacaatagtaaagaagacaaaagattatttgaaattccgcatccatataacaactaccctagtgttgatctaaatcaattatggacaaacttttgggtggcagtacaaacaggtattcgttattgtacaccgttagaagatgttgttattcttattgaaggaaaagattttgatggcgctgaacaaagtagagcggttgcaggattatctatactaattgacaatacaccttttgggaaagtattcaaaattataagaagagcaggtacagtgattagtaccgccacaccagttgtaagaaggtatgctacgaatgtttacaaaactcaaagaaaactagttaagaaacataaacccgatatagcgacagcatctaatacaaggaaaggaaattggtcagaaatgggaactgatgttgatttaattggtaaaggttatgaagatttacacgttgatagaattactgatattgatttgccttcggcatcaagtcgcggtatagatcacgttttcaaaaatccagaaacagggcaatacataatagtagagtctaaatacactggttcatcttcattgagcacactggcagacggtacaaggcaaatgagtgatgcttggattttaggaaataatagactatttgaagctgttggtgaaaatccaaatttatacaataatattattaatgatggttatgaaagagtacttgcaaaagtatccccagatggttctatcgtatataaaaaaataaatgctgatggatatgttattacaggagatgcaggagatttcacaccttaaatttaattatatttgtttgatgaatgataaattaaatattgaaaatctgttcagtctaaagaaagattttataagaataatagaagaaacagaagagaaattaagaagcaatctcatttcttcggatagaattaaaacagtcaagagagtacaagttgttaaatatataaacgtatttaatttttcatattgtattaaatctgataacacttttttgaaagaaaaattagaagaacttcttgtaagattacctaattattggattcaagaaaaagtaaaagttcatcatggaagaaaaagaattgaattaaatcaatactatttagatgcgtaccatcaaatgttgactattatttctttatgtattctattagatatttcaaaagaaaaattttctcccatagttgaacttattgacagagacaacgtgaaagatttcctttatgaaaatcttataaggtatcattttccaaatcgaaaagtgataaaagaagaatcttattctaaatttttggctattccaaaaatgaataaacggatagttaatattttagatgaagacgacaaaactactttgataaaaagtataaagtcatatttggataaatattggtataaggttcataaggatttttcatggtataacagtcatatcaatcatcctaactccttttatggctattgggcatttgaagtggcggctattgtcaaaattaaaggtttggatgatagttcctttaaggacaatacatattatcctgatagattagtataaattataaacatgagcgttgtgattgtttacaacgctcacaacttactatatgaaaaaaatcataaccattttactatgtatgagttttttcttttctttctcacaagaaataaaagaagaatttaaaggggaaattcacatagtatataaaacagttttgtatgacgaggaattattttcatctgacgctgaacgttacttagcaaaaagtgactccgttgtcacaatagattatttgaagaatccgaatagtccacaaaataaaaaatattcgagtctcgaaggtcatttaagtaacaatagattaatgaatatgattttgcttcgttacaacactgggagcgatttgaaaagaccaaaatatgatcgttgggtatatactgattcatttattaaaatgtataaatacttaaaaaaaccatatatactagataaacaaacaaatacatatttgaatcgctatacgaaaaagccaatgagtattgaccgtgtactggcggagtacaagtttactaatatgttacttaacaatattgttgtagatactagtgatataaaagttattgctggtatcaaatgctttaaggttacattctatggaaatagtaatttttttgatatcataggtgaatctgacaaacgagttgttagtgaaatgtatgttaccgatagtattcgttcaaagtataacccaattttgaataacataccatttttagataaattttaccctatgtatttaaaaacttatcatacaggtattagaggtcgctattctgaaaggttaattgtaaaactatctgattattctgatgtgagtaaaaaagaattggaagtttcatacgcaaaacttaaagacagtttatttgctgaatactttacaaatattgaaattgaaaaagcaaaagaaagggcaaaatatatgcctaaaatagagaaaagagagcctgtacctttcaaagaacaactagaagtattagaaagtttaggctataaactaaacccaaaagcttctctaaaagacatggagaaggaacttattataaacggtgttattgacactgtcgaaatttcaatggaagatttttttactacaaatccatatagtagtttatattatcacatgggttggactaaatatgataaagagacaaaaacaatgattccatatacaggaaaatgtatttggtacgatttagaatttattgatccttcaagtgagtacattacgttgatgaaacgcatgggcgatataactgatggagaactttcgttttctaatataagcatgcatactgacaaagaaaattatgagtggattcattttaaagttaatggagtcaaaaaagagtggaaattggaaaaggtacattatattgctgattcttatttttcacgttttgcactgctaacagaagaatttaaaacaaaaggacggtttacgtattacaatagcggatcacagcaatttgttattgattacgcaacacccgaagaacaaaaaaaattcgtagataaaacaggattacagcgagaatggcttattgttggaaaacatttttctaagccaaaagactaagtttttactttatgagcttcgtaagttttgtatttatccaaaacttttaaaatattacaatgttttatccatacaaaaacaagggttttgccctatttttttaaaaataagcacaaaagttttttactactatactactttttttactttagcaataacatttcttaatacgtaattagtatatttcttaccaacggtattttcatatacatttgagatttaagtataactaaaatctctttataaaatgaaaaaaggaatcctattagtagcgtcaattttagcaatgtttttatgtaccaactgcgaacctaataatttagcagaagatgaaattgaatttcaagcaacggataaaaaagacagcgtcaactccaatggaggaccaaatccaaaacctagtaacgaggaagaataactttctgtcaaaatatcttcacctactattagcggtggtttgtactaccgctttctttattcatgaatcaatagatgatgttccaaaatcatattcagaagtcgttaataaatatctttctgaaaaagaaaaaagaaccgaattattgaatattttcaaaaataaatttgaagattcagaggaatacagggcatattatcaacaaaaaattatcacaaatgaagcttttgaagaattagaagaagtctctcaaaatataagttttcttggttttgaagatttccaacaattcattggtgaatttggctgggcattgggcttatttttatatgcgctttttaattttatcaatacctatatggaacccaacagatcaagaaaaggcaaactatttcttcattttactttaataaccatttctttatacttcatatattgggcattatatcaatatcaagattttgaaaaatttacttacttgctattttcaattattacctcaatactcattgcattcggtgtacatctcattcaacacaaacggtataaattgattaaatcatacattctaaatcatagagatttaatcggatttatactgaaaaataccaaaaaagaaagtgaaccagaaatgtggaaagttctaaaaaacatcaagcatgaacgagattgacaatgatgaaaacataagagaactcaagcgacttcatgacgacggacttcttaaagatgaagacttagttgaaaaactaaaagaaatactcaagaaaaaagagagtttacgggacgctattaccgagcaaaaaaatgcaaatattgatatcgtactaaagcactttacagtacatgatcttttgttgttaattaattatgagatttaagattttaaagcatttaggtattcttttaactcatggagacgctttgtaacacctttttcaaccaaatcattgacaaacaatttcaaatactctgacctttcaaagtattcatcttatttttcacaaaatgatctataatttcgacaccctcaaatttaactccgtgcttttctaaatacaaattgtctttgtactctaaatattgatcgccctcaccacttactatccaatccttagaaacatgataatgcttgcacaatatatctgttaagagttctaaagtgcttcttcttggggttgaagtttttccatttttaatcttatcaactgatacttgtgaaatcaatccgttagatatttcttccactctgtaaccagagatattcaattcattcagcacttttaaaatacgttcgagcatttttatatttattttacataattagttctttattttgcaaaacttatgtatattgcaaaagaaattatatatcaaatatattaaatgtagtgttactcacatacttaattgtgttttggttttgaaatatcctccgaatttgattgacaagaacatattaatagctaaataataatcaacttttaaatctaaaaaatgatatttagaaagctagaaactgtaaccgtacaaacagatgcatttaccacatgggaaatatcaatgttaattattggaataggatgcttcgggatattgatattcctgtccatcttactttacaactatgtacaccgttttgatttagatgatgaattacacagataaaaaacacgtccgaatgcaatcatttttttaagttcttactagaaagcacttcccttttttttggtgctttacattcaagacgtgtttctatgcagaattttagtcagttctgctgtttagggcaaggcgacattggtaaggttaaaacttgtcgtcttgctatctaaaacaaaaataataaaagtattcattgaatagatatgagtttacaaaaattagagcgatttcggtggtttatcattggcttttttgctgctatattattagagcttctcatttttgtattagcactattatgttatctataactaacagaataatttacctattaaacctaatttatcgtaaaactaacgttattctgaaagcgagaacctcaattgtaatgattggggttttctatttttgttgcaagttgttgcaagttgttgcgttttgttgcgttttgttgcggactgttgcattttgttgtagactaattttaggacaagactaaaggaagtataggttttaccaaaaagaaaaagcgacatcattgatgccgctttaaatgttttcacaacggaataatccttattgtgaaatgctttcattttgtactgcaatatacagaaaagaaatagaacaaaattgtggttttccgtattgttaattaaaacttttacttcatatttataaaaaatcagatttcatgaagaaagttttaggattagatttagggacaaattctattggttgggctttggttaaagaagcagaagagaaaaatgaacactcaagtattataaaattaggagttcgggtaatacggtatgataattttaataaagtagataaagtaggtaatgtttctgaatccaagaatccaatagatgatttcaagtctggtaaaggtctttctcctaatgctaaaagaacaaaaagtagaagtgcccgaagaaatttacaacgatttaaactaagaagaaaaaatcttattgaaattttagtaaagtattctatcataaataaagatacattactcaccgaaagtggaaaaaacacaacacatcagactctagagttacgctctaaatcagctaaagaaaaaatacctttagaagcttttgcacgagttttattggcaattaataaaaaaagaggatataaaagtagtagaaaggtaaaaagtgaagatgaaggggtttccgttgacggaatggctattgctaaagaaatatacgaaaaacaacttacgcctggtcattatgtatataagtcacttcaaaatggtaaaaagtatattccagatttttatcaatcagacttacaagcggaatttgatacagtttggaataaacaaaaacatttttatccagcgactcttacagatgagttttataaaaaactcaaaggacaaggacaacaaaactcacgaaaattgtttttagctgtacatcaagtttatactgctgaaaataaaggtaaacgggatgaaaaaaaattacaacactataaatggcgtagtgaagccataaccaaacaactttctattgaagaagtagcgtatgtgttagttgaaattaataataatattaataaatcaagtgggtatttaggcgcaataagtgatcgtagtaaagaattatattttaataatgaaactgttggagaatatttatacaataaactattagaaaacccacatgtttcactaaagaatcaagtattctatcgacaagattatttggatgaatttgaaactatatgggaaactcaagcaaaatatcacaaagaacttactaataagctaaaagaagaaattcgtgatattgttattttttatcaacgcaaacttaaatcacaaaagcatttgatttcagaatgtcaatttgaaaaacaccataaagtaattcctaagtcctcgcctttatttcaagaatttaaaatatggcaaaaccttaatcatttagtatttaaaaatactcaaaccaaagaagaagtttcttttgtagacttagatgaagaaacaagacaccttgtttttgaggaattgaatctgaaaggtagcttaaaaatgaaaaacgttaaaaatatcattggttttaaagcacctaactattggaaagcaaattttgatgatatagaaggtaatcgcactaatgaaggattgtttaatgcttacaaagcaattgcagaagatttaggatatggttttaattgggagaagaaaactgcgtacgaaataaaaacagaactcaaagcaatatttgtagaagctaagataaacaccgatattttacagtttgatactgatacagaaggaaacacttttgataagcaaaaaagctatcaattatggcatatactgtattcggcagaagacactgacaaagcttcggaagaagataaattagtgtatggaaatattcataccaaactcaaaaagaaattaaatcaaaagtttggttttgaagctacttatggaagtttattgaccaatatttcttttcagcaagattatggaaatctaagtgcaaaagccattaaaaaaatacttccgcacttgaaaagtggaaacagtttttcacaagcttgcgcattgaatgggtataatcattccaatgctttaacgaaagaagaaagtgaaaatagaaatttgaaggataaactaacaatattacctaaaaatagtttacgaaatcctgtagttgaaaagattctcaatcaaatggtcaatttgataaatcaagtaattgatgcctatggaaaacctaaagaagttcgtattgaactggcaagagaactcaaaaaatcagctaaacaaagagatgaattgacaaagcatatcaatgatgccacactaataaatcaaaatattagagtgatacttcaaaaagagtttggtgtcaaacatccaactagaaacgatataattcgatataaactctatgaagaattaaaagataatggatacaaaacgcttttcacgaatcaatacattccgagagaacgattatttactggagagactgaaatagaacatattattccaaaagcaattttgtttgatgattctttttcaaacaaaacattggcttatagtgatgtaaatagaaaaaaaggagattcaactgcactggattttatagctaatatatattctgacgaattagaaaattataaagcacgagtagaagctttgcacaaagcaaaaaaaatcagtaaaggaaagtataaaaaattattgatggcaagaaaggatttgccaaacgactttattgaaagagatttaagaaacagtcaatatatagccaaaaaagccacacagatgcttcaagaagtttttagaaccgtaacgcctacgagtggtagaattaccgataaattacgggaagattggaatcttataaatgtcatgcaagaattgaatttacctaaatataaaacacttgggctaacggaaactcaagaacgtaaaaaagggaatacagtagaacgaatcattgattggactaaacgaaatgatcatcgccatcatgcaatggatgcgttaacagtagcttttactacaaacagacacatccaatacttaaataatctaaacacagcacatggacttgatggctctgaaattgatcatgaaaaaagcaagttgtataggataaagaaagacattactaaattatataaaagtggaaatacccaaaaacgcaagttcattcctccatcaaataattttaggagtgaagcaaaaaaacacttggaaacgatcttaatatccttcaaaaacaaaaataaagtcgttagcaaaaacaaaaacagaataaaaactggagaaaaaggtgttacctacgaaaaagttcaattaacaccgcgtggtcagttacataaagaaaccgtctacggacatgtaaaaaaagaaataataacaacagaaaaagtttcaaataaatttacgatagaaaaaatacaatgggttactaagcctagttatcggaaagctttattaaaacgcttagagacatacgaaaacaatcctaaaaaagctttttcaggaaaaaacagtttgcaaaaaaatcctttgtatatagatagtatttcgggtaagaaagttcctgaatctgtaaaattgaaatcctttcaagatgtctatgttattcgaaaagaggtaaatcctgaaaattttacgaattccaaaagtttagaaaaaattatagatgttggtatacgtcgaattttacaaaaaagacttgaaaaatatggggaaaaagctaaggaagctttttcaaaccttgataaaaatcctatttggagagatgataaaaaaaaggttgctatcaaaaaagtacgcatagaagcactcaaaaatgcagaatcattacatactaaaaaagatcatacaggacatgaaatgcttaatgagacaggaaaaaacacccctgtagactttgtgagtacaggaaataatcatcatgttgcaatctactgcgatagtgatgggaaattacatgatgaagtagtgtctttttacgaagctgtttcacgggttaatttaggtatcccaataattgacgagtctcttaactcgcatttgggctggaaatttttattcactatgaaacaaaatgaaatgtttgtatttccatcagatgaatttaatcctaaagaagttgatttagaaaatccaaaaaataataagtttatttccaaacaccttttcagagttcaaaagttttcaaaagttacttatggtaattctgctgttagagattatgtttttagacatcatttagagacagaattaatagataaaaaagaattaaaaggaattgcttattatcaattaaaaagtataggaatgcttgaaaaactggtaaaagtaagaatcaatcatattggaaaaattgtacaagtaggagaatattaaaaaataaaaagtcatgataaagcgttcgatttatatcggttcccccgcttatttaagactcaaacaaaaacaattagtcgtagaaaatcccgaagataagagcatcaaaggaaccattcctattgaggatatggcattactgatgctcgatcattatcaaattacattgagcaaccaattattgctaaaattgcaaggaaataatgtggctattgtaagttgtgatgcacatcatttaccgttcgcagtgatgcttcctttatatggacatacggaacattcagatagaatcaaacatcaattacaagcttctgaacccttaaaaaaacaattgtggaaacaaactgtggaacaaaaaatcaaaaatcaacaggcacttttaaaattgaataacaagccttacgaacaaatggatttgtattggcagaatgtaaaaagtggtgatactacgaattgtgagggtaaagctgcgcagcatcattggaaacatttatttgaaaactttacaagagagcgtcacggttatgcacctaacaatatgttgaattttggatatgctgtattgcgtagtattgtggcaagagcattagtgtctagtggtttactgcccgtattgggaatatttcatcgtaacaaatacaatccgtactgcttagcagatgatatcatggaaccgtacagaccttttgtagataaaatggtatacaactatgtagcacaatatggagttcctgaaaagctttcaaaagatgttaaagcttatcttttaaatatagcgactcaagatgtatggattgatggcgtagaacgtccgttgctagttgctgtaactactactacggctagtttgtacaaatgttactatggagaattacaacaaataaaatatcctgaactcgactaaaatgacactatgcaactggatacaaatcgttataacgcatacagaatcatgtgggtattagtattttttgatttaccgacggaaactaaaaaagaacgtcgtgccgcctcacaatttcgtaaaaaattgattgatgatggctttacgatgtttcaattctctatatatcttcgccattgtccaagcagagaaaactctaaagtccacacaaaacgagtcaaacggatgctgcctaaacagggaaaagtctgtattttagaaataaccgacaaacaatttgaaaaaatggaattatttcatggtgtaaaagaggttgatattccgcaacctgtacagcaattagaattattctaggattaaaaaaatcaactaaaatttaaaagtagaattaaaaaaagatcattttttaaattctaaaaagtaatcccgaagtattgatattcctcaacaattcgggattgaccttgtgatcgctcacgtaaaattacaaaatgaaagcagttcacaacctgacatattactactactgacatattgaccttgtgatcgctcacgtaaaattacaaaatgaaagcagttcacaacacatatactgacatatattgatactgacatcttgtgatcgctcacgtaaaattacaaaatgaaagcagttcacaacacatatattgacaaagatactgatactgaccttgtgatcgctcacgtaaaattacaaaatgaaagcagttcacaacctattgacaaatactacttacttactgacacttgtgatcgctcacgtaaaattacaaaatgaaagcagttcacaacaagtcttcataaacattcctaaatacaaaacttgtgatcgctcacgtaaaattacaaaatgaaagcagttcacaacaaacgcgcattaactattgcaaacatccaacttgtgatcgctcacgtaaaattacaaaatgaaagcagttcacaaccaagtggttttgtttattttccagttactgcttgtgatcgctcacgtaaaattacaaaatgaaagcagttcacaacagttcaacaatttaaaatcttataacgatgcttgtgatcgctcacgtaaaattacaaaatgaaagcagttcacaacttgatcgttgttgctccaattgccgctattcttgtgatcgctcacgtaaaattacaaaatgaaagcagttcacaaccactacttgcgctattaccgtttagggggacttgtgatcgctcacgtaaaattacaaaatgaaagcagttcacaaccctttattagaaattgatttcaatgatgcacttgtgatcgctcacgtaaaattacaaaatgaaagcagttcacaacgccaacggcacaagctgaatattttaaaaacttgtgatcgctcacgtaaaattacaaaatgaaagcagttcacaaccgccaataccgcattaactacttcattagacttgtgatcgctcacgtaaaattacaaaatgaaagcagttcacaacttaaagtatgtttgaagctctaaatcttctcttgtgatcgctcacgtaaaattacaaaatgaaagcagttcacaacaagtaaatgtcagaggtttttgcttacggacttgtgatcgctcacgtaaaattacaaaatgaaagcagttcacaaccgcaaagtagatcgtccttggaattgggatcttgtgatcgctcacgtaaaattacaaaatgaaagcagttcacaactaaaggatttagaatggttttcaattgcttcttgtgatcgctcacgtaaaattacaaaatgaaagcagttcacaacctactgctgattatggtagatatttggatacttgtgatcgctcacgtaaaattacaaaatgaaagcagttcacaactcattactaaaagtaagagtaacaaaaatacttgtgatcgctcacgtaaaattacaaaatgaaagcagttcacaactctttattagcaatggaatcaatgtgttttcttgtgatcgctcacgtaaaattacaaaatgaaagcagttcacaaccagattgtatgataatgcgggaaacaatgtcttgtgatcgctcacgtaaaattacaaaatgaaagcagttcacaacattcgcgtataatgtcacaaattcaaattacttgtgatcgctcacgtaaaattacaaaatgaaagcagttcacaacctaaagaccctgcgggattaggaatttaatcttgtgatcgctcacgtaaaattacaaaatgaaagcagttcacaaccgccaataccgcattaactacttcattagacttgtgatcgctcacgtaaaattacaaaatgaaagcagttcacaacactgaaagcataatgaaagaaaaagtttatcttgtgatcgctcacgtaaaattacaaaatgaaagcagttcacaacttttttgattttgtacccacttacacgcgacttgtgatcgctcacgtaaaattacaaaatgaaagcagttcacaactttttgtatgatggtttacaaaatgaaagcagttcacaacaaaagccctgtatacagtgtcatagctgtacttgtgatcgctcacgtaaaattacaaaatgaaagcagttcacaacacaaaataaagtattaattttagtgtatgacttgtgatcgctcacgtaaaattacaaaatgaaagcagttcacaaccagagttaactttatcgtagcttgtgcgatcttgtgatcgctcacgtaaaattacaaaatgaaagcagttcacaactagctttttccttcataggtagaaataacacttgtgatcgctcacgtaaaattacaaaatgaaagcagttcacaacagttggttccaacatacattcatgtagaaacttgtgatcgctcacgtaaaattacaaaatgaaagcagttcacaacacaacaagtcaaagtgtagacactaccaaccttgtgatcgctcacgtaaaattacaaaatgaaagcagttcacaacgttatcgacgaaattctaaataatttcatccttgtgatcgctcacgtaaaattacaaaatgaaagcagttcacaactgcggtgtaattaatccgtgttgtgtgcttcttgtgatcgctcacgtaaaattacaaaatgaaagcagttcacaactggcacgagttgtccccgtttttacagcatcttgtgatcgctcacgtaaaattacaaaatgaaagcagttcacaacagtgaaatgcaattaaaagacgttgaaatacttgtgatcgctcacgtaaaattacaaaatgaaagcagttcacaacacacctgtcacgctctgcacttgtgccatccttgtgatcgctcacgtaaaattacaaaatgaaagcagttcacaacctttctatttgaaaataataacctctttgccttgtgatcgctcacgtaaaattacaaaatgaaagcagttcacaactatcatcttcagatttagtaccagcgatgtcttgtgatcgctcacgtaaaattacaaaatgaaagcagttcacaactataaagaattaaggtttttgttaagcgtccttgtgatcgctcacgtaaaattacaaaatgaaagcagttcacaactttgctatagcgttatttgcaattctgtcacttgtgatcgctcacgtaaaattacaaaatgaaagcagttcacaactctacgatgattattgaaatgataactccccttgtgatcgctcacgtaaaattacaaaatgaaatctataccaaaatcatacttttagctctgatttttaatcgtttattaaaggttgttttttactaaaaatattctctgagattcagtgtagcgaaagaattttattgaactaaaaagtttcaaaggatttatttcatttttcctaaaagtaaacatacacagcctaaaattgtaaacactaccgatcgtaacataatagttgtagaatatgttcctgcaattataaaattataggcatcgcctcccacatattttttattcatacctccaaacttttcatcataaataaatgaattttccttttgaagcatgtattcaaaagagtcataaaagaaatatcccgctacaatgaggaataaaattcctgctgcaattaaagtattattaatatcattttttttcataaaatattttgtaattagttattatttgaacttatagaatcttttgaacaaacgtatttataaaacatgtggtcagataatggttttaatgattttcccgtttcagggtgtaagcctaatgaagtaaagtattccaattcttttttttgatttttaccataccatacattaggagttccatctagttttttatattctgtctggcaatcagcttcaatttttttcaagttattaatccgatctttattatataatttcaattctccaagatcatatttcttcaaattaaaagatacttctatataatgcgtaccatcccaaatcatccaacgttgtttgttgagttgcatgattactaaaaccgtaattatcgttaagagaataattataatgagccaactgtgtttttttaaaaacctcataacatcattttccttggcagaatctattgactctgaggaattgttgtgagctaatatattagttacaaaatcttcataattttgaaatcctaaatatctggcaaggttattcaataattcagtattcggactcatagcctgatctgtactttcctctataaactgctcgtaatatcttgagaacgtaattttgcttgttggaaaattgagttcaacactaaatactttttctaaatgaacggcaactccattcttagtcgttttaccactttgtctttcagctttcttaaaagcttcttggaatagtttttctttcataaaagtcaatgtttagtatttatcataagttcaacatgagttacacacgttgtcttcatcaatgttggtacatatctgttataatattgagtacttcttgttaactactttcctccagtttgtttgttcttttgcttcagcgtttacgaataaccttatccgcaataaggttttgcggagtaaacactacttgaagttgagaactaaagttgtttcaaatgggaagtacatgcttctttagttttcacttctacttcccaaaattcggagagacgtctcctaaaatttagcgtgcggcttgtctgcaatacacacctaagaacatttctaggcagccacactattgtcaaatttttaacaaatacaaaatgaagaaattatatgtactttcacttgtggttttccacattatcggatttcaatcctgtactcccgaagctttaaataatacaaatgatatacaagcctgctgtggcgatgaaggagaattgccgccacctccaccacctccgccacctggagatggattaggagactaatgttataatttagtactttagaggaatgaaaaataagataaattcgttcctcttttttattattgtaagtttcctttttggaagcgaatatctgtttagtcaaagtactaatgatagtattgcgtattatatagcgaaagttcaagacttcaatactgttgatgatttgataaaggcaagaaattatttagaacagaaagaaattgaattaaaaaggactgatttaaataggttgtatttgatttatcatttatcaagtgctgataaggcaattggagactttattaaagcagaaaatcttttagtcgaaatattggataatattcaacagttcaaatcttctgattatagagattattatcataaagcttattatttattgttagctaatatatacagagatcaaaaaaatggtgaaaaagcaatagaactttataacagggcttttgagaaagctaagatagcacatgatagtgctgtcatttataataatatctctaatgtttttaaagatgtttctaactacaaaaaatctgaagaagttctaaaaaaagcttatcctttaattcctagaatgattaagcaaaatgatattgcaaaaatttatgataatttaggttttgcaatgtccatgttgggaaataaaactggagaggagtatatgaataaaggactagaaataagactcaaaataaatgattatacaggattacattctagttacacacaactagcgatatattataaaaaatttaaaaaagactctttagctaaattatatgcttccaaggctttaaacactagtaaaaatattggaattccaaaatatagaaaaaaagcattaggattatttcttgatttttcagatgatgtatatatcaaagaatacaaaagattgaatgatagcttatcagatgcagaagcttcaatgcagaataagtacgcaatgtatagatatgataaagcaaaatcggaagctaaagctctaaaagctgaaaaaaaggttttagaaagtgaattcagaatgttaatgttcgcatttctaggaggattaatatttatagtagccgttttttggattgttactcaacgcaatcgaaataagcgacatacgcttgcagaaatctataaaacagaacgcaatttttctaaaaaagtacatgacgaattaggaaatgatattttctatttaatgaatcaactacaaataaacccagcttctttgttggaaaaagaaggcttgcaaattttgaatggattaaacgaaatctatgtaaaagctagagatatttctaaaaagtataccaccatagagactggagaaagatatcacgatgagcttctctcacttttaaattcttttggaagtgatactactaaaattgtaacgaatgaaattgcattagacttttggcaatctgtttctactttaaaaaaggagcaattgtatagagtgttgcaggaacttcttaccaatatgaaaaaacacagtaaagctacgttggtaggaattacattcacaaaaataaaaaagcaagtcatcatcaaatatgtggataatggaaaaggagcaactaaaaaggaacttttagtgaaaaatggtttggaaaatgtggaaaaccgcatcggtgaaattaatggaactattacttttgaaacgaatccgagtcatggattcaaagcagaaatacgatttattcaatagccatgaagttcaaaaaagttttagttgcagaagataccgacagtagtaatattggtttggtatataagttgaaagaaataggaatcgaaacagtggagtcatcacaatcttgtgataatgctattttaaagttaaaaaaagggatacatgaaaagcgatatttcgatttattaataagcgatttatcctttgtgtcgaataccccaaatccaaaaatcactacaggagaagcacttattgaagaagtaaaacgactgcaacctaccatcaaaatcattgccttttcagttaacaatcaacaaactgttatcaaacatctcatcaatgaaattgatatagatagttatgtttgtaaaggattaaatggtacaaaagaactgttgaaagcaattgaacttattcaagaagatgaaaaatatttgtgtccaatttcaagtgcaaccttacatcaaaaaaatgtttttcaattagatgattatgaaaaacaattacttcagttagtggctcgcggtctaaaacaagatgagatcgcagtatattttcaatcaaaaggtatttcacctaacagccgacgttcggttgaagatcgtttaagtagacttcgtgataatttcaatgctagtacaacttcacaattgatttatctagcgcaaagcttagaccttatctaatattttctagttttatttttttacaaccgtggatttccacaagcgattcgtttttaatcagcataagtttgaactgttaaacttaaaaaagattaaaaatggcaagatattacgttaataaaaacgcacaatctaatggtgaccatgaagttcataaatatagttgtaattggcttccaaaaattgaaaatagaatttatctaggcgattttacaaactgtcgaagtgctgttaatgcagctaaaaaatattacaataaagtgaatgggtgttacttctgttctaatgaatgtcatacatcttaaaagaaaactaatatgaaagtagatttactagtaaagtttagtgtgacgaaggaattacttggtgataataaattagaaaagataaaggacatagttgtagatggcgaaactattttattggcatacacacatgtacgtgacaaagtatggtttaccaataagagattgattacaatggatgccaaaggcttaactggaaaaaagaaagaatttcactcttttccttactcaaaaattacttccttttcaattgaaaccgctggcacatttgatggagatagcgattttaaaatatgggttagtggttttggagtctttgaaattaagtttcataaaaacttagatatcaaaagaattggaaaatttttgagtgaaaaaattttataaatgagactacatataaaacatataacttttactctattactgctcaccttttctagtacaatcgcacaaacagtttatactacaaaatcaggtaaaaaatatcataaaattgattgtagatatctcaagagttcacattatcaaacaaccatagataaagcaaagagtttagggtatacagcttgtaaagtatgcaagcctacaatttcgaatactaaggtttcagaacaacaaatacttgaatatggtagttctcctgtacagaaaaagcaaaaaaaaagtaaaacttcgtcgcaatgtagaggaaaaacaaaatcaggcagaaggtgtaaacgcatgacgaaaaatgcaaacaaacgatgttaccaacatcaaaaataataatactttaactaattaatcattatggatatccaaagtaaactcaaagagctttcagagaaagtagactcaatgaaagaacaaatacagaccgaagaagctacaaagacagcttttgtattaccattcattaatctacttggatatgatattttcaatccaacagaagttgttcctgaatttactgcggatgttggattaaaaaaaggcgaaaaagttgactatgccatttttca

SEQ ID NO: 2174 - DNA, 24218 bp, synthetic construct
  misc_feature 1..24218: note = Synthetic
  source 1..24218: mol_type = other DNA
tgaaaaggtgaccttttttattttttcaatattttatatcacggtatgttgaaatagtgctactgtagcaacttaaaaaaaatgaattttgtacaaatgaaatacttttaagtagattgtatgcaattcaataggtcaaattgaatattgattaaaacacaaaagtaagataggtactaaaataattaaggaataaggctgtttccaaagtggaggcagctttttgtatcatatagtatgatgcttttttttgtacatatttcctgaataatatacaataaaaaaacatgtaaatacaaaaagatgtacgaggtggatttttaattttaaaaatcttttaggattaaaaacacacaacattatgaaaaaaaatatttcagatcggaaagatccgatgcttacaacccgtcccatacatgaacaaaacttttatattgtaaaatctggagaaacactcgaaagtatttcactggatctcatgcttgaaaacccccaatatcttcttgaatatcacaatcagcgctgcagtttcctggatatgattcctgagaacggaaaattaagatggatgcagaaactctgtgttccaagccctgaagatattctgaaaataaattcggtcatacaggaacagggagaaggaccgagtaagccattttccaatggaaaaatccctttcaatgcaggggccatttccggggaatataaagtcagacaaactgaaagtgatgatggagtacataaaagtgaatatgcctattcaatacattttaattatataaaagaagacgaaaaaggacattgtatttatttttcaatgagtgatttcactaaagatggtgaagaactggaacagaagatcaataatctggcttctgcgtttgtaaaaattatttacccggtaacgcttataataaacgggtccggaaagttggtggctgcaaaaacgcataaagagattcgggagatcatcaatgaaattgaagcattaaaaaaatatcatcagggttcttatgcatcgttgcatatcaatcagatgaaagataaaatggcgaattcaaaggttatctacagcagtttgaaaacaatcttgccggtacagttccttttcagctgtttttatcaggctcactataacatacaggattttgcggctccatacacagatgaattctcatggctggctccagcttctcccatcaggatagaaatcatcaatcaaatgttaacagaagaaaaatccggttgtatagaagttgtacaggcagggaaatctgtggattaccgcacggttgaagaactctataatgcagattgggaatacgatgagctggaaaagcctcattcaaaatcactgattgccaaacattctgcaatatatacgttgaaagctgaagatttttccgttcagagaataaaagcagagtttgatattcagattgctgattacgtaaagtctatgacttttgaactggaaaaattagcaggatagtaaaaagcacaattgaactaaaacaacacaaaagcatgtcagaaaatttatcagcacacgatgggaagcattttgtcgtccaaaaaggcaaagccagctgcaatcagggagatttattccctcagtttaaagtaaactctcaccaaaagcattattggaatcatcatgaaggtagggtagattatcttgcggtaacagaagaagatgtacagtttaaaccttccggaccaagttttgggaaatgcagattaaaacccacatcaggtgggcatttaccctgtgcatacgctccttccggaaaatggaagaaggtgtatggaaaggtgaaaattatgggtaaaagctgcctttctgaaatctctgaactgagttgcatcactggaggaatcattactgtgaaagaacacggccagagttcaattatgaatcgacaaaatataacgttggctgaccctcaaagttatcatcttattaatccgtttatggatttaaaagaatcacaggaagaactggaagaacccgatccgatttatgaataaagcatttcaaaattaaaaaacatggcaaaattgactattacaggtagtactcaacctgttgttggaaatacagaagcgtattcactttcggtctttgataacctggtgtcttccaattctttttcgtttccacctcccaaagtagaatggagcattcatgtaaaggatcggaaaggatggcggattactcatggaaatgcaaaagtaggggagaatataacgtataaatttactcataaaagcttaaaatataaggctttaagaattgaggtaacgagagggaaggacaaaggtgagctgtacataaagccacagccagctgtggaagctaaaatactccgtgtcgatttattagacattaattctcaacgtttgcagaaaggaaagcagcttcattataaagatactttaatagctaaggctcattgtgtgggaatgttcgggcataaagtttcttttaccttatgggaagatgatgcgataggcgaggggcatgatccggtcattaatatgatgaacaggatcaacccagtacctcttataggggaagtggatcatgaaggaattgctaaagtggttttcaggctgcccagctatactatggcggttcagattgcgaatgctcaggtagccagaggagataaaagtgaaggaaaaacccatgaatattatgtgacggcggaaatggtttccaaacatatcctcaaggctagtcccaatgtaaatgttgccaatccttctcatattcctgaacctccaaaaaagccaaaaccagaagaaaccgatcctgcttataagaaatcttctggtgcttcccaaaataaagtagcaaaaccggataagcccaaacctaaaacagaaacccccaagtttccacaaactccggcagcgaaaaaacaggctgatcctgaaggaaaaatattgaatgcagaatttacagatggtacgggaaaaccattaagaagcgctaaaactggggatattgtctctattaagatcagcagccagaatatgaaaggaaaaaatgtaaaggtccggatctgggaagaggatttttcacgctatagcaatgatctgatatatgaagtatcggtaaggttaaattacaatactacaaattttatcaatggtgtcgtcttaacaaaagatatgtataccaaaagcaacgattggggtgaaggtaatgaacgggaatacttcatagaagtagagcgcctgaatacttcagtaacctctcaggtcattccggtaaacccggatgctgaaccagtgaaagtggatgctaatgattctcctgcggtgattaaagagaagaaagaagaaaagaaaacatgtatttgtgaagaaagtaaattgtattggggcaaacattttacatgtctggagtgcaagaaaatcatagaaatttcaaaacggttgttatgtgatcccaatcatttgacttctgctatggcattggaaacaggaggtaagtttgatccaagtttggttaatgatttaggatatacaggtttagttcaaattggaagtgatgctgcacatgatattaatagaagaaaagggacaaatatagaagctggtaagaaagggaatctaaaaaatatgaacaagtttgaacagcttacttatgtagagtattatcttgagccttttagagcaaaattaaacactctggttgatttttatttagcaatcttaatgcccattgattgcggaaaaggaactcaagataatcatgttgtattcgataaaaatttaattctagactataattctaaaggagatgttattaaaaatactaaatggataagaaaaaaaggttatgctaaaaatcctgtttttcacaaagaaggaagcgaagaagatgggaaaacgtatgtatgggaaatagctaaagaaatagaagggtggtatagaaaaggagcgcttaataaagccatcgattttcaatgtcaaaaagatcacgaacataaaattgaaaatacaaaagattctaaatggcacgatcctattgataatccagaaatagcattgtttaatttcagcggaattgaaaaacctaaaggatcttcttttggtcttgttagaacacgtccgaatggaacactaaaaaaccatcaaggcttagatatttttgcaccaaaaggaactccagtaaaagcttgtttaaaaggaactgttgttttggtctcagaaaatgcaggtgcatttgggaagcttgttgtaatagaagtagataagggtgatttagataaagcaagaatggattataaattacaatatcaaggtgaaaaagaaaagggacctagctttggggattctgataagcgttttttaagatatggacatctcagtgaaataagtgtggaaaataagcaggaagtaacagcaggtatggaaattggaaaaagtgggaatactggtaatgcatctaaacaaaatatcaaggcaagacatttacattttgaaattactgatgaaaagactgcaggtgaaggtctaaataatagagaaaaccctgcattttatgtaaggcttaaggctcctaataaaaatagacaagaaaataataaaagatgataaagtacctatatatattgatggcattaggaatgttttcatgtgtaaaagatagaacagtaaaaaatgatatacaaaaggattctatacctttattagctccagaagttaataatattaattcagaaaacagagatacgttgaaatttgaaaatgaattagaaggagaagatgagtttatatctgaaaaattatttcaaaagtggaaaggcttatatattatggaaaataatgatgtaattgatggttgggggagagagtctatttcttatgcagagctaaatatggtaaatccagatagttgtatctttaaaagttggttggcagataataaaggtaaaaggtatggtaaggatgataactatcaggaatatattggaggaattttcgctacaactaataaagattctatagagttttttaccaaaagaataatagaaggaggaaatgaaaatctctcacctctattaatattaattaaaagaaagaatgagtattttatatctagttttattacctctccaccgcataatgggattattgaaatgccgttacaaaagattcaataaaatagggatgagaataatcctattgattactctttttcttgttatgggttgccagaataataaaaaagataatgcccgtatggaacaaaaaacaatagaattaaaccatgagagtaaacttattgatgacataaagttagataaaaaccttctgtttgataagaagaatattttgctcaggagatgtaaatataaagaggattatattgaaaatattaagataaaagatcttttgaataaaaatttcagaagtcattttatagaatatttagctgattctaaaactgaggaggatgaactgaaatcttctattatttgtcagttgttattgctgagaatagcagaattatcagatagtaatgcattttatatattatctgagatttcaaagaatacgatcgtttcatataatgggatcgaactgtatgaaaaccttttcattcaaatgtttttaaatgatccttatttctttattcagcaaagtgtaaaatataatgattcttcattggtggattatattcttcaagtttcacaagggtattttgttgatgaagattttttagagatgaatttaggatacataaaatccactgaaaaaaatctattgcttttgaaatccgaagcccaaaaagatataaaatatcgtccattggttgaaaagattaggaaaatgcctaaaattgaagtacagcttggcccttcattttataccaattttgagacgataaataaagattttgtaaatactaattcaatttttggaaaagaactgattcaaaagatgaatgctacagagatgaattattttaaagaacatattcttcctttattgacaaattttcaattaaattctaattaaattagtaataaaatgactatatagtatagaaaataatgtaattgatgggtggggaagggaatctatctcttatgctgaattaaatatgataaagccagacagttgtatctttaaaagttggggggtagataataaaggcaaaagacataataaggatggtaactatcaagaatacattggaggaatttatgctacggctaataaagattcaatagagttttttacaaaaagaatagtagaaggaggaaatgaagacctatcacctcttttaacagtgattaaacgaaagaatgaatatttcatatctagttttttaacttctcctccccacaatgggattattcaaatgtcattacaaaagatcagataaaaacaaatccggattacacaactataatccggattttatttaaatatacttttttaaatcaaagaataccgagatctgagtttcatgctttttggaaagctttccaaaaccatattcacagaagataaatggtaaattattggaagtggcagaatcataatctgtctgagtgtctccaacgtacacggaattttcggtggataagccatttctttccatgagaagtcggatattttctgactttgttttttgagttcgcccatgagattcaaaatctacaaaaagagcttcaaatcgatagtattccaaaaaagattcaatataaccgtcctgacaattgcttacaatgaaaagattgtgagtattggcaaggcttttcaacgtttcttcaacaccgggataaagaataccgccttgtattcctaatacttcattttcccgggctacaacttctgaaagaagctcctgaatctgctggtccgaaaccccgggaagcatgtccttcagaatatcatgagccaataaacccatgtactgattcatatcgtcaggtttcagttcctgttgtattagttgatgcttatttagaacatcattccatattttgataatcgttgctctggaatcccacaaggttccatccagatcgaaaattaaatttttataattcaacgtgtttcttgtttaaaattaatatttctttactatgattgtgtcattccgaatacagactgaaggtcttgcaagcatagttcagatatgaagtgaagaatctaagtcataaatgagattcctccttcgtcggaatgacagcagtgtaaaattatgtataattgatatccttataaaatcatacttaactgtactctttttctcgcttcatccacttccgttaccttcactctcacatgctgatgcaatttcacgacttcatttacatccgatacgaacccatctttaagctgagaaatatgaaccagtccgctttctttgatcccaagatccacaaaacacccaaaagcagtaatattattgacaattcctggcagaatcatccctgctttcaaatctttaatactttttacattaggatcgaattcaaatatcttggcagcttttcgtggatctaagcctggtttctcaagttcttttaagatatcccggattcctaaaattccaatgtctccggtgatgtaattttccggttttaccaaggcgattttttccttgttggcgatcagttcattggctttaattcccaggtccttagccattttttcaacaattccgtatgcttcaggatgtactgcggaattatccaatggattttttgaatgggcaattcgtacaaaggcagcggcctgttgaaaagctttttctccaagccttggaacttttttaagctgttttctgtcttcaaacgcaccgttttcagcccggtaattcacaatattttcagccattttctctccaatcccggaaacatagcttaacaaagatttacttgctgtattcaggttaattcctacagaatttacacatttcatcaccgtagaatccaattcatttttcaattgggtctggtccacatcatgctgatactgaccgacaccaatggattttggatcaatttttaccagttctgccaatggatcagaaagtctccttccgatagaaactgctccacgtacggtaacatcgtaggttggaaactcatccctcgcaattttactggcagaataaacagatgctcccgcttcagaaacgacaaaaacctgtaaaggtctatcaaaagcaattttcttgatgaaaaattccgtttcacggcttgccgttccgttcccaatagaaatggcttcaatgttataagcatttaccatagaacggatctttttcattgccattccggattcattctgaggagcgtgagggtagagggtttcattatgaagaagatctcctttttcatccagacaaaccactttacagccacttctgtaccctggatcaatagccagaattcttttttctcccaatggtggagccagaagtagctggctgaggttttcagagaagatttcaattgcctttttatccgctttttctttagcttcctgtaaagcttcattagaaatagcaggttccaacagtcttttataactgtctttaatggctaaagcaatctgttcagaactttcattattagatttaatgatggctttttcaataaaatcaagagcttcttccttgtcaattcctacattggttttcacaaaaccttccgcttctgctctcagcatagccaaaagtctgtgagaaggagttctgctgaggttttcttcccattcgaaatactgggagaacttttgggcatcttcttcctcctttttagccttcacaactttagacgtaacaacagccttacgctgaaacaaacggcgcaggttcttacgaacgtacatattttcattaatccattccgccatgatgtctcttgctccctgaagcgcttcttcctcagaaaggacctctttgttcaggtatttggacgccagaaactgtatatcattgttcttctggctcatgatgatcttggctaaaggttctaatcctttttccttcgcagcatcagccttggtctttttacgttttttaaaagggagatataaatcctctaattcctgaatatcaaagctttcttcaattctttgacgaagttcaggagacaaagcattctgttcttctatagattttaaaatagattcctttcttttgacaatctcatcaaactgtttgttgatcttggcgatctgctcaatctgaatttcgtccaggtttccggttttatccttacggtaacgagaaataaaaggaatggtacagtcttctgctaataattgtaaagtattgttgatgctcttctcagaaatatcgagctgcttctgtataaattctacggtcgtcattgttctgttttcgaatagctaaaataacgttttatttttaaaagtatattttttttaataaaattatcacttaatacctaaatgattaaatttatttctatatttgcaaagtaatttctcaacaaaacttcatttaggtgattaagtgagctgtgaagttgctttcaaaattttttaaagtatgatagcctctcagaaatgagagatggataaaacgaaaaacccccagatgttggagcatctaagggttgtagtttagagttaatgtctaatacttaattaatttataatgaaaacaggaaaattaatttgctttcgctccttcaagcattggagaagcaaaaagatagtacatctatctaaaccattttgtttttattgcaaaaattgcaaataaaaatatttagcatttcggcagtcaataagattgccgaattttttgcaaatataataaaaaaaggcgagttgccccgccttgaatgttttcacaacggaataatccttactgtgaagtgctttcaaaatttattaattcaaagatataaaatcaaaatcaaaatacaataagggaaaccgtaaatgatattctttttttcttcttacatttatgaaatactaataccaaatgactatggcggagagaactttaggactggatttaggagtttcttctattggatgggctcttgtggaagaagatgtaaaaaatccggaaaataataaaataataaaattaggagtaagggttactcctttaacaatagatgagaagaccaattttgaaaaaggaaagtctattaccactaatgcagggcgtacttcagccagaagcgcacgtaggaatcttcagcgctttaaattgagaaggcaaaaccttttagatatactgattgaacataagatcataaagcatgatgctattttggctgaaattggtgaaaattctactttccagactcaatacttgagagccaaagcagctaaggaaaaaattgaacttgatgaattggcaagagtcctttttttgattaataaaaaaagaggttacaaaagtagtcgaaaagttcaaaatgatgatgaaggaaaagctattgatggaatgtctgttgcaaaagaattgtatgagaaaaattatactccgggacaatatgcttatgatttactaaacaaaggtaaaaaacagattcctgatttttatagatcagaccttcagaatgagttcgatcgtgtttgggaatttcaaaaacaatatcatcctgatattttaactgatgaatttaaaaaagaacttgacggaaagggacagcgagcaacaactgccatttttttgaatcgttataaaatttacacagctgataataaaggaacgagagaggaaaaaagatttcaggcttatcaatggagagtagaggctctttctcaaccattggatatcaaagaagtggcttatgtgattacagaaattaataacaaccttaataattccagtgggtaccttggtgcgattagtgaccgtagtaaaaaactatattttaacgggcagacaataggagaatatctttatgaagaactttccgtaaatcctcatacccggttgaaaaatcaggtattttaccggcaggattatcaggatgaatttgaaaagatctgggaaacacaagcaaagttccatcctgagcttactaaaaaattaaaagaagaagttcgtgatgttgttattttctatcaaaggaaactcaagtcgcagaaaggtctcataagtttctgtgaatttgaaagcagagaaattgagattgaagaaaatggaaaaaagaaaaaaaagagggttggtcttaaggttgctcctaaatcttcccctctgtttcaggaatttaaaatctggcaggtcctcaataatatagaaataaaaagtgaggatgaacgaagatatttggatccggaagaaaaagaattgctttttaatgagttgaattacaaaggaaattttacttcacagaaatgtctggaacttttaggttttaaatcaaaagaaactaaactcaattttaaagtagtagaaggaaacagaaccaatgaaaagctatatgatgcttttctgaagattttggaattggaaggatataatatttttgaacttttaaaaataaaagaagataaggatgaagctaaattatctgaactaaaatcatctgctgaagagattaaagagatgataagagaagtttttcatgcaaatcttattgacacttccatacttgattttaatgcagaacttgagggcaaagattttgaaaatcaggcttcctatcagttttggcatttgatatattcttatgaaggcgatgattctcctacggggaatgaaaaattatatgaactgttggagaaaaaatttggttttaaaaaagaacattccaggattttatcatctattgtttttccgcaggaatatggtagcttaagcgcaaaagcaatgaggaagatttatccttatatcaaagataataaatatagtgaagcttgtcttcttgccggttacaatcattctaagcactccttgactaaggaagatttagaaaacaggaaattgaaagataagttggaaattctacccaagaattctttacggaatcctgttgttgaaaaagttctgaatcagatgattaatttggtgaatgctacaatttctgaatatggaaaaccagataaaattagaatagagttagcgagggggttgaagaagagtgcacaggagcgtgaagatatgacgaagagtattaatgaagcaacacttcttcatcaaaaatatgcagttactttaaaacaggaattcggggttgtaaatccgtccagaaatgatattatccggtataaactgtatatggagctcgctagtaatggctttaaagatttgtatactaattctaaaatagaaaaagaaaatctttttacagataaatatgatatcgaccatattatcccacagtcaaggttttttgatgacagtttttccaataaggttttagtgcctcgacaagcgaatctggataaaggaaatctgacgggatatgattttatgtctaataaaggaactgaaagggaagagcattttttgaatgtaattaaagacctattagataagggtagtattactaaggcgaaatatgaaaaactaaagaagaaaggtacagaaataggggatggctttatagaacgggatttaagagatacccaatatattacaagaaaagctaaagaaattctttttgatattaccaattctgtaatgactacttctggaaaaattacggaaaaattaagagaagattgggatctcgtcaatatcatgaaagaacttaaccttgaaaaatataggaagttaggtttgacggatgttattaaaaactcaaaaggagaggaaaaggaagttattcaggattggacaaaacgtaatgatcaccgtcatcatgcaatggacgcacttacagttgcgtttactgcaagaaatcatattcagtatctgaattatcttaatgccagaaaagatgaaaagcataaagaacatcagaatatttatgctatcgaaaacatcattacagaagtcattgaaaaaaagaatggttcaaaggtcagaaggtttaagagcccaatgagtaaattcagaaatgaagctaaaaagcatctaaaagaagtattagtttctcataaaacaaagaataaggtggtaacctctaatatcaataaaacaaagaaaagaggaggacttcagaaaaaaacagaacttaccccgcgcggacagcttcataaagaaacaatttatggaagccgaaaatttttacaaactaaggaagaaaaaatatctgcaaaatttgattatcaaaccatattaatggttatcaatccggtgcatagaaatgcattattgaagagattaaaggaatacggaaatgatcctaaaaaagcattctccggcaaaaatgcagtaaacaaaaatcctgtttatctaagcgattcaaaaattgaagctcttccggaaaaagttactctttcttggtttgagactggatatactattagaaaagctgttacaccagataactttaaagattataagaatctcgagaaaataacagacactgggataaagaaaattttaaaggaacgtcttgatcaatttaaaggaaatgcaaaagaagcattttctaatctggataaagatcctatctggttaaatcaagaaaaaggaattaccataaaaacagtcacgattactggtgtgagtaatgctgaatctttacactttaaaaaagatcatttgggtaaagagattctggatgaaaaaggaaataaaattcctgtagattttgtaagtactgggaataatcatcatttagctatttatgtagatgatgagggaaaaattgatgataaaatggttacattttatgaggcggttttaagagtaaatcaaggtttgcctgtaattgataaagattatagtagggagaaagggtataattttttaatgactttgaaacagaatgaaatgtttgtatttcctggtgaagactttgatcctaatgaaattgatctacttgatgagaggaacttagagcaaatatccaagcatttattcagggttcagaaaatttctaaggttgggtatggaaattcttttgtcagggattttgtattcagacatcacttagaaacgacagttgaagagcgaaaagagcttcgtaatacaacttatatacagcttaaaagccttgaaggactaagaaatattgtaaaagtaagactaaaccatctggggaaaatagtacaaataggtgaatattaaatcgctgttatgataacgagatcgatatacattggtaatcctgcttatcttaaacttaaggatgagcagatgtatattctggatccttctactaaagatctgaaaggaaaggttccggtagaagatctgggattattgatgctggatcattttcagattacaatttcacatcagttgattcagaagatgatgggaaataatgtggtggttataagctgtgatgggcatcatcttcctcatggtatcattctcccaatgtatggtcatactgaacattcagatcgggtaaaagatcaattggaggccagtgaaccgttgaaaaaacaactatggaaacaaactgttgaatgtaaaattgaaaatcaaaaagaagtgctgagacggttgggaaactaccatgaaccaatggctgaatatcaaaaaaatgtaaaaagtggtgatattacgaatatggaaggaatcgctgcacaacattattggaagcacctgattagtcttgacttcttaagagcccgttttggagattcgcccaatcagtttttcaattttggatattcggttctcagaagcattgtggctagggcaattgtggaaacaggtctattaccggttttgggaatttttcataaaaataaatataatccttattgtttagcagatgatttgatggaaccgtttcgtccatttatagatcttttagtaatgcaatggcttgaaaaaagaccagaaacagaagaacttgataaagaatttaaggcacatattcttaaagtagcaactgtagatgttggaattgatggaaaaacgagaccccttctgattgcagtgaaagcgacagcttcttcgctttataaatgttatacgggagaaaaacgactgatctcttatcctgaatttctatgaacgccgacaggtttaatgcatatcgtattatgtgggtattggttctatatgatttaccgactgaaaccaaagcaaatatgcgggatgcaaatttgttcagaaagcggttgctggatgatggatttacacttttccagttttcaatgtatgtaaggcattgtccaagccgtgaaaacgctgaagttcacattaaaagagtaaaaggcatgcttcctaaagccggaaaagtcgccattatgtgtattacagataaacagtttgctgatattgaaatcttttttgctagaaataaagaagaaccccctccaaccttccagcaacttgaattattctaatttttaaattctaaataaataataaatccgttgaatttcaacggattaaattttgaggctgtgattaaccactaagatagtaaattttgaaagcaattcacaactataataaaacaacgcaccttatctttccagctgtgactaatcataaagaaagtaactcaaaacaaaaatacacaataaaaaatccctcaacttgagggagcttagcatattaaataggaacgcaataacaattgcaagccgcatctggctctggtccgcaaattccaacggcatcacaaataagcatgtattgaggttggcaaataccatccctgttaccaccaccgtttactttttttaattgatctctagaaatttttttgaaatttttcatagtatattttttaatttgtaagtgctaaatatataaattattcttagtgtggggatttaacataaaaatatttttggaaataaaaatatctgaaaagatctttaaagcaaatcaagatttacaacaaggaacaaacctttcaaaatagataatagaataaatgttttcagctttcgcttactttttaccctgatataattccttatatagtaagaaaaattacatttcttgatgtatgataagagaggacccatacggtttttctatttttgtacccgaaaacaataaacttttttaaacagttcaataatatgaaaaaaattagcgtaattgcattagtagcagtaggattgatggctgcatcatgtactaataaagaaaaaacagatacatcagtagctaccgagcaggctgttgctgaaagtaaaggtgaagtattagcagtggacgctgccacttctgtagtaaactggaaagcttttcacaaaggaggttttgctcctcgttggggaactcttaacgtaaaatcaggagatttaagcattgaaggtggacaagtggttgctgggaactttactattgatatgacttctattaaagttgatcctgcttcagttactgaaaaagataaaaaacctgcagaccttgaagctcaccttaaaaatcctgacttctttgatgtagagaaaaacccaacttcagactttaaaattacaagtgtagcagatctgaaagaagcaccaaaagatgctgtagcaggagctaacaaaacagtaagcggaaaccttacattaatggggaaaacaatgaacgttactttccctgctaaagtagatgtagtagataatacagctgctattcaggctaaatttacagtaaacagaacagactggggaatcaaattcggtacttcagaagcagatccagctgaatggatgattagcaaagacatcgaaattgctattgatgtaaaagcaaaaaaataaggtaatcaatttttctatatatcaagagctgcccgataaaggcagctctttttctttttctcctaataaagacatgtaatacattcataacataaatagtatttcataccctgtccaaaaaataaaagtggtctattcatcttttttaataggatatctttcatttttttaagatttgataacacccggacggcattattttttctttccattacagataacatccaaaatcataatatcatgtcaaaaaaaattgcaattctggcaactaatggctttgaagaaagtgaacttcaatcgcctaaagcgtatttggaacaacagggatggactgctcatgtggtaagtcctgaaggacctacaatccggtcatgggctgaaaaagattggggaaaagaataccctgttgacaaaactttggctgaagtgaatgcttctgaatatgatgccttagttttgcctggcggggtgatcaatccggatcagttaagaacaaatgggcaggcattggcatttgtaagagatttttttatacaaaataaacctgtggcagccatttgtcatggtccacagattttaatcaatgcaaaagttgtaaatggaagaaatatgacttctgtgaaatcaatcagtagagatttgatcaacgccggagcccattgggaagatcgtgaagttgtagtggataatggtctggtgaccagtagaactccaaaagaccttcctgcttttaatgccaagatggtagaggagtttaaagaaggaaaacacgcagggcaaggcttataggttccctcgtaatgatataattcccggaatttcaaattccgggaattaattatgtataatcttaaaaaaagaaattttttataaaggataaagttaattactaaaagaaaattaattaaaaatccatgagttttgtgtgcgtacacagtactcgcttcccagatagagtgggttgccatgtttttcagaccagaatccatctaatatgtcctgactcaggcaacggtataccgcaacccctttatagattttgtgatcatccccttcataattaaagttaagcactaagatccggtctttataaaatcctgttccctgctgtatatggtcaccaatcatccattgggcaataatgcgggcattttcatcaacagataaaattaaggtaccctgataagaaacctgatctgatgcttcctgattactgcctttgatagaataggttcctgctaaatcatgtactgtcattccttcattttttatggggggcaaatttataaaatcttattttgataaacatcgctgatacggtacagtgtaactaacagtcatcttggaactttcccagatataaattaagctttatttttgcaacaaattaattgtagtatgattccttttctgttgatcgctaaccttattacattcggggtctttgggtttgataaatggcaagccaaaaaacaccaatggagaatttctgagaatgctcttttaggactttcattaattggaattattggtgcagcttccggaatgatcatttttcatcataaagtttccaaaaaatcttttcttgtgaaatttttcattgtcgttttaattgatgttgtgttgctatatcgattgataagacattgatatatatgaattcattaagcgctaaaaagtgttttcctacatttatcaatcaactcaagaataaaaatcactctttttattccagaatcccaatcttatgataagagacattcgaagacctgccaataggatgttttgaataaaagggtcaatatacctcaggaaattgattagaataaaagtgaaaacaatgaaataactgaacctctgataccgtatgttttttaggtattgtaaagtgaatttatctaaatttctcattatgaaattgttaaatattgcataaagattttaattaattcatttaaaatcactatttttgcacccgtaaaaatcctatatgcaaaacattagaaatattgcgattatcgcacacgttgaccacgggaagacgactttggttgacaaaatcattcacgctaccaatattttcagagaaaatcaggagagtggagaattaattatggataacaatgatcttgaaagagaaagagggatcacgatcttatccaagaatatttctgttacttataaagacacaaaaattaacgtaattgatactcctggtcacgcggatttcggtggagaagtagagagagtattaaaaatggctgatggagttatcctgttagtggacgcgttcgaaggaccaatgccacaaacaagattcgtacttcagaaagctctggaattaggattgagaccattagtggttatcaataaagtagataaaccaaactgtcgtccggacgaagttcacgatcaggtatttgatttattcttcaatcttgaagctactgaagagcagttggatttcccaacattctacggttcttctaagcaaggttggttcaacacttcattagaacaaactgaagatattttaccattattagatggtatcttagagcacgtacctgctccaaaagtaactgaaggtaatcttcagatgcagattacttctcttgatttctcttctttcctgggaagaattgccatcggaaaagtaacaagaggagagatcaaagaatctcaatggatcggtcttgctcaggcagatggaaaagtattgaaaggtaaagtaaaagaactttacgttttcgaaggattaggaaagaaaaaagtaactgaagtacaggctggagatatctgtgctgtagtaggtttcgatgcattccagatcggagattctttcgtagatcttgaaaacccagaaccattggaaagaacggctattgatgagcctactctgaacatgacgttctctatcaacaattcacctttcttcggtaaagacggtaaatatgttacttctaaccaccttaaagaaagattaactaaagaattagagaaaaacttagcattaagagttcaacaaactgatgatgcgaacacattcttagtattcggtagaggtattcttcacttatctgttttgattgaaacgatgagaagagaaggatatgaaatgacgatcggtcagccacaggttatcctgagagaaattgatggcgttagctgtgagccttacgaatctttagtagtagacgttcctgaagaatatgcatcaagagttatcgacttggcaactcagagaaaaggtgaccttcacatcatggaaactaaaggtgaaatgcagcacatggaattcgaaattccttcaagaggtttgatcggattacgttctcagatgttgacagctactgctggtgaagctattatggcacaccgtttcacagaatacaaacctttcaaaggagctattccgggaagaaacaatggtgtactaatcagtaagactacaggtcctgctacagaatattctattgctaaattacaggatagaggtaaattcttcgttgatccgggtgaggaaatctatacagggatgatcattggagaacaaaacaaacctggagatcttgttgtaaatatcgtagaagcaaaacagttgaacaacatgagagcttctggaaaagataaagatacaggtgttgcaccgaaaatcttattctcccttgaagaatgtatggaatatatccaggctgacgaagctatcgaggtaactccaaactttatcagaatgagaaagaaaatcctttctgaagaagaaagaaaaagagttgaaagatcagcgaaagcttaataattccctgatttaaaatcaatatcatatagaaaagcctcgaatttttcggggctttttttcttaagaatcggaaaaattgtttattttttcaaaagaatatccgaaatattaaaatttaatttaaagtagttttgcggctatgaaaatgagtaaactaaaacttatcgttttattgggagttcttgcatcttacagtacctcatgttctgttcagaacaatgtaacaaagactcctcctgctaaaaatacaacaaaacccaataacaatacaacccagccaaaacctcctgtagcagtaaagcctgcaacaggaactccaacggaagaaacattcagaactagtcttccggagatcaaaagagaattcagaggtgcatggattgccagtgtagccaatattaattggccgtcaaaaaacaaccttaccgtagagcaacagaaagcagaagccatcagtatgctggatatgctgaaagataataacttcaatgctgctatttttcagatcagaccttctgcagatgccttatatacaagtaatatagaaccttggtcttactttttaacaggagaaacaggtacagcaccgtatccaaattatgatccgttattattctggattgaagaagctcacaaaagaggattggaattacacgtatggctaaacccttaccgtgctcaccataccaatggcggggcggtcaataaaatgtcaatggccaacaggatgtctgacattgtggtgaggctgaagaatggtatgtactggtttgacccggctaaccctaaaactcaggatcacgtatccaatgtagtaaaggatattgtaaaaagatatgatatcgatgccattcattttgatgattatttctatccgtacgctacttacaataaaggagccgattttccggattatgcttcatggaatgcttatcaaagcaatggcggaactttatcaagagcagattggagaagagataatgtgaataaatttgtagaacgtatctataaagaaattcacgcagaaaagaataatgtaagatttggaatcagcccattcggaatctggaaaccaggatatcctgcaggaattgtaggatcttctcagtttgatgagctgtatgctgatgctaaactatggctgaataaagggtgggtagattacttttctccacagttgtactggccaatcgattcaaaaggacagggcttcgaagcgttgctaaactggtggcagtctgaaaatacgatgaaccgccacctatggccaggtttgaatactgttgagatcaaaacgtatgaccgcccaacagaaatcaggaatcaaattgaaatctccagaaaaattctgaaaaatgatgccggtgaaattcactggagtattgctggattaactaaaaatcccggaatgcttccagcgctgaaaaacggaccttacagtgaaaaagcattaattccgaaatctccatggatcaaaacggttccattgcagacaccaaccttatttattacagataatggaagttttgcacaaacaagatggagtacaaaaaatgcttcagaagtttttcagtgggtgcttttcagtcaatatgacggagtatggcaaacagaaatcttaccattggataccctttttaaagatatccctaagttcaggaatggtaaaaagctgagtggagtagccatcaaagccatcgacagacttggaaacgaaagtgattatatggcaaaaaaagtcaaataaggaaaactaaagagggtaataatagagataccactaaagtttttaatataaaaatgggtttaacttaaaagttgaacccatttttatgatattatttccactttcttccaatgtattttctgctaggtgctaacgcctctgcgagcgtatagggccctttgaaccctgagtttacattaaaatagcacagacaatatccttatttccaacttggaacagcttcgggaatgaatgacattgaatttatccatgtactttgtcattctgtaagaatctaaacccattattttgtctcataaaataacttaagtgttaaaattttccagatcactttattttagaataactataaattattaatgtaaaataaagaaaatcaatataatataattttaatttattgattttaggtaaaatgaaaaccttcgcggaatcatttttgcatggataatcctataatcaccaaaatataaaattatgaatactaacagactttccgcaaaagtggaaaaagcacttagtgaccagatgaataaggaaattcacgcatcgcacgtttttctatcctatggaatttgggctgatgataaaggttatcagggaatcgctaattttctttaccgccatgctcaggaagaaagaaatcattcgatcaaattcatggaatacattttaaacagggggggaaagcccaaagtagatgctattcctgctcctccggctgatcctgaaacactcacggcctgttttgaaggcgttttcaagcacgaagtagataacacaaccgccatttacaacattgtagatctttctatggcggaaaaagactgggccacctggaattttatgcagtggttcgtacaggaacagatcgaagaagaaacattagctcagaatctgattgataaattaaaaatcgcagggggagacagagctacagatgaatctttatttactctagataaagccttacaggaagccccgaatgatgtaccattggctcaggaagctacgggaaataacccgtaaaaatcattgggaaagcaaaaactgcttgaaaatctgtcagaatgctggcagatttttttattatgaaactcccttaaaattcactatctttgcacgctgaaagttcaggaatcaggaaacaaattgacaaactttgaatcttaaactacaaactttcaaaccctaaaccttaaactttgaattttacaatatgaaatgtggaattgtaggcctgccgaatgtaggtaaatcaacactttttaactgtctgagcaacgcaaaagctcaatcagcgaactatcctttctgtactattgaaccgaacctgggaacagtttcagtaccggatcagagattatttgaattggagaaaatcgtaaagcctgagagagttttaccagctgtagttgagatcgttgatattgcaggtcttgtaaaaggagccagcaaaggagaaggattggggaaccagttcctggcaaatatccgtgagtgtgaggcaatcatccacgttttaagatgttttgacaatggaaatattgttcacgtagaaggttcagtagatccgttaagagataaagaaattattgatattgagcttcagctgaaagaccttgaaacagtaggaaaagcagttgaaaaagctaaaaaattcatcaagtcagggaagaaagaagatattcttacttacgaaacccttcagaatttacagaaattccttgaagacggtaaaaatgcaagagaatttgcagtcaatgatctaacagcatccattattagtgaagttcagcttttaaccaataaaccggtgctttacgtttgtaacgtagatgaaaattctat

SEQ ID NO: 2175 - DNA, 24215 bp, synthetic construct
  source 1..24215: mol_type = other DNA
  misc_feature 1..24215: note = Synthetic
tcgaaaacggacaaaatgttgaaaaaacggttgccaacagaagcgatcaggtgggaagaaacctgatggatcatatggtaatgcttacttggggattattcccggatcctgtttattcttacagaggtcccggttccacaaccaacatttcgtctttccgtgacggaaatttcagaagcgaattttctgcctggatctcgcctcttgacaactggggatggagctggccggcttcttctcctggatcagacctttcagagtttttaaatgacgggcttttcggagaagaactgaaagatgcattaacgcacagactttccagacaggtgcttttccattttgagatagagcagcttccgaatccggataacagagtaactattaacgaccagtatctggatgtattgggaattccgcgtcctgttattaattacggacttacagaatacgaaatgagagcaatggaacaggcaaaattagcttcagaccaaatgtttgcaagactgggtattgaagatttcaccaaatacaatgcgacagacaataatacttttgtatataataatgtaagatattcttataacggagccggacatattgtaggaacccacagaatgggcgacaatccggacgactctgtaacaaacagctattgcaaatcgtgggatcatccgaatctatacattgtaggagccggaaatatgacaactttgggaacttccaaccctactcttactttatccgcattcaccatccgttccgtagaatctattctgaaagatctggaaaacatattaaaatagaaaacatgagacaaagactaatcaataaaacagaacctcaggaaaacagcagccttctaagaagttcttcagataaaaataccattgtagacgaagccatttctttacagtcgttattattcgacaacacaaacagcaaagaaaactggattgaaggaataaaataccacagtaaaaatgtaaccaatcttttgcttaacaaccagattgatgcgtttaatgggtatcttagatctcaatttggtggtgaagttccggaaattaatccgaccgcagatttctccggagaaaaggcgtttcaggtaaaaaaaggattagagaatctggattaccgtccgattttacaggatttgcttcagactgcgattttaatcgagcattccacaattcctccgtatttaacggctttatattctattaaagacggaacgaatattcttccttcacagatcatccgaagtgtagcggttgaagaaatgcttcacatgattatggtttgcaacgtcatgaacgcagtaagcattcagccttcggtaaacagaccgcagaattatcctaattacccgatgaaactgccattgaatgtggatttctacgtaggtctggaaacgttctcatccaacagtattgctacatttattgccatcgaaagtccgagtaatcctttggtaaaagcaccgaagtacgattacgatgcacaaccggaagccatgttttcaaaaagtgctgttcaggaggataatttctggactctggaaaacatgaaggatttcatcatgaaaaatgttcatacgattggagaatattatgacgtggtgttcttttacattgtggtgttccagatcatcgcctattataaagcaaacggaaaactaccgcagacttttgaagaattaaataaaggcggaatttttaccggagatcccgcgaaacagatccgtccggaacaatactatggaagcggcggaaaactgtatcctgttgatgcattagaaggcgttattcttgtttttcaggaaattaagggacaaggagaaggcgcggatgattctattttcgatgtagatccttcacagtttgaggaaggtgcggaactggctcattatttcagatttaaggaaatttttcatgaacatttttatttagggggagattacagaccgttcaccgacgaaaacggaatgatgcctgtaaccactccaccggttggaaaaccgcttcctgttgactggaacgcagcctatccgatgaaaccgaatcctaaaatgtcagattaccagtcgaatccgcagttatttgaacagggaaaacaatttaatattacgtataaaaagttattggatgcaattcaggctgctgtagaaggacactctgaagaactggcaaaatccatcatgtatatgtatgctttgaaagaacaggcaatcggattgatgagtcagccattgacttcccaatacaatgcaggaccaacttttgagtatccttctaattaataaccccaaaaaactaatatatcatgttaaaaagaaaaaaagacggacttgaggaaggtcaacttttaagaacctcagcagaaagtacaaaaggctatttggcaacgcttatggatgggtattccaaacttttgatagacgatccggtaagaccttttagagaagaaaatttagcagaaattgccaataatgttgattatggaattttagcagctctggaaggaacatgggtgagctacaatgccaattataatcaggacataaaaagaccatcattaggaagcggaattcatacaacgattatgccttctccgggaactgatcaaaatacaattccgggaaaattcagttttgatacggaagaatacattgaaaaactgactttcgaaatcgttccgggtggtgttcgtaatcgtggaggcgcgagtgaattgttttgtggtgcggtaaaatatgatcaaaccattaaaagtgtaaataaagttgaagggaaaccggatttagaatacgcaggaattcacgaagaaaacggaatgtatctttggctaagtgatgtgtacaattatgcagcaaccagagaaaccatagaaaaagaccgtggtatacatgctttttcacaggaagattatcaaaaatacggctataaaggagaatacagaaatgagccattggttcaggtaaaagatgataatggaaatgtaagttatattcttttaagcgaattaaaagatggtcaggaatattttgaaattattccggcgcaggaaataaagccgggagacggcattacaggtccttattttataccagattattctatctcaagaagtggcgttattccccacggaagcaccattactttattgggagatattgcaccgagcggaccgaattatttaatcagtggtgcgccgcaatttccttacggtgatgcgacttggcaaccggatcatcttgcaatttcgccaacgatgggcggagccggcgcaagtgttacaaatcctattaatcttgatcagccagctccggcttgggttcatgagacattgacggatgaaaacgatcctggttccaataaaatctacactcaaagaattcttgcgaacgatctgtatccttattgtgtaagacccgatatgagactgagagatacattgagcggacaaaacgttgcgaattatgttttgattcagatgtcgtcaaaaatgaaaaccggagcgcagggaggaattttaaatgttccttttgttaacagatttgttcctactgttgaagtagatttcagaatgtggatagaaacggtgatagaagacggaaaagaaatccttcagctgcaatatgagcagattatcttttttgaatttgatttcggaaatgacggcggtactacaagctggccccacattcaggtgaatacgcttcgtaagattgaagacattcctgcagatcagagaaaaattattgaagagcagtttttcaatgctccttccggaatgagtatgacaacacctgcttctaatgcagagcgtactgtaaatcctcctgcaggatgcccgtatcataaaccttagattttataaagatctgattcagtatcatttaatttattcaataaaaagcgtcacttgttttaagtggcgcttttgcgttataatcgatattaaatagatcatactattttccagatgattttgttgaggttattttaaatcatatctaaattttaaaaatacttctattgtattttacgtaagcaaagactactgcaactacgggatgaaaggatggaaaaactttcagatttgttcaaaaaaaatgaattttgcaaacggtaattacaaacaatattatcttgtttcagaaaagttaagactgctgcaactacaggatgaataggtgaaaaaacttttataagagcaaaataatgatcaaatttgaactctcaaaaattcggatagtcattgacttcaaaaaaatatatgaagagatcgggcaaaaattgtcgcagataaaaatgtgaaattatattgctgatttcaatataaaatttttttaaaaaaacagggttgattgatcacaactccgtaattaatccagaaccataaagaaaactgtattcatagcgattggcttatgaacagggagagaattttctcaattatcaatttatcaacactaattttcaaaaagcaaatgagtacacctacaccattaaatacaatcttcagttggtttgaagagggtgatatgcctacagaatatcaatttaagcagaccttttcttcattccgtcatttggatgataaaatcaaaatgagcgatgtgacaggattaaatgaagcttttacaaatcatcaggaagatcaaaacgctcatcattcggtacttgcaaagcttaatgcatcaaatcttacttctgcaaatgtagaagaatggaaagaaaagttaaagatacatttagcagctactgttgatggcgaccaagagacaggaaatgtctatacaaaagagcagatccaggaaattctgaatgtattccacataaaagatgatgaaatgcttgcagatattgccaaaattaatgcaatgctaatttccaatgatgtaaacctcgatgaattacaaaaaatagtagactacatcaaagaaaacagacagcagatagaattgcttaaagagactggtcttggaaatagttcagacgataaaattaatcttgttggaagttattcaaactggggtgcagttagttatcaaaataaattcaatgatttggtgtatgataagattaaaaaaatcgaagatgcagccaattcagaaaaaatcaggcatgaagaaaaagttaggggcgactcccgaataaagcatgatcttaatacattaagttttgtaattgatgcttatgacacggttaccatgtttacagtgcctcttaaggtaaaaagaatagacacaaatactattgatgtgctattcgattctttaccaccaaatatgattcagttaaccattaaaaaaatataattatggacattaaatacgcttattacagaagctctgttggttacaaaattgaaggaaaaacagacagcgaagttttaacagccggcggtggcacaaggtcaatcagtacgttttggcatgatggaaatttgaatccgttagattatgtacccaaaacacgaacactaaccattaacggtacagcttatgatttgtcggcaaaccgatcattcacaacgcctgatactattacccgtttaaaaggtggtgcatccggttcattggtttcgggagatgttacgcttgctgcaggttctaatatgacaatcagtcagtcaggaaataccattaccttagcttctacagataccacctatagtgcaggaaatggtttgacattgtcgggaactacattctctttgccggttaccacttcaggtacaggaaatgtagttacaggagttacccaaactgctaacgggattacggtatctttaggctctttgcctacatctgcagatctggctaattatatcccggtatcacaaaaaggtatagcgaatggagttgctactttggatgcatcgggacaggttcctgcaagtcaattaccgtcttatgtggatgacgttttggaagggtattataaagttgccgatggaaaattttataaagaagctgcatatacaaaccttcttgctggtgaaacaggtaaaatttatgtatcgcttgataccaacaaaacataccgatggacggggacaacgtttgtttacatcacttccggagctgtagattctgtaaatggattaacaggtgttgttgttttaaataaatctcatgtaggtttaagtaatgttgataacacggcagatgcatcaaaaagtgttctttccgctacaaaatggactacagctagaagcatcgctctttcaggagttatttccacagcacaaaccatcgatggttccggaaacgttacaattcctgtaactgcggttccggcaacattattaacaggaactgcagcaatcaataccaccggatcatccgcaaaactgaccactccaagaataatttcagcgacaggcgacgcagcatggaatgtttcgtttgacgggtctgccaacgttacctcagctttgacattagctgcaacaggtgtgactgccggaacgtacgatgaggttacagtagattctaaaggtagagttatcgccggaagtaatattgtgaaatcatacagtacttctatttcaggaactgcaagtgtggtacacaacttaggtactagaaatgtagacgttgctatgtacgatacagtaacattctacaaaattgatggcaggataaaattaacagatccgaataaaatcgatattgaatttgattctgctttaccaaacactgtagctataacagtaacccgtaaagatatttaaacatggatattaaatatgcatattataacacctcgaaaggctatagggtattgggcggtactgccgcccaatttttaaaagcagatgggagtattgacagtaaagaatatattgacaaatattcggaacaaaatatagactctactaaaactataggttttcaaaatactatatattcaggatgggacaaatcatctgtggttaatccacaggtgggtccattctctttacttaatcttgcgttacaaggagcttatcctttatatggagatgaagaatttaggaatggaaccaatggaataggagtttataataactatggcaatggtaatgtaactatgactagggaggctgcttccaatcttccaaacagatcaggaatacagttgagattcaattataatggtaatggggctactcctggtttaggcggatttatattagggtttaacgccagagctaacgctgtttttattcaaaagtttacggctaaacttccagtaggatattcattttataatgctgaaaactatatgggagaaaatgcttccgtgaactggttaacttcaagagcaggaacaggaaagtgggaaacttatgttcgtgcagttatgtgcggaactggaaccagttttggaaatggaggtcatgtatatattgcaggtccgaatactgtagtggaattttatttagcttttgctgaaatttatgaagtaaacagttctgtattttctaaaataaaagaagctttttatgctaagaacgaaacgattcattttaatggagctatatctgatttaattactgttggagattcatatactcaaaaaaaattactttctacatcatgggatggaactaatggagatcagattctattaagagtgccaggaagtcaaaataacggagcgtatctcaggttttctcagaacggaactttaaatggaagtttaggattattaagttctgataatttaactggaggtcagatattaaattctcaaggtgatagtctgtatctgggaaatttatcattacccaatattgcacttcaaactactattaatgctcattttaattttgcaggagttggtaatctctacacatttaatgtaaatggagcttatttaaatagaaatattaattttaatcaagataactctggtgttaatttctatgaaggaggtaagatttataagaaatcagggggtggagtttatattaatagaggaactaatggactcgatccaagaattgaaaatgctgatggatcgcaatcatggacgatatttcatgaaggaaatcacaatccttttaaaaatttaaaaactggaattgctttagaagatatatcagaatcaggaatttacagacaagaaaacccaacatcaggatttaattacactactactttaaatctaaactcttctgatggaagacagcaactaactattgaaaggggtggaaaaggaatgaaattcagggggactactactggctcaggaaattctggatggtctggttggaaagaagtttaccacacaggaaactttaatccggcaagttatgtaacacaatcatctttaaacacccaactgggtaattatgccacactgaatggtgttcagacttttacaagtaccaatacttttctgcaaagtcctgtaattccaaatggaactttaggaactcatgcggtaaatgttaatcagctaagtacaaaagctaatggtcaggaaaatgctaccgcagttggtttctcttccggaaatatacctaccgcagatggaaattcgtttccgtatatgtatcataattcaggattgtatgtagcattggcaacccagtcgtatgtgcagtcaaattttttgagtacaccgaatggtacatctgttatcatatcaggttcaaatttaaataattatcttaaaacaggcttttacagaggttcaggattaattaatgcacctttaaacaataatggttggtggtacgtgactattgaaactcacgattctacttgggtaaaacagacggcaacgtcatttggctcaggtaatacttctaatgtaacttatcaaagaactctaagtggagggagttggtcagcttggcagcagatttggtctactcaggattttaatattggaaacattcagcaatggaattatatggctcagtatggtctgcagctcaacgcagattttacagtaaatacaggatcaggtttactcattgcagatgattatttcggaggtgaatccgggatgattgatcgtagctatgacagattcgtttcagccaaacaagagggttattataaatatggttcacgttacggtacttttgacgggctaaactttaactttgagtcaagactcttcggtatgggaagagaatctaacaaggaggataaattgacagtggaaggttccgttaaagccagtaaaaacttcaaatcggaagaggaaagaccagacaccatatttattcccaatggtaatgtagcaagtcttaaagatgaaattgtaaatgatgaatctgaatatgcaatcagactagatccccacgaatatgagatcgatccttccggctatttggatgtagatgatagaaaccgactgattcatattattggagagcaggtgaaaatggttgttaatttcaaagaaatttatccgaagcaacagattgttatttataattttgataaatctggcggtgcgatgacagttaaaatttatggcaaaaacatctataatattgaaccgggatctttcctgaggctgtatgtgacaagatcacgcagagtaattgcagaaagacaattaccatgtgagtttgtttggtaaaataaaatacaatttttaactaacctaaaccctacaattggagaatgaaagtcttctgattgtggggttttttgtattgatgaaaggcttgaattaatttgagaacacaagatgaatatataatagttcttaatttaataaagttgatttccgatagatatttttagtgtcaaaaaaataagctgaaaatgaagagttttaaacaataagctattcaggctgtatgcttataaaaaaaaagcgagttgccccgccttgaatgttttcacaacggaataatccttattgtgaattgctttcggttacaaatgtagaaaaatatttttttagttggtttacggttttccgtattttaatgaaaaatattctttttacatttatacaatttcaaaaactcaataattatgactaaaaatatacttggattagacttgggagtgtcttcaattggatgggctcttgttcaggaagattctaaaaatcctgaaaataatagaatagtaaagttgggtgttcgtgtgaatcctttgactgttgatgaacaaatcaatttcgaaaaaggtaaaccaattacaaccaatgccagtagaactttagcaagaagtgcaagaagaaatctgcaaagattcaaatttagaagagcaaatcttattgatgttttaaagaaatgcaatattctgaaacaaggagatttgcttacagaaattggtaaaaactctacgtttcaaactcaggaattaagagcgaaatcggcgaaagaaaaagtagaactttcagattttgtaagggttttacttttaatgaataaaaaacgaggttatagaagcagtagaaaagcaaagaacgaagatgaaggacaaatcattgacggaatgtctgttgccaaaaaattgtacgaagaaaatctaactcctggagaatattcttaccaacttttaatagaaaataagaagcaattaccggatttttaccgttctgatttacaatctgaatttgatagagtatggaaatttcaaaagcaatttaaccccgaaatcctaaccgatgacctttataaagaattacaaggcaaaaataaaaatgcaacttgggcagttctgaaagagccattttctctcgttgggattaagcaaatcggaacaatacaggaaaagaaagctgaaaagtacttttggagaagcgaagcggtaaaaagacaattggattttgaaagtctggctgttgtatttcaggaaattaacagcaatctgaataattctagcggttatttaggggcgattagtgatcgaagtaaagagctttattttaataatcaaacggtcggagagtatttatttcagcagttgaaagaaaactctcatacaaagcttaaaaatcaggttttctacagacaggattacttagatgaatttgagaagatatgggaaactcaatcaaagtattataaagagctaacgaaagaattaaaggaagaaattcgggatattatcattttctatcaaaggaagctcaaatcacagaaaggtttaatcagtatttgtgagtttgaaaacagggaaattgaaataacagaaaatggaaaaattaagaagaaaacggttggtttaaaggttgctccaaaatcttcgcctctatttcaagagttcaaaatttggcaggttctgaataatttggtgtttcaaagtattgaatctaaagaattgtttccgcttgatttagacattaaagaatctatttttaatgaagtcaatatcaaaggaaatctttcagcaaagaatgttttagacttaatgggctattctggtaaagaatggaaaaccaattttaaaaatattgaaggaaaccggaccaacgaaaatctttatactgcttttttaaagattattgccagtgaaggaatagaatttccaaaagaatttaaattaagtattgatgatgatattaaagtttcaaaaattgatatttcttcagaaaaaataaaagaatttatcaaagagaattttttgaaattaggaattaatacttctattctggattttaaccctgaacttgatgggaaagattttgaaaaacaagaatcgtatcaattatggcatttgttgtattcttatgaaggcgacgattctgcatcgggtaacgtaaaattgtatgaacttttggagaaaaaatttggtttcaaaaaagaacattccaaaatactggctgatgttggtttttctccagattatggaagtttgagttcgaaagcgatgcgaaagatttatccttacattaaggaaaataaatacagcgatgcttgtcatttagcgggatacaatcattctaaaaattcatttacaaaagatcaactagcaaacagaattttgaaagagcaattggaaattctacctaaaaatgcattacgaaatcccgtggttgaaaagattttgaaccaaatgatcaatctggtaaacgaagtgataaaagcgtacggaaaacccgatgaaataagaatagaattggcaagagaactcaagaaaaatgcagaagagcgtgcaaatatgacttccgatatcagcaaagcaactttgctccatcagaaatatgccgaagttttgcagaaagaatttggaataaaagcaccttcaagaaatgatatcattcgatataaattgtatttggaattagagaaaaacctattcaaagatttatataccgatgttcaaattaagagagaagagttgtttacagacaagtatgatattgaccatatcattccgcaatcgcgattttttgatgacagtttttctaataaagtgttggttccaagaggcgcaaaccttaaaaaaggaaactttactgcattggattatatggaaattgaaggaaaagaaaaactagaaaaattcttgaatattattaaagaattattcgataaaggtgcaatttcaaaagctaaattcgaaaaactacagaaaaaaggaagtgaaataggagaaggtttcatcgaaagagacttaagagatacacaatatatcgctaaaaaagcaaaagaaattcttttcggaattaccaattctgtaatttctacatcgggaagaattactgataagttacgtgaagattggaatcttgttaacacaatgaaagaacttaatctcgaaaagtacagaaaattgggtttgacggaattaattgtaaattctaaaggagaggagaaagaaagaattattgattggacgaagagaaacgaccatcgtcatcacgcaatggatgctcttacggtggcatttaccacccataatcatatccaatatctgaattatttgaatgctagaaaagatgaaaagcataaagaacatcaaaatatttttgctattgaaaacacaattacagaaattgtagaaaagaaaaacggctcaaaagaaagaagattcaaattaccgattaaaaatttccgtaccgaagccaaaaaacaattggaagaagttctgatttctcataaagctaaaaataaagtagttaccaaaaatatcaataaaattaagaaaaagggaagtataattgcaaaaacagaactaaccccgagaggacagcttcataaagaaacaatttacggaagttcgaaatttcttaaaacaaaagaagaaaaaatatctggaaaatttgatctggaaatgattcagaaagttcaaaatgaaaaatacagaaatgctctgctaaaaagattacaggagtttggcggagattctaaaaaagcattcaccggaaaaaatgttatttctaaaaatccaatatttcttaatgctgaaaaaacggagcaattacctgaaaccgtaactttagcttggtatgaaacaggttataccatcagaaaagttgttaatccggataattttaaagatttcaaaaatattgaaaaagttattgataaaggagttcgtgatattctaactgaaagattaaaagaatttaacggaaactctaaagaagccttttctaatttggaaaagaatccgatctggcttaacaaatcaaaaggaatttcaataaagaccgttactattacaggaattaataatgccgaagctttacattataaaaaagatcatttaggaaaagaaattttagatgaaaatggtcaaagaatagctgttgatttcgtgagtacaggaaataatcatcacgttgcaatttatgaagatgataatggaaacctacaggagaaagttgtgagtttttatgaggctgttgaaagagtaaatcagaatttaccaattattaacaaagaatataattttgagttaggttggaaattcttatttacaatgaaacagaatgaaatgtttttatttccatcagacgattttgatccgaaagaagttgatttatttgatgacaagtatttgagtttgatttctaaaaatctttttagagtgcaatcaatttcaatagtacaatatggcaattctgttattcgagattttaaatttcgtcatcacctggaaacgagtgttagcgatgaaaaaaaattacaaggggtaacttatcaacaaataaaaagtttgcaaccattaaaagatataataaaaatacgactgaataatttaggtaagattgttcaaataggagaatattaaagtttaagatatgataacccgctccatctacatcggcaatcccgcttaccttaagctcaaagacgagcaattaaaaatcctctgtccagaaaccaaaacggaaaagggaagtattcctgtggaagatttggggttattgatgttagatcattatcagattaccatttcgcaccatctgattcagaaaatgatgggaaacaatgtcgtagtggtgagttgcgatgcgcatcatttgccacacggaataatgcttccgttgtacgggcataccgaacattccgatcgggtaaaagatcagttggaagcaagtgaaccgctgaaaaaacagctttggaaacagacagtagaatgtaagatcgaaaaccagaaaaatgtactgatgaaactgggaaattactacgaaccgatgattgaatatcagagaaacgtaaaatccggcgatatgacaaatatggaagggattgcggcgcagcattactggaaatatttaatcagcttagattttttgagacagcgttttggagattcacccaatcagttttttaattttggatatgccgtgctcagaagcattgtggcaagagccatcgtagaaaccggactgttgcctgttctcggtatttttcataaaaataaatacaatccgtattgccttgccgatgatttaatggaaccttatcgtccgtttgttgatctgcttgtgatgcagtggctgaaaattcatccggataccgaagaactgtcgaaagaatttaaggctcatatcctgcagattgcaaccaaagatgtgcgtattgatgacaaaacaagaccgttgctggttgctgtaaaaacaacggcttcgtccctttacaaatgttacacaggaggaaagcgactgatttcctatcctgaattgatgtaatttttttatggcagctttatccgccctccgttcccgcttttttgcagatttccaaccgcatttttccagcaccaaaatctgcaaaaagagctccactcaggtcgggctgcaaacgttacgacaaacaaacaatagtcaccaaaaatgaacgccgaaaggtttaatgcataccgaattatgtgggttttagtattatatgacctcccgaccgaaacgaaagccaatatgaaagatgcaaaccgttttcggaaagcactgattgatgacggattcactttatttcagttttcgatgtatgtacgacactgtccgagccgggaaaatgcagaagttcatatcaaaagagtgaaatttatgcttcctaaagccggaaaggttgccattatgtgcattaccgataaacagtttggagacatcgaaatcttttttgccagaaataaagaagaaccgccaccgactttccaacaactcgaattattctgaattttaaatcctgaaaacagaataaaccctctgaaaaacagagggttaaattttgaggttgtgtcatatctcaaagatactcaaaaatgaaagcaattcacaacggactaaatttctttgtttaataagtggtttattcttatcaatgaataaaactaattctacttctacttaaattaagcaataagtagttacttattcgattagtaattttttgaaattcattttttaacgctttcatgtattttaaatatctaattccaatttcgagaaattaatattcaaatccttctatttttactctataatcataccgtctttagcaactgctgatttttgtcttcttgcccaataaggatggtcagtccagcgtgtctctttttggtagagtgctgaacgttgtttttcatataagttgaaaactaatcggatgttttgatcataatgatttccggcttctgtattaccttccagttcatttttggcagcaatacctgcatcaatcccactacgtagagcgaaagcaataccatgtgaggacaatggatcaaacgcacaggctgcatcacccgccgccaaccaaccttcacctgcataagattccagatgttggcctcctgctgaggtatattgtataggcaaagcatatttgtaccgatttacaggaacacgatgttttacaaagcgcgtttgcatactcttcctgcaccaatagacaggatcgagccaatctgcacggtcatgaagatcggaatcagtaaaaaagatgcgtgctacttttccttctccagcatcacagatataccaccaaccgtcgggaaccgcttcgataagactttgctgactttttaaaggattagtagaagttagcaaactgacgaccgctatcttgttatccctgcgaatacgttgtataccaagttgtctacttagccagctattcctcccgcttgcatcgattattgtagtggctttgatgtttaaattaccttcagtgtattgccaatacatatcttctcttattaacttaaaggcacggttcgtctcaatgaacctgactcctgcccatactgctttttgaagaagcatatactgaaaagtcttgcgattcacataccatccttgcccgaatgatgattggataaaatcatagaaaaataacctgtcatctccccaacaggaagaattgccatagcatggtgaatgttttgctgccaaaaattcatcccataagtcaagctctataagcgaatatctggcagaagcagcaaggctttcacccacccggattgtatgtgcatcggcggaccgatgcactacaactaccgatgcaccatgctgccgtaaagtgattgccgaagctaatccggcagcaccattacctattatcagcacatctgttatcatcctctctttctcttttcagcacgttctaccatccataagtaaccagaatcttcgggtgatttttcctgctctgaaccagccatcagcattttgtccgaaacaacctgatcttctcctatcgttcttccattctctacccacattttatctgggaaattagaatcaccaatgccttctttctgtataaggatacctacatcaggccattgagtgataaaatcattgatacctttggtataaggacttacatttaccggaggatacccatattgatacactataccgcgcaaccacttaacacgattgctgaaagcagcattcttttcttccaaggtggaattctcattcatcattatttcataatcagcttcagtaagtacatcgtttggcacccttactggccaaaaagttggtatatactgacccataatgccaacataaccactcagacagcttgaagtatctgtctgccatggtacagccatccatttggtaatatctcctgcagccgatccatcaagaggtcccttgatttccagcgcaatctgtgaattgagtatcggtccgtatgtaagtggatcatcaagtcgacgctttattctgaacggtgttgaatataatataggttgccgcattggccatgtaaattcacatcccggatggaaaggtccgccgatagtttcatcaagtgatgtacggtctaaataagcagcttgttctgctggagtgatatcatcccagtttttagtttctgatctgtttcctacagtgaaatttccatttgcccattgctgaaaatattcatactggaacggcatcactgccatgaaattacgcggatctgtatcgctacttttgaagccctgcaagccatcaccgtaaacaggtgggaaaagttctgcctgcatcgttagataatcaggatttcggaactgacggaatatagcctgacgcagctcaaaatactgattagaagtatctgaaagctttgctaccatttccggtgttgagagatcacctgggcttccccagccgttttgtttgaaaattcctgcatttacccaaccgttcagcggcatacgctccagcattggataaatatgttcccaaaactccggaatttctggcaaaacagattgtcccatatcgatagctgtttgtgctaagagatcataaccagtgacaaacgcctgtatgcctggagaataatcgggtggtgcagtaagtacccatgctccaacagcttcgaatacttctcctgttttaagttttatcttcgcatcaaccggaccgtccgaagtatcgtcatgccatgtatcattattagcaaaagtaacagcactctcattagcataggatgcagacagaccataacctcctaagaataaaagggagccgttttcgtcagtgcgaagctcaccaagataaactggtttatcattaccgtccggtgaataaaaagtacccttgtcaaatgcaaagttttggtcatttccatcggcattggtattaactccggagatcgttaacgaacctccgtcaattacaagtctggatcggtcagcatcactgatcgttacattacgcaaagtgctttccacaggtgaatatcctttgaaggcacctgtagcctgtggaatatctaaagcaagatcgaaattgtaccaagctgcttttttattagcgacatgtacggtccaggtaatgtcgccatcttcagcagtaagttcgcggatgatattcccgttttcatctgcaccgtatagcctgaaacgtacggcttgacgtttaatacgcccctccttatccctgaaattaccgggatcggtgattggtttgttgattatttccggcaaaagaaaatattctttcggactgttacctactctggcaactcctattgccggatgaataattacttgtttaatttctaacatgtcttgtatgtttttggttattagttgattttttatttaatttttctgcgattggtttttcgaaaactcacatttaattttaccgaatgtgttagttttgatcagatgatcgtttttctgctactgagcatattgtcaggatcttggctataagcttcctttatttctttaagcctgtcatagctttcctgaaaatagacccgtgtcggaatactgtcgtctttaaaactaatgaaagcaccgtaagttgcaggtatctcataatttctgcatacttctagccaatctatcgcgcggttgacgtaaggctgtactttaggattttcaataccgtcattatcccaccacgcctgatattgaactgtgtagaaacattttttataggcaaaagaacttccttcaggaaattgattcgcattaaaatcataatcacgataataggctccggtaatagctcccaaagtaaaataggtattcattccttgattttcaccttcggtagctaaaaggtttgattctaaactttcaatcaattttatccttctttgcgaggcaaggttttcatcatctgtaacaatggcaaatctcgaagtgattttatgcggtgcaggtttgtcaatttcaggtggaatagcctggaaatgaggaggcaaagactcagtgtcgtatatgctttctaacagcggatgtttttcctgctctgtatcccatttcacaatcctgtcccaagctgaaaatgtactccattttcgtctgttgtcattagatactgcagttaatttaccagagttattggtgacattattggataatacagcttcaatactgtcttcaaaattaacgttgtactgactaaactgatcttctggaaaccaattttcttcaattatttttaaaagattttcttcaaactcttgctgattctggaagttttctctgcttcccatataatatccgtaaaaatagcagtcatgcaaagatttttctatcggagtagtatcatttatgtctttaaatttagcaactactttaagatttgtaccaagcaagtcaggattttcattatactctataagttcttcccaacgtttaagtatatcgacagcaggtggaatatcctgtccgaatttttgttcccatgcaacggtgaatttagtcgtataatctggcatggtaaatgttttataaatgagttcagtaataataccgtaactcatcccaccgccaccgcgtaatgcccacaaaagtttgcggtcttcttcattaagatctgccaccggatgacctttatattccggaataagcttattatctatgatggtgcggtaagatccgtcgcctaaaacaatcgttacaccggcaaggctttcgcaacccattcctttttggcgagtccatggtccccatccaccaccaaatgtaaaacctgctatgcggacagaatagcaggttccgtgtggtaatcccacattcttggcattcatctgtttaataagatcgataaacatgatgcccggctgaatagtcgcataattaagatctgccttaatatcaacctttgtcatttttgaaaggtctattacaagagagtcagttgctgagcattccccttcatgatcatgaccaccggaacggattctcaatgttcccgtataattatattgtcggatcaatttaatgacttctgatacctgttgtgtgttggtacagaatacaattgcagtagggcggaattgatagtaggtattgaatatttgccttttatcgttgtactctttattcgttaaaggcgaatcaaacaatatttcaggcatattgttttgcgggagatatttctttaatatctccacgatgttaagcagtgttgctttcatgaaatggtgttttattggtaattagtttttattattttacgtcagaaggatattcattgaatgtattttttcaatgttaatcataaattagttatttataagtgttttacggcttacagcgttttctatgagaaactgaaaataaataggaatggatggaaagtggcattcttagggcgaaatttgtacgatagcctcgtagagcctcatttgttgaggataatgttttttggtgcatggttttagttttgagatttaaaaatactaatttaaatgatataaaactaaaaaaaagtatattttaaatcagatattttatttagatgctgtactagttgattcaggtcttgcaattaggaaaattatatcctcatttaatcataaataacttcagaaatttatcaaaatgctataaggaagctaataaatatagagtataaacatttaactgatccgaatgaaaaatgctaataattatatgaatgtccgtaattactaataatttagtttttaaaagtttgtttgttatttcagagaaatctaaactgctttattttcagtgtgttgagattccttcggaatgacaaaatgactgctgattttagcattatgattaaaaacggacattcaaaaataattataattaattctctcaaagctacatctaaaatagaattaaattcactaacaaaagttatgaactcatttataggttagttattcataatagtatatttatcttctttttggtaacaaaaatagaaatattgctttctgttaaatgattgaatttaataccgttacaaaaataaatttatataaatcataatgaagatcaaattttgtataacttatatcgtgggatgcttttgttcatcttccctgtctatatattttcgcaatctacagactttgtcattcaagaagtaaagtttacaagtcagggcgttactcctgcaggctatcaaaatggaagatttttcagtctaaaaattagcaaatcagcgaagaagcatccagactccaactccgattccggcgtaagtaactacagttaaaatatctgataatggttttgaaaagcgtttttctgcaatcgtttctgcattgatctgattcttatggaatttcaggattttttcaggcttacttatcggatgcgcaaccagactgtcaccttcccatttgtcaacgattactttataagctcttccgtcaacttttattttataatttttagtaggctgaagctcattttgaacattgattggaacaggtatttgttcattaacagtttgctgtgctttcttgctttttacatccgctgtcgcatctttagctgaagcagtagttccattgacagttttcttcgctgattcctgaccattttccaatggcttaaccacttgctttttacgttggtaagtatagcaacttgtgagagaaaatgatataagtatgagataaagatatttttgcattagtcaaatttaagaattaaacgcattatttcgtgttttcttttaagagattttatttttcttgaaaaaatgtaattgttgatagaaaagttatcctaatttttaatttttagtcgccaaacttaagtgaattttcacaaaaagttactgaaatcaagacagaaaaatgatttcatttattgctaagaatactatagaatatttgaagtggctgattgattttttttaagattgaaagaaaaacgatttacttatatttgtcctgcaaagcaaattcaaatgttcagaaaagtaatcattgtttttatccttgtcttttatgcggccttttgcccgggtcagcagcttcggccatcaaaatcatctgagatttaccgcgaactcaaaacccttaaacacctgccaaaagtgttataccttgccgctcatcccgatgatgaaaatacgggattactctcatggctggtcaacgaccaaaatgtagaaacaggctatttgtctttaaccagaggcgatggagggcagaatttattggggacagagcaaggtgcagcactgggattaatcagaactcatgagcttttggaggcaagaaaattagacggagcccaacagttttttacccgtgcgattgatttcgggttttctaaaaataccaccgatacttttaaacaatggaatgcagacagcattacagcagacgttgtctgggtaatccgtaaattccgtccggatgtcattatttgccgatttcctcctacttctgcggcaggacacggacaacacgcggcttccgctgtggttgccgaaaaagcttttaaactggcaggtgataagaccgcttttcctgatcagctaaaatacgttaatgtgtggcaaccaaaacgcatattatggaatacattccgttttggttctgtaaacacaaccgctgaaaaccaactgaaagttacggttgggcaatatgatgcacaactcggaatgggatatggtgaacttgcaggattaagcagaagtttacataaaagtcagggtgcaggaacacaatctgtagctgggataaaaactgaatatttttcccatgttatcggagatcctgcaaaatcgacaatttttgatggaatcgttaaaacatggacttcacagggaaatgctgatatcgatcaatcactcgatcagattatttcaaattttaatttcaacaatcccgatctcagcttacctgctttgcttgctttacgaaaaaagattatggcgctgaaagatgcagagctgaaaaaggataaaattaaatctcttgaccagattattttaagctgtgccggatttatgggcgaagtagtgaccaatcgggctgaagcggttgccggaaatcactatcaattcaaattaaatattatttcaagagctgtaaatcctgttgttttagaaaatgtaaaatggctaaatcaatctgaaagttttaacagaaacctttcaaaagactctttaattaccattcagcatgatattcagattccatcagatgcagcacttacagaaccttactggttgacaaaaccgcctgtgaatgcggcaactttttcagttccgaatgatacgttaatcggtttgccggaagcagaatcaccactgaatgtttgggtggatttaaaaatcggctcggaaaagtttcaggttaagcttcctttatcgttcaaaaaattagatccggtaagaggagatgtggtagaacctttgcgcattgttcctgctctggaactgaaatttacacaacctctttatttagcaaaagaaaatgaagatttacatttgagcgtaaatgttaaaattaattcagataaaccgttcagcaatggtaaaattaatctgatgtacaacggagaacaattaggcagtacagatgtaaattca

SEQ ID NO: 2176 - DNA, 24215 bp, synthetic construct
  source 1..24215: mol_type = other DNA
  misc_feature 1..24215: note = Synthetic
tatctgatagattattcgtatcacccgccacgaggttatctgcgcctgatataaacgccacgtaccgaccatcgcctgaaatcgctggcgcagaaaattggctgtttgcctgctcgcctgcgctaccgacactcacacgggtggtctcgcctgtctcgcggtcgtgcacaaaaatatcatcgtcgccattcgtatcgcccactacgaggttatctgcgtctgatacaaacgccacatagcgaccatcggctgaaatcgctggccaataagacccgctggctgcctgttcgcctgcgctattgacactgactggcgtgacttcttgtgcataaatggtcatcgtacaagctaaccccgataacaagcagatggcttttaccaacggcttggcgcggcttgaaaacacccctgcaaattgatgcataatatgctgattttgacagtcagaacgatacatggtttgcttactccttgttaattaattcaaagtcatcataaaacgcacggataaccttgtcaatctaaaaccatccctcaagcagccaatttaaaaaatcagaaacaaataagcaccttcgccccagattcacctcagattcggcttcatttttttggacttttcaccaacagcgccatcgactccacgtgtgccgtgtggctaaacatatccatcacgcctgcgttttctaattggtagccatactgattgactagcatctccacatctcgggcaagcgtcgcggggtggcacgagacatacaacaccttttcaggggcgagattggcaatcaacggcatgatttctagggcgccgctgcgtggtggatcgatcagtattttgttgtaacgatagccttctcgccatttcatcaatcgtgtttcttgggtcaaatcggcttggtaaaacgccacattatcgatttgattattgtctttgttgcgattggcccaatcaaccagtggcttagcgccttcgacaccgaccacgtattttgcacgctgtgcgataggcaaggtgaaattccctaacccacaaaacaaatccaacaccgtgtcgtttttatcaatcgctaaccagtctaaggcttgctttagcatcaactgattcatttcaaaattaacttgggtgaaatgatacggcaaaaaatccatgaccaaaggcgcaacatactgccctgactgttgctcttgtgccgtttgtatatcaatgtggtactgcaatacttgatcatgccctaacccatgcatggtcgtctcattacctggctgcagataaatcaacacatcgtgcgcctcagcaaacgattgcaataactgtaaatccccttgcgtcaacgggtctaaatgacgaaaattaagcgccaacgcattatcacccagcgccatttcaacctgcgggatacgatcaggaatagacaattgtgcaactaacgccgagattggcatcaacaaatcggacagcgcaggcgcgagtacttcacaccgcgtcatatcggcaatatacggactataacgctcacgaaagccaaccaacacgcgacccttgcccttaacctgtttgatccccacgcgagcacggcgcctatacccccaaggactgccttgcaaaggctcaaccagctgtttaggcaacgttttggcctgatgcgtcaggtgattgactaattgactagatttaaacgcaatttgtttggatggcgccaaatgctgcaaactacacccgccacataccgaaaaagccgcacatttagggatgacgcgatcggggcttgcggtcgtgacgttggtcacctgccctgctaactgctgtttgcgtttatttttatagacaaagctaaccgtctcattcggcaatgcacccgttatcatgacgggcttatcattggcatacgccaagccgcgtccatcagtcaatagctcggtaatcgtcgtggtaaattcgccttgtgggagcttgggctttctggttcgtcgtttattgttcatgggttgcctgatgggtcgggtgggtcagatgattcagatgattcggataattcggataattcgggtggattaaagtcagtttgcatggcggtctgcgtgggctttaccgactgcgtggactggctagactgcatcgcattcggcgcaatggtttcagcatcagattgacgcagttgtttaatccaaaagctcaacaaaatactcgctacaatcgaaaccgtaaacacataaaacccaatatgtaactgaacatcaacgagcacgcgtaattttagcaaaataaccattaacgcgataacaaacacgtccagcatcgaaaaatgccccagcgtctcgaccacttttgtcattttgttttgccaatttctgcacaaatgccgaatctgtagcgccatggtcacgagttttgcgacaggaaaaatcaccgtaaataacccgataataatcagcaaactggtgttttgtagcgacggtgttttggctaacaatagcattgaatttaccagggaaaattcattctcaaaaaaataaaactttttgacggtcgccatcggcagcaagattccccccagataagtcagcacaaccagtagccataaaatggacagacctatttgttttgcacgcattgctggtttgcccttatttggtttgcccttagctttggcttgcccttattgcggctttgcactcgtattagcttcatcggttttacccatcgtttctactactagtttgggcgctagttttggcgctagcatctaggcattgggttaattttttaacctctgtggtggttaattcgactgttttgcctggcgataaggtcttagggatatcataactaccataacgaacccgttttaatcggctaacttggcactcgactgcctcccataatcgacggacttcacggttacgaccttcgcgcaaactgactttgaaaaagttatttttgacctcctcgtcaggactaatggcaatgatttggtcgaaatgcgcccagccatcatctagctcgataccactttctaactgctgtagctttgtctcagtaatttcaccgaatacccgcacgacatattcacgcacgacttcgttacgtggatgcattaacgcattagccaagccaccatcattagtaaaaaggagcaaccctgaggtattggcatccaatcgcccaatcatcacccaacgactatttttaatcggcggtaggtctttaaacacggtgggacggccttggtcgtctttgcgtgtacataacacgccaacgggcttgtgataggcgatgacccgtgttttgcgctcgcttttgacttcgctaagcacgacgcgacgccctttgatttgaattaattcattgccttgtaacggctgtccgagcgtcgctggcttgttattcactttgacttcacctgcttcgattaggcgctcaatttctcgccgtgagccaaagcctaacgccgccaattttttttggatgcgctcgcccgttgcttttttggaaggtgtttttgccatgagttaagtgtcctatgtaattaaatgctgtcgcgctatcgcctgtattcggatttatattttgttcgaatcagcaaagcgcgattccaatatggcaatcgcgggaagttttttcccttccatgtattccaaaaacgcgccaccgcctgtggtgatataagaaataccgtcgtgaacgttaaattggtcgatggcggcaatcgtgtcaccaccacctgcgatagaaaacgcatcagcgcctgcaatcgtttgtgctagtttttctgtaccttgcgtaaaatgcgcgaattcaaatacccctattggcccgttccaaatcacggtcttggactgctggattaatttggcataattttttgcggttttcggcccaacatctaatatcatatcatctcgtgtggtatcaatgatatctttgaatacacactcggcatgctcatcaaaatgctccgccgttccgacatcaatcggcatcgggattaacgtatttaagcggtgagctttttcgaggatttcatgacacactgaaatcaaatcgggctcgtgcagtgatttacccacgcgcgcgcccgttgctgctaaaaaagtattcgcaataccgccgccgacaatcaacgtatcgactttttcaatcaacgcatctagcaaggcgagtttactcgataccttagagccaccgacaatcgccacgatcgggtgctgtgcattcgataatgaacgttcgatattttcaatttctctgaccagcagcggcccaccacaagcaatcggtgcaaatttagcgacaccataagttgatgcctgcgcgcgatgggcggtgccaaaagcatccatcacaaagacatccgccaattcgcctaactgcttagacaaggcatcgtaacactttttctcacccacattaaaacgcaaattctctaatagcaccacttggccaggcgcgactgacacgccatgcagatagtcatgtaataactccacattctgccgcaaatgctttgtcagccaactggcaacaggcgccaaggttagctcggggtcaaatttaccctcggcaggtcgccccaaatgactacccaaaatcaccgccgcgcccttggctaacgcaagctgaatcgtctctaatgcggcctgcaaccgtgcatcgttttgaatttcgccgtttttaatcggcacgttaaagtcctcacgaataaagacttttttacctgacaaatccaggtcagtcatttttaaaaaaggcattgtggtcattggattctatactcttgtcatcgtcaatacagttatctactcgtttcagtaggcggcttatcatatcaaaaaaacggcctaaaatcgtctattgattcacatctctgggtgactcatctacgcaccgctgcttttcaccgataaattaatacccgctgtcatgctggatgacgcataaaataccgcataaaatgccacaccaaataccatgccaaaccaacacgcaacaacatcagactagcgcccaactagcgcccaactagcggccaactagcactagactagcaccaaactaacaccaaatcatcgaagacgttccaaatagacggcaaagcgacccattaaaaaaaatagaataattgcgttttatgattggcagacagggcgtaacccattagaatatgtccaatatgtctcgataacctaactcgacttagcatcatttgattaatctgtcagtttgcatcaatgtttagtcaggtgtttatcgttcaggtgtttatcgttcaggcgtttatacttcaggatgttagcgcgagtacttagtgcgggcagttaacgcaaattgatatcagtcaataaaacaggctaaaaaccatgtattacgaaagtcaaaaccgcgtcgtcaaacacttagttaatcgtttacgcgacgtcaatactgattcatttaattttcgcatggcgctagaggagctcacgcgcctaatggtcgccgaagcattcgcgcaactccccaccaaacccacaacgattgacacgtggcaagggccgctggacgttgaacgcattgatgagtcagcgctggtttttatcccgattttacgcgcgggcgaaccaatgcttgctggcatactcaaggcactacccaacgcacgtagtgggtttatcgccatgaaacgtgatgaagctaccgccaaagcggttttttattacgaaaacatccctgacttacaagggaaaaccgcgattttactcgacccaatggtcgctacaggcggctcacttattgatagcattacctttatcaaaagcaaacaaccacaagccatttatagcattaatattatcggcgcacacacaggtgttgaattagtcaaccaaacacacccagacatacacctgcacattgcgcaaatcgatccaaaactaaatgcgcagcaatttatcatcccaggactaggtgacgcgggcgatcgcgcttttttcaccccaccaaatgataactaaccagataactgaaaaacaaccaaccgatattgattttttattttttttaaaacgcaacccggagaaagcttatgttagcaacggcaagacacatcctcgttagtaccgaggcacaagcacaatcactcaaaaccgaaatcgagtcaggcaccgatttcgctgaattggcaaaacaacattctagctgcccatcaggcgctgcaggtggtgacctcggtcaatttggtcgtggcatgatggtacctgaatttgacgcagtcgttttttcagcacctgtcaatacggtacaaggtccagttaaaacacaatttggctatcatttgctcgaagtcaccagccgctcagagtaatgctagcatggcgttaacataacgttagcgtaacgttaacgccactttgcctggcagtccgtgctaagataaccccttagcacgtgctgccagtttatctatgggtttatctgtgggtttatctgtccattgatgccgatgtgctcgaatactaggatactaggctgcactgaattgatttaaccccattacgccacttaatctcattacgccacttacaacacttacaacacaacccaaacacacgatgcaatttcaagttactcccgaattaatcgagaaaatacaacaccttgcttccgaacaattggatcaagagctgcatcgttacctcaaagatttacaccacgccgatatcgccgaaatcattgcggctatcccgcccgtagacgcggcgtacattatccgcttgttggacagcgaaaaaacggccgaaattttaatggagttatacgaggatgatcgcgaacaaatcctgctccagctttcgccgcaggagattgcgggcgaattagatatgatggacacggatgacgcggctgattttttggccgagctacccgacgaaatcaaaggcgaagtcatcgacaatatcgaagacgacgaacacgccaaagacctacaagagctcctgcgctacgatgaagattccgcaggtggattaatggccaaagagctgattcgtgtacgagaagactggcccgtgtctgaatgcattgatgaaattcgccgacaagctgaaaacgtcatccgcgtgcattcgatttatgtcgttgacaaagacgacaaactcatcgggcggctgtccgtcaaagacttgctaaccgtcaaaagccaaaccaaaatcgcagaaatctacatcccgcgcgtggattatgtgaatgtccacaccgacggcgatgaagtcgctagagtcatgcaaaaatacgacctagaagcactgccagtcgtggatgaaatcggcaaattggttggtcgcatcaccattgatgatattgttgacttcatcaaagaagaagcagaaaaagactaccaactcgccgcaggtatttcccaagacgtagacaccaatgatagctttatcaaacaaactcgcgcccgattaccgtggttattattagccctagtcggcagctttgtcgcggtgctcgtgattggcgagtttgataccgcattggaacgctacagtcgtttatttttctttacgccattaattgccgcgatggctggcaatgtcggggttcaatcgtctgctattattgtacaaagtattgctaacaataccttgtcagactctttatcgacccgcttattcaaagagttattactcagtttttctagcggactgttgctgtctttgttgctcctttttgccacacactttatcctaaattaccctatcagtcttgccatcaccattgccttgtcgttgattattgtgatgattattgcctcgctggttggtacgtttgtccctatcaccctgcaccgaatgggtattgatcctgcgcttgcgacgggcccatttatcaccaccagcaatgatatttttggtatttttatctttttttctattgcacgggttatcctcgaattctaactggcgacttatctggcaacttgtctaccgacttatcagcctaccccccttgccttaactgtcaccttaatcgctgacatcaaaataagccatcaaaataagccatcaagcaggccatcaaaatggacgacaaatatgctatagtaattatcacaatgactaatagcgtcaataactaacggcgccaataactaatggcatcagcgactaatggcatcgtattaatggcatcgcatcaatgtcatcacgttaatcgaccatgcataacaacccagaacgccttacacaatcaggagaacccatgcaacagcccatgcaacaatcccagcaacaatctcaagccaacaacgccatcgtgctcaaatacatcaacacccctctgggcaagatgattgctggggcgaccgatgacggattagcgtgtttgctgtttaccgatgtcgccaaattaaacgccgtactcaagcgtatcggacagcatactggcacaacgcccttatcgcagcccttatcgcaatccactagcacgcatcaccccatcatcgaacgcaccgaacagcaattagacgaatattttgcgggcaaacggacggcatttgatatccccttagccgcgctaggcacggattttcagcaagcgtcttggcaatacctgcaaagcattccgtatggacataccagcacctaccaagcccaagccaatgcattaaaccgttgcaaagccgttcgcgcggttgccaatgccaacgccaaaaatcctattggcattattgtgccgtgtcaccgcgtcattggtagcaatggcaaactcactggctacgcgggtggtctagaccgcaaagcagcactgctagaattagaaagcgccaaccaataaaccacacatcacatcacatcacaacaccatacaatcacaacaccatacaatcacaacaccacgaggtaacccatgaaaaatcttaacaaaagcctaatccaaccagcgacaccacttaccgcatcgccaattaagctaccaactaagctgccaaccaaactggccgccatactacttgccacgctgggtacctgtagcctagcacaggcaaacaatattgattatgaaattgatgggcaaacgtaccaaggctattacgccgcacctcaggcaaacagcaaaggacaagtcctacttatccacgactgggatggtatcgacgattacgaaaaaaaacgtgccgatatgctggccgctgatggctatgccacctttgcggtggatttatatggcaaagacgtaagacccgataaaatcgaggataaaaaagccgaagtcggcaaactctacaacgaccgcgataccatgcgccaacgtatccaagcaggactcacgcagctacgcgcccactcaggacagcaacccaccgtggtcatgggctattgttttggcggtggcgcaacactagaactcgcgcgttcaggcgttgataccgatgtcgttggctatgcttcatttcacggcacactggcaacaccagcgggacaaagctaccccactgataccgcaccgattttaaccctacacggcggtgctgatacggccatcccgatgcaagacgtagcggcactagccgagacgctcgaatccgcaagcgttccctatgaaatcgcggtgtattctggcgccccccatgcctttaccgtctttgactcagcacgctaccagcaaaccgctgatgaaaaatcctgggcagcgttttctgactttttaaacgaacagttcgggaagtaatgagttgaagtagtgagttgaaaaataaacacaatcaaataaaaaggcgatgcatgccaaatggcatcaccgctttgaatgttttacttacttcttaattattttatttagtggtattcgtgaaacatttacataaaaaacgaggcaaacttgcgaatgccccgtagtaaatgttttcacaacggaataatccttattgtgaattgctttcaattcacatagtaacacgatatggattaaattatcaatccataattaatacatcaggggacaacagaggactttatgaaaaaaatattaggattagatttagggactaatagcattggctgggcgatggtaggcgaagaaagagatgaaaacaataagttgatcgatgccgacatcatcaaattaggtgtacgggtaaatccccttaccaccgatgagctaactgattttgaaaaaggcaagccgctttctaccaatgcagaaagaaccctgaaaagaggtgctcgcaggaatctacaacggtacaaactgcgtagagaaaatttaatggaactattggctgccgctaacataattaaggcaggcataccgctgacggaagttggctctcaatcaacgcatcaaacactacaactacgtgccaaggcggctcgtcatccaatagaattaaacgaattggcaagagtactgctcgctatcaacaagaaacgaggctacaaaagcagtaggaaagcacagtcagaagacgaaggtatggcagtagatggcatggcggtagcaaaacatttgtacgacaaccaactaacgcctgggcaatacgtactagaattgttgctaaaaggaaaaaaatacatcccagatttttatcgatctgatctgaaagcagaatttgatattatttgggaagttcaaaaagcatttcaccctgaaatattagatgatgaattatacaaggcattaaaagaccaagggcagcaaaatacgcgcaaaaggtttttggcgataaaaggcatctatactgcagaaaataaaggcaaacgagaacaggtaaagctacaggcctatcaatggcgtaccgatgccatacaaaaacgagtccccatagcagcagtagcctatgtactgaccgaaatcaacaacgacaccaataaatctagtggttaccttggcaagatcagtgaccgcagcaaaatcttgtattctgacgggttaactgttggagaatacctctacaaccaaataaaatcgaatccgcatacttctcttaaaaatcaagttttctatagacaagactatctggatgaatttgaacaaatatgggaaactcaagcaaaatatcaccccgaattgactccagcgttgaaagaacaaattcgcgatgtggttattttttatcaacgtaaattaaaatcgcaaaaaggactcatcagccattgtgtttttgaaagctgggaagaagtacgcacggacaaggcgggaaatacggtgtacaacaaatcaacccatcagcccaaaatgcgtaccgtaggtcatagagtaatcccaaaatcctctccactttttcaggagttcaaaatatggtcggtactcaacaaccttgagataaaatcacttaaagatagtaacaaagctgacctgctaacagagcccacaactatttttgaaatcgatgaatcgcagcgggatttactctttgaagaactcaacctaagagggaaactcacagaaaagcaaatactaaacctacttggcatatcggctaaggaattcaaaaccaattacccagaggggctagagggcaatcgcaccaatgctgcgctttttaacatctatcaaaccattgccgagaatgaaggctatgggcatgattgggaaaagaaatctgcctcggaaataaccacagaactaaaagccattttcccagaaatgggcatagaggcagggatactggattttgattccaacctagaaggcaatgattttgacaagcaacctgcttatcaattgtggcatttgctctattccgtaacggatgatgataaggtttcggaagaggacaaaatcacctatggcaataatgcaactgccttaaagaagaagcttcatctgaaatttgggttcaaaccagaatacaccaaactattggctgccataacgctttcagatgattatggcaacttatcggcaagagccattcgcaaaatcatgccttttcttcaaaacggcaatcgctacgatgaggcttgcaaactggctggatacaatcattccaattcattgaccaaagaggaaaatgaaaaacgagcgctcaaagacaaattagaagttttagctaaaaatagtttacgaaatcccgtggtggagaaaatcctcaaccagatggtgaatgtcgtcaatcaagttatagatgaatatggtaaacccgatgaaatccgtgtagaactggcacgagaccttaaaaaatctgccaaagaacgagccgaagatataaagttcatcgctgataatacaaaagctaacgacgaggtacgccaaatcattcaaaaagattttggattcaccccaacccgaaatgatgtgattcgctataaattatggttagagttgggcaagaatggatacaaggatatttttaccaatcagcaaattaaaagagagcaaatattttcaaaagaaatagatatcgaacacatcatacctaaggcgttgctttttgatgactctttctccaacaagacgttagcctttaggcaagtgaatctcaaaaaaagcaaccgtactgccgtcgatttcatttccgacgaatatggcgatgaaggtctagctcaattcacggctcgtgtagagagcttatttaaaaacaacgccatcaccaaaggcaaatacaaaaaactattgatgacccaagacaagctgcccgatggttttatagaaagagacctgcgcaatagccagtacattgccaaaaaagcaacggcgatgttgcaggaattggtgcgccctaaagtagtggccaccactggtaagattacggataggttacgttcggattgggacttaatcaatgtgatgaaggagctcaacctacctaaataccgtgagctaggactgaccaaaatgcaaacaagaagggacaatggccaagaacaggaaaaagaagtagagattattgaaggctggaccaagcgcaatgaccaccgccaccatgccatggatgcactcacggtagcatttacccatcacaaccatattcaatacatcaacaacctaaatgccaggaaaaatgagtttcataaaaaacacagtaacatcattgccattgaaaaggtaatcactgcaactaaaaataacaagcgctactttatcccgcctatgcccaattttaggcaagaggcccaaaagcatatagaaggcattttgatttcttttaagacaaagaacaaggtagtcaccaaaaatattaataaaatcaaaaagaaaaaaggctatactgacaaaacacagctcacacccagaggacaattgcacaaagagaccatctatggcaaaagcaaacgccccatggataagcccaccaaacttagcaagcgatttacaatgcagcaagctcagctaatcatcgatgcagaacaacgcaagctggtgttggcgcatatggcacaatttggcaacaatccagaaattgctttagatactaaaacgcttaaaaaacaacctattacttggaaagatgagccactgaaagcggtgctttgctttgaagagatctttaccatccgcaaagatataagccctgacttaacagtggacaaagtggttgatgataaggtgcgagcgattttgcagcagcgcatcaaagactatggtaatgctaaagccgctttttcggacatagcgaaagacccaatatggctcaataaagacaaaggtatctccatcaaacgagtaaccattacgggcgtaagcaatgccgaggcactgcacaccaaaaaagaccatctgggcaatgagattctggatactaacggcaagcccatccctgtggactatgtaagcactggcaacaaccaccatgtggccatataccgcgatgccgatggcaagctgcaagagcaggtagtgtctttttatgaagccgtggctcgtgtacagcaagatcttcccatcatagacaaagcctacaataccgatttaggctgggagtttctgttcacgatgaagcaaaatgaaatgtttatttttccttcggaaaaagacaattttaaccctgcacatattgatttgatggatgtacacaatgcggcactaataagcaagcatttgtttagggtgcagaaaattgcaacgaaaaattatttttttagacaccatctagaaaccactgttgagaaccataaggaactaaatggaatagcatataaatcacaattgggtttgagcgcaattgaaggaatcataaaggttcggttgaaccaccttggtaaaattgttcaaatcggagaatattaaccgtctgaaattcaaatgaaacgaaacatctacatcaacagcccagcttaccttagctgtcaagataagcagttaaaaatcactgacccattcacacagtctgaaaagggcagcatccccattgaggatattgggctgttgattttcgaccattatcaaataaccttgacacattatttatttcagcaggttatgcaatcaggtggtgcaatagtcagttgcgatgataaacacattccacatgcaatcagcctgccatttacaggtaataaccaacatacccagcgcatacggcaacaggcagcccaaacgcaacaacacaaaaaccgtctctggaagcagattattgtcgccaaaattgaaaaccaagccgcactgttgcgacaactggacaaagatgcaaataaattaaaagcactcagtaggacggtcaagacaggcgataaaagtaatcgtgaagccgtcgctgccaaacactattggggtgctttatttggtcactttattcgtgatcgctacggtacaccacccaatcatttactcaactatgggtatgccattttacgaagcctaacttgtcaatcacttagccagtatggattgcaccttgcgttgggcatccatcatatcggcaaatacaatccgacttgcctagcggatgatttaatggaaccttaccgaccctatgttgatgcctatatcattcaatatctaaaggacaacccaaaccagtgtgacaatgaaatcacatcagaagttaaaaaagcactttttccaatcggtcaaattgatgtcttattgaatcaaaaaatctacccgctacaaatcgcgattaatcgaagcgccaaatcgctaatgaatagcctaaataaggaaaactacccgctagaactgcccaatttagggaaacagctatgctcaaccgacagcgtttaagcgcctatcgaattatgtggacgatggtgttttttgacttaccgacagaaaccaagagacagcgcaaagcggctaatcaattccgtaaatttttattgcaggatggctttaccatgtttcaatactcaatttatatccgccattgctacagcgctgaaaatgcagagacgcacattaagcgagtaaaaaaggcactacccaacgatggctttgttgggatgatgacgattaccgacaaacaattcggtgatatcgaactttttcatcaaaaacagtcaaaagaaacaccaaaaacaccgagtcaattagaattcttttaaaaaaatttacttttgctgtctaaaaaaataaggaaaaccagacgattatcattaatcctctggttttcgggttgctaatcatagcagtttgaaagcaattcacaactccgagggggtggcgaattttttggcatccgttgctaatcatagcagtttgaaagcaattcacaacctctatctgattctgcccagtacccagtacgttgctaatcatagcagtttgaaagcaattcacaacagacaaccgcttttgtagtcaccccgaaaagttgctaatcatagcagtttgaaagcaattcacaaccagggctttctgtaagacaatggaagcggagttgctaatcatagcagtttgaaagcaattcacaactaaaaagctatcttggagacttgtataacggttgctaatcatagcagtttgaaagcaattcacaacgagtaaataacaatgttaagtaatgaagatgttgctaatcatagcagtttgaaagcaattcacaacacgtaacgctgacatttgacacatttaatcgttgctaatcatagcagtttgaaagcaattcacaacgtaacgtccattaccctatcaggccctatggttgctaatcatagcagtttgaaagcaattcacaactagtaacgttgatttttttaggttgcctacgttgctaatcatagcagtttgaaagcaattcacaacatttgcccgtgttgcttgatggggggggtcggttgctaatcatagcagtttgagaatggattccctatcacacctatcgccgtagcaactggatccagcgtccaatattgagcacaccaatcattgcttggctcacgtacgtcagggcacacgccagcagtattttgcgtatggcgcttatatccccgtgactgacgtagtcgccctgcgtcaaaatcggcaatgctttaccaaaagaggcatcaaattcaacgggtaaagtgaccaaatgaataatggtcgaaaaaaacatcgaggcaacgaccaccaccagcaataaccgcgcaaaaaccccagcgccaggcaccaccgacaacacaggaatcgcaatcagcgcgcccgttgccagcatttcgactagccttgcttgtttggctaaaaaggttcgggtggtgaggggtttgtacctcgcatgatgctgtaacgcatggccgaattcatgagccgcagtcgccactgccgtcaggcttttgccatgatagactggctcggtcaggcgaatcgtcttgctaatcgggtcataatgatcgcctgcctcggtttgttctagcgtgacgtcggttaattcaaaggcatcaatcaagtgcttagctaattgcccaccgctgcctggtaaatccgcgcgatttttgctgtgtttggccagcacacgtttgacccaccaactcggccccaccaacaaagccaacaacataccgattaacaatacccaaaccatacgaatccgctaggccaacacaacttaacgattattcatcgctgactgtaactgttgtaagtcaagcattaacgacagctacctggtaaatattttcgatcgatattggttttgctctcgccgatataattcagcccgtcaatttttttatctttgtctatatacccacatttaaaaaatatcaaatcatttgataagtcttcgctaattacagggtgcagtgttagcatcttacctgtcaatatcgggtctttatcattataagtgatatgaatcacgccatcgataatctcaacttgcttggtatacgccccttttaataaatcaggagcctttacccctgcagccacattgtcttttggaaaatcatgcgtatagcgataatactccgcgattttttggcgtgctaccgcagataccgtaagcccttccactgaccttgcacgggtttcataactcagataagcaggtgtcgataccgcagccaatacaccgataatggtagcgacaaaaataaattcaaatagtgtgtatcccgctgattgttttttcatttaattaactcgcaatgtctcctagctggaaaataggcagatacatggcataaactggaattactgataacgcaataaaaatcaacaaaacaaagattgccattgtcccttctgccgctttggtttgctgtaataactgacgaataacggcctgtttacgaaataaaatttcattatcaattgcacccatctcctccgctatcgccaaaaaagcctgcgtattctgattgattttgatttttggtagtgctttttgtgccacctgtagggcttttccctcgccagcaaagtgaccacagtgcatatacatcaacaataaatactgatgataagaacgaacaacagggtagtaaagtggaataagcttaaaataactggggataggtttgagttggctcatatttttgcgcagatgaataggcaataaaaacgccaacagcagtataatcaaaaatgcaaccgttgaaaaccaaaagtaatgcccatgaagcatccactgcgtcacggcgggcaactctgcgccaaaatcaccaaaaaaatcctcaaacactggcaaaacttttattcttgatatcaaagaagaacccacggagacaatcaccatcatggcaaaataccaatacgcaactggatttagcttataaatctctgacaaatccaatctagattgctccaaccgattatattgtaacacgtactgattcaggctgatgttgccacattttgccagatggaataacccatgccatagccctagccctttgctaggcagtttgtttatattcccagctaaaatcattgataccattgacaacgatttttggtatcgtggggctaaattcgattgcaatttttcaagcgtcgctggcttgtcttctgctgccataactgttctagagacttcatctagctgcgtttcgttatgattaaaatagttaaaaaatatctctagcatttgaattagaatttaaatttgaattcgttatggatgagattcacaatctacagttgattggaaggtaggtgtaagggatatccgttttattgcccgctgatgccatcatcccctcaggaattgtcgcattaccacatgcccaagacaacggtgtcttggggtaatcagggacatacagcggacggattgtcagcgctttatcatgaagcgatttactaacccgttggcttaatttcacataaaaagcaccgtttttaaccgtcacactggcaatttcgttactgattagtttatctggaggcggcaatcccgctgcttcattatcagtggggaattttcccattgctttgtagtatgactcaatatcaggctgtaactgtgaaatgaatttttctacattttttatccttgcttcgacagtcatttgcaaataagctggtatggaaagagacgccaaaatacctatgatagcaacgacaatcatcaattcaatcagggtaaatcctttattatatttcttcatttttattcaattagttatttattcaactagcgtatagtagtattcattgcagacaaacaggtgacaaagcagacaccatccaccacaccgcatcactgcccacgatcgcgcgtgctataatctaatggttcgggggtaatctcgttaaattgttcggcatcgatttggcttaacaagccattagtaaaaaatagcgatacgcgacctgcttgcagtgcttgcgagtcgccatcgcgaaatcgttgtacgtaatcccagcggtcttgattaaagaaatcttgtatcgcgggcgtgccgatagcacgttgtaccgcatctttggtcatgcccacactgagtctatcgaggtcagtttgggtgataaaattaccttggtcaatatcgatacgatacggaattttgccgcaccctgcgacagtcaacgaaaccaaagaaaccaacaacgtaagcacctgcgagaattttttcatcttttttaaccagttaaatgagacattgaattagatattgagttaggtattgagttaggtattgagttaggtattgagttaggtattgagttaggtattgagttaggtattgaattagacattgagttaagccgtacattgcgcattaatttgtgtcgtgaatttaaacaaaaattaagcacgtcaacgctccattgcgttagggtttaaattgtaacgcattttgacgcaaatgttgcgcatgctccaaagttttttcatccatcgcgataccaccgctcatgcgcgccagctcggcgattttttgcgcctcgtctaaataggcaaaatgcgtggtggtcattgcgtcatttacttgcttactaatcaggatatggttatccgcataggcggccacctgcgccaagtgcgtcacacacaaaatctgattatactgggcgagcgtttttagcaatcgcccaacgacctcggctgtcgcgccgccaatcccgctatcgacctcgtcaaaaatcagcgtcgcatcggttttttgtgaaacactggcaacctgaatggctaggctaatgcgagacaactcaccacctgatgcaatcttatgcagtggtttcgcagcttgcccagggttaggggcaaacataaacaacacgttatccacgcccgatgccgtcgcgcgcgtcgccgatatcgtaatatcaaacaccgcattcacgaggtttagctcgtccaaccgcgcattaacctgctgtgccaattgtttcgctgcgagctggcggctgtcactgagtgcttgggcggcttgtctatactgtttttcagcttcagcaatctgtttgtcaatgtcctgtaattgcaaaaggctttgggtcagtgcatcgcgctcatcggcgatggcttgggtcaaatccaacaaggcatcggggctggtgtggtgctttctcgcgagttggtgcaaggctgacatacgcgactcaacctcagccagctgcgcggggtctaattcgatacggttgatataatgcgctaatgcgctattggcttcatcggcgtaaatcctcgtttgcgcgataaagtcggcgatttcctgcgcgtcatcatcagtggcttgtaatttatcacacagcgtattcgctcgttgtaataccgctaacaacccctcgccttcgccttcgaagtgctgctgtagctgctggctcaggtctagtcttgcgcttgcgcttgccaattgtttttgctgactttctagggcttcgaattcatcgggctgcaaattaagcgccgttaattcgtctaattgataatccagtaggttttttttatcaatcaagctttggtcattgtcttggagctgtgttttccgtttttctaattgttgccacgtcgcataggcagtttgcgtctgggtcaataaatcgtgatgcactgcaaacccgtctaataactggcgttgctgttctggtgcagtgagagattgatgggcgtgctgaccatgaatatcaaccaataattcacccaagtgcttggtcattccgacagtcacgggaatgccattgatataacattgcgatttaccgttacggtttaacgtacggcgcaggtggcaaacgctatcgaccgaagccgcaccgcctagcaattcatcgcctagcaattcatcgcctagcaattcatcgcctagcaattcatcgcccagcaattcatcatctaataactcatgggctaataaccactggtaggcagcgctactaggcgataaagtcaggctggcttggatatcagcgcgtgttgcgccatggcgaatccacgtcgcgtcagcccgatcacctagttgtaagcccaatgcatcaatcaatatcgatttccctgcacccgtctcgcctgacaagacatttaacccaggcgcaaaggtaacggtttgctcgtcaacaatggcgaaattttttagaaatagttgcgataacatcttatattaactcatttttaacgacaaaactgcttaccctaactacttaccctaactacttaccctaactacttaccctaactacttaccctaactgctcaaacgctaaatcccaaatactgccgactatcggttcagtattttattacgtattttgtggcgcactgccccagcccaatttttctcgcaggcgctttaacccatcgtaattttgcggatggtagatgtttaaccgctttgcatgctgggtgataaaaattttatcgcctttttccaacaacacttcctcttgcccatcgacggtaatttgaatgttattgtcgttattttcacagacttcaatgcgctgcatcgtctcggcggcaatcacaatggggcggtgtgtcagtgtatgcggtgaaatcggcaccaaaaccaacgaattcaaatgcccctgcaaaatcggcccgcccgacgataaggcatacgccgtagagccagtcgggctagaaataatcaacccatcagcccgatacgatgacaaaaataagtcatctaaatacacatctaattctaccatccgtgccatgcggcgtttatgaataaccacatcattgattgcggtatgcgtcgagataacctcaccaccacgttcaaccgccgcaaacaagaccgttctcgcctcgtgttgatacgcacccaacagcacttggtgtagcacggtcggcacttccaaaggcgatatatcggtcaaaaaccctaagcgccccatattaacccccgtaatcggcttatccgccgccaacgctgatcgcgctgccgccaaaaatgagccgtcaccgccaatcgtgataatcaaatctgactgcacaaccagcgactcacggcagacaatatagtgacgactgtcttggcgatactgcggaaaagaggatgccgttgccgcatctaaatagataatgcattgcgtcaattccagtacggcgatgacttggccaatagtctccgaaatatcgctttcaccgagtttgccaataatcccgacggcattaaatgaacaatttccatcaccattcgtttgattgtgagtcatgatatatcactagacgttatctaaatacaaacccacattgtagcctatttaccccataaaccaaatagcgtcccgtatttgctgagaataataaaaattttcattgagccgacacagacttgcgcccaattttgtgtataattcgatactttgtttgaatgacgtgctgcgatgattgaattaccgactatatccccttacctgtttactattggcaatgttggccccacatggtacggtctgatgtacgtggttggttttttgttaggttattggtttgccaagcgccaagcgcgacatatgcccgactggacccaagaccaagtcagcgacttactcacctatgctattttgggtgttattttgggcggacgcattggctatgtcttattttatcaattcgagcgttttttggataatccgctctatttattcaaaataaccgaaggcggcatgtcgtttcatggcgggctattgggagtaatggtcgcgacttttttattcacttataagcacaaaaaatcctggctttcggtgaccgattttgtcgcccctgtctttccgattgggttattctttggacgcatcggtaattttatcaacctcgagctatggggcaagcccactagtgtgccttggggtatggtcttcccaaccgctgacgcacaacccagacacccaacccaactctacgaagcaggactagaaggattattactgtttattattttagtcgcctatagtaaaatgaagcctgccttaggcaaactaagcggtgcattcttatgcggctatggcgtgtttcgtttttttgtcgagtttttccgcgaacccgatacgcatattggttaccttgcattcgattggtttacacaggggcaattattaaccttgcccatgattgccattggcctatatttattactcaaaccaacacgccctaatctacctaacacaaccccatctaacatcaatccatctagcgctaatcgcaaatgaaacaatatcttgatttacttagtcatattctcgacaatggctgcgacaaaactgaccgaacaggcacaggaacacgcagtgtttttgggtatcaaatgcgctttgatttggcacaaggctttccactactgacgaccaaaaaactccatatccgctcgattatccatgaattgatttggtttttaaacggcgataccaatatcgcctacctaaccgaaaacggtgtctcgatttggaacgaatgggcagacgccaacggtgatttaggccctgtttacggacaacaatggcgtagctggccaaacccagacggctctaccatcgatcaaatcagccaagttatcgaacaaatcaaacacacccctgattcgcggcgtatgattgtcagcgcatggaatgtctcagcgattgacgagatggcgttgccgccttgccacctgctttttcaattttacgtagccaatggcaaactatcctgtcagctctatcaacgctcgtgtgatgtgtttttgggtgtgccatttaatatcgcgagctacgccctgctcacacagatgtttgcaaacgtttgcggtctcgagccaggtgaatttatttggacaggtggcgatgtgcatctctacaacaaccatctcgaacaagccgaattacagcgtcagcgcgcacccaaagccttacctacgctgcgtattctgcgcaaacccgatagcgtattcgactaccgattcgaggattttgcgattgaagattatca

SEQ ID NO: 2177 - DNA, 24212 bp, synthetic construct
  source 1..24212: mol_type = other DNA
  misc_feature 1..24212: note = Synthetic
cgtttatagaccattactttggccataccctcactgtatgttgagatttcattgtatacaggtggcgctaaaacctctcctttggtattaataatcccatacttgatcatgctgtgaggttctatatccgataatgaaaaaacagccagatcatttgaaaaatcagatcccagatcatacttttcgggggtgatcattttaccttctttattgatggtcctgttgatcatatttttcctgtcatcttttgactgatgtttttgagatacccttgcatacccgttttgaaaaggataggcatattcatattgaaatttgagcacttcttcaccttttgtattgatgtagccgtaaagtccgtcttttttagccaaagccagcccttccgaaaaatagccggcttcttcataggcagccggaatcattatttttccggccgtatcaatgtatccccatttatcacctgtttttacagcggctctcccttcactgaaggggcctgcgtcagtaaattgggcaggaatagccaaaatgccctgtgcattacaatacccccatttccctttttccttttctttttgtgctatttcagatgggctatgtgaagtagtggtaccatttgtttctgatcctttaaccatcagtttaggcgtttctattttaggattgtattttccaatattgacgggaatgagattattgccccagctgaccaggccgtcagagtcgttatgagacccggcatcgtcatatataacggggattacctctttacctgaagtatctatataaccgtactttccgtttaattctaccttcgccaggtaagtttttttattttgggctgataaaagtgaacaaaatatcatcagcagaaaaaatatcgaattatttttcatatctaaattttactaaatgtttggagtctgtataaagcctgattatatttatgtattaccgctattgaaccttcagtgtataggttctgtatagttgaaacacccaatgttgttttaataatcaaatataataatgggtacggagttttctcctgagcaagctgaaaagtttttaaagataactataaatattataatgatgtggaaaaaaagaaaattagtttcttaatacacttgaaaaagatttatcagaaagtaagcggccccttaaaagcgcagatgaaaaagatattatttatgttactaaactacttatagagcgttaattttttgagttgttaataaatctggttattcaaaatttttataattgatacagttaaatatgtatttgatttaaattttacggattaccataaatgagttgattttattttttattaaatttaacgttaacttatgtattattaaaaatgaccaactttgaaaacgtaaatcaacagattgttactgttaaatcaagagcagataaagctcttaattcattaaaagggattttgctgggaattatttcagatgatagaatagatgccaaagagatgaaagagctcggattatgggcaaaagatcattatgacctgattgaaagaaacccgtttcgtgaatttatgcttctgatagaaaatacggtatctaacgaaatacctgcaaaagaagcggtagaagatttatattggttatgtcagaaatatgagcatgacagtatttactacaatggaattacttcagatctgcagcttttgcagggaatttttcatggaattctggctgatggggttctgaatgatgatgagatctttaggcttcatgcctggctttcagaaaatgaacatttaaattcatattatccctatgatgagatcaggagtttagtcctttctattgtggtagataagaaaattgaggaagaagaaagaaccattttaacagccttcgttaagcaatttgtagaattgcgaaacaatgagatagccgagaaaatagaaagagatacttccgatgtgaatatttccggaatttgcgcagtagatcctgaaattacctttgaaggaaaaaccttctgtattacaggaattttgagtaggggaaccagaaatgaattgcaggaagcaattcaaaataaagggggaatttcggtaaataatatttcaaaaaaaacagattatcttattattggagatatgaataatgcctgctggagttattcatgctatggcagaaaagttgaaaaagcattggatctaagaaaatcaggacatactattgttttggttcacgaatttgatatttttgatgcagtttaaagaaaaaccttcatagaagttccaaaccaaacacaaacttaatatgtcgaatgggaatctacatagtataaataattctattattgatgtttccggaaatgcaaatattccaatcaattttgagccaaatcttcaacaaatatctgctgagtctgtaattcaggatcagcaatacgataatgactcatggaaaataggtaaaaagtataccagaaagcttaacctagatgatgagcagatagaaattcttgataagttgagatttgcggataatgttttcaacgaaatagaattctgcaaaatacagatactgaaacaatttttaagatcaatagagttttttcaaaaaaactgcgttcctatcaacaaagcttatgaaacggtgattgatgaactttcagaaattattgtctgtcttcaatataactacagaaaagaaagcctgaactataaatatacctataattctgtacagtcagaaattttgaatcatattctgaaattatgtgagaatagtgtgcgcgaggtatatggaattaaaaggaaaattaatattgattttaattatagtaatccagatattctttaccaatacaataaaaaaataatttcaaaattagaaacttttttaacggaaaatcaacatcagatcttggatgccgattataaaacgaatatcattcttaacgaaacaaataccaatcgctggaaggcgaaatttgatctcgtcaaagaagattattccaatcctttatcctttgaaagagagattttcagattgactgatgttaacatcaaaaatccgtctgttgatgccatatttttcgaagcctcgaagtttgttgcaggatatgataaaacctgtgcattaaggctttacgttcattatttgcataaagatctgaatgcaccgaaatttgatagaaagcaattgaccaaaaccattcagaagaatctgttttcaaccaatgaacagcttaatgattttgagaaaattttaagcggatttattgcagacagaaacctggaaaaagcgattgaaaaagttaatcaaatatatcttcccaaaagaaagaaaattaaaattgatcatgcagcaattaaaaacattcagtctcaacattctgagaccgctgatattttgggacaaatcctgaatgatgactatgaagatgaaaatgcttctataaaaaccggaaaagcaaaagatgagaacgaactaacgatcaatataataaataaaaattctgaacttcagatttcaaagtatcttgaagaactgaatttaacagatcttcaaaaagagatattggatttatttgaaaaacagagctttaatattcttcaaaatgatcttgaggagttcattaaatcaaagaatatgttcatgggatcaaccattaattctgttaatgatagctgtttcgaaatacttgatgatattttgattgaggaagaagatgaatattttacaattaacacagaatattataaaaaacttttaaacaatgattgacaatattaagccaaaagaagcaacctcaattatcaattccttagtcagcggtgttgttcctaaaattggagtacagcatattactgtaggacggtctgacgaaattaatgccttcatcagctctctggaagatgtgaaaaacggacatagtcttgctaaattttgggtcggggattttggaagcggaaaatcttttatgcttcatttattaaatacggtagctttaaagcaaaaatttgttgtagccaatgcagatttcaccccggacaacaggttatattccaatgacggaaaaagcgtaatcctatactccgctattatggataatattgctattcagacaaagccagaaggaggagcgctccagactcttctggaaaaatggattgagcaggtaattacaaaaactgcggaagaaaacaatatttcattagtagagatcagaaatgaacagtatttgaatctgattcaaaactcaatcatgaaaaccgtaaatgaaatcaccgaagtaggtggctttgattttggttccgtgattataaagtattatgaaggttatactaaaaacgatgaattgctgcgcagaaatgcattgaaatggcttaaaggagaatacaaaacgaaaactgaagcaagacaggaactgggggtacgggaaattatcagtgattccaattattatgatatgcttaaaaatttctgcaaactctttgtaagtatgggatatagcggttttatgatcaatctggatgaagcgattaatctctacaaaatatccacagcagcctcccgtgagaaaaactacgagaaagttttgtctatttacaatgattgtttccagggaaaggttaccaatcttttcatcaattttgccgggacaaaagaatttttggaaaatgaaagaagagggctttttagctatcaggctttaaaatcaagattagaaagcaataaatttgaaacactggagatccgggattttgcacagcctgttattaaactgatgcctttaaatcacaatgaaatttttgttctgcttaaaaaactaaaattgattttcgattttaattataaaacggaattaaacattactgatgaagaaatttcagcattcatggaagaaatgtttaacaagcccggagctgaagaatttctgacgccgagagaagtgatcagggattttttgaacattctgaacattatcagacaaaaccctgaagtagataaaaaacagcttttcggagaaattgaaatttccgatgaaagaccaaatgattctgttcttattgacagtatagaagaaatatgacagccttcaacctgctttctgagcctatcagaaaatatattcgtgacaagaaatgggagagtctaaggcctattcaggaggcagccattcaaagaattatttctacggataacaattatgttttaatatccagaacagcttcaggtaaaactgaggctgcttttttgccgattttatcaaaagtaaactttaaagaacagggagtaaaggttctttatatttcaccattaattgctttaatcaatgatcagtttgtaagaattcaggacctttgcgattatcttgatgtacccgtaacgaaatggcatggggaagctgctaaaggagcgaaagacaggctgcttaaaaatcctgaaggaatagttctaattactcccgagtccctggaagcaatgtttgtgaataaaccctataacgtctgtcatttattttccgccttggaatatattgttatagatgaaattcattcttttttaggttcagaccgtggaattcatcttcagtctttattgaacaggttacaaagagtcaataataaaaaaatcagtattgtagcactttctgccacaataagtgatactaataaatacatggagctgaaagaattccttggcgattctgaacatacgaaaattataagagacaccactccaaagcctatcaatgcggtatttaaatattttgaaggcggaaacagtgaacttccgtcagaactgatagaagatctttatgagcagactaaaaacagtaaaacactaatttttcctaatttcagaggcagggtagaagaagtggccgtaaaacttaagagacaatcagacaggaaaaatgggcataaaaactatttttcacaccattcttctgttgacaaggaggtaagagaagatatagaaaaatttgctaaagatcaggaaaataaacataaaaatttctgtatttcctgtacatctacactggaattaggaattgatattgggaatgtggatgaggtcgttcagattgattcaaccaacagtattgcctcattaattcaaagagtcggacgaagtgggaggcgggaagataaagcaagcaatttgtttctatatgcaacagatgaatggaatttattgcagtcattgggttgctggcatttgtataaagatcaatatatagagcctgtccgcattgataaaaaaccctatgacattcttgttcatcagattttgtctattgttaagggaacatcaggaataatcttagataaacttttagaagaaattcggctcaatactgcgtttgtgtatatcgaaccagaagaggcggaagaaattatcaatcatcttttgcagatagattttcttgaaaagttggactatgaatttattatcggaatagaaggagaaaaaattgttaataataaagacttttatagtgtttttaaaacagagacattctttaaagtttccagcaacggaaataaaataggagagcttcctctatcttttcaattaaaaaaagatgaaaatatttttcttgcagctaagatatggaagatcttacatgtggactttaaagcaaaaaaagtagaggtggtgagagcaatggatggcaaaaaacctttattttttggaagtgggggagatacggcacacaaaataagagaaaaaatgcttgaaattttagtgacaaaaaataagattgaagcacttagtgaaaatggggaaaatgtaattaataatctgcggaatgatttttccgtttttaatattaaagacatagttaatgaacgtcctttactgattagtaatgataatctgaccttctattcatttgcagactctaaaatcaacaggacaattaaatttcttttagaaacagaaggtatagattgtcaatattttgaatggaacagttcttttcatctgaaaatagacaaaaatatcttcaaatcaaaactcaaagaaatatgcgaaaaaaagaatgtaaattttgctttgatgctaatgttggacaaaagcccgggagctttagatttctcaaaatggggcgggtttctaccaataaaatatcagattgaattgcttaaaaataattatttggattttaaaagctgtaatgattatttaaaaaaaataaattttgtagaaaatttgtaagttttaaagtaaataagaataagcttctaatggtgtggtttaagaagtacttatttctggttctgtataacaaaataccaacaagtgcaatttttttaaagtaaattaggcttgaattcccataaaacctatatttgcagcctaaatttttaaataaaatgaaagaactaatcgaaaaaatcaacgcggaatttgaagtattcgctactgaagcaaaccaacaggcagaaaaagggaacaaggcagccggaacaagagctcgtaaatcagctttagaactaagcaaactgttcaaagaattcagaaaagtttctgttgaggaatcaaaaaaataaaaaataacccttgccgaaaagcaggggttattttttataatagttatagctcttatccgataatttatttcaggaggtttacctatccataggaagtttatatgatcatgctcagttggatccttttcctcgcttcatccacttcagttacttttacctgaacgtgctgatgaagctttactacctcgttcacatcagaaacaaaaccgtctttcagctgggaaatatgaaccagcccgctttctttgatccccagatccacaaaacatccgaaagccgtaatattgttaactatccccggtaagatcatacccgattttaaatctttaatgcttttcacattagggtcgaattcaaatatttttgcagcttttctcgggtctaatcccggtttttcaagctctttaaggatgtcttttatccccagaataccgatatcttcagtaatgtatttttcaggccggatcagagagatcttttccttattggcaataagctcatctgttctgatccccagatctttagccatcttttctatgattccataagcttcagggtgtaccgcagaattatccaaaggatttttggcatgggagatccttacgaatgcagcagcctgctgaaaggccttttcacctaatctgggtacctttttcaactgctttctgtcttcaaaaggcccgttttcagaacggtaattcacaatattttcagccattttctcaccgatcccggaaacatagcttaaaagtgatttgcttgccgtattcaggttaataccaacagaatttacacatttcattactgtggaatcaagttcgttctttagctgggtctggtctacatcatgctgatactgtccaacaccaatggactttggatctatttttaccagttcagccaatggatcagccaatcgtcttccgatagaaacagctccacgaaccgtcacgtcataagatggaaactcttcccgggctattttactggcagagtacacagacgcaccggcttctgagaccacaaaaacctgaacagccttatcaaatgcaatttttttaataaaaaactctgtttcgcgacttgctgtaccatttccgatagagatcgcttcaatattgtacgcattgaccatagaacggatctttttcatggccattccggattcattttgcggagcgtgagggtagagggtttcattatgcagaagatcccctttttcatccatacagaccaccttgcagccgcttttataaccagggtcaatagccaggatccttttttctcccaaaggaggagccaagagtagctggcttaaattttctgagaaaatttcgattgcttttttatccgctttttctttagcttcttgtaaggcttcgttggaaatagcaggttccagcaatcgtttgtagctgtcttttatggcagatgaaatatgctctgacgtttcattattagatttgatgattgcattctctataaaatcaatagcttcttccttatcgatttccacattggttttcacaaagccttcggtttcggccctgagcatggcaagaagccggtgcgaaggagttctgttcaggttttcttcccattcaaaatattgggagaatttctgagcatcttcttcatcttttttagcttttacaactttggaagtaataactgccttacgctgaaacatccggcgcagattcttacggacatacatgttttcattgatccattcggcaatgatatcccttgcgccttgtaaagcttcttcttccgatgatacattctcattgatatattttgaagccaaaaacaaaagatcattgcttttctggctcatgataatcttagctaaaggttccagtcctttttcctttgctgcatcagctttggttttttttcgttttttgaaaggaaggtaaaggtcttcaagctcctgaatatcgaagctgtcttcaattctttgcttcagttcggcagtcagggcattttgttcttcaatggattttaagatggtttcttttcgtttgatgatctcttcgaactgcttattaagttttgagatctgctctatctgaatttcatccagatttccggttttatctttccggtagcgggcaataaaagggatggtacagtcttctgataataactgaagggtattgcttatgcttttttcggatatattgagttgctgctgtataaattttaaagaagtcattttggttttttgaaaaagcgaaaatagtgttttgaaatgaaaaaggcgagttgccccgccttaaatgttttcacaacggaataatccttattgtgaattgctttcaaaatttagtaattcaaaaatagtaaatagatttgattatacaatacggaaaaccgtaatttactaataatgtaattttcttacatttatataacactaataactgtattactatgtcaaaaagaatcataggactggacctcggagtgtcttccataggatgggctgtggttgaagaagatcttaaaaatccggaaaacaataaaattataaaattgggagttcgtgtaaatccccttacaacagacgaacaaactaattttgaaaagggaaagcctattactaccaatgcggggaggactttggcaagaagcgccagaagaaacctccagcgtttcaaattgagaaggaaaaatctgctggaaattttaatcgatcataaaattataaacaggaatgatatcttaactgaagtaggagagcattctacttttcagactcaacagctgagggcgaaatctgcaagagaaaaaattgaattatctgaactggcaagagttttatttctgatcaacaaaaaaagaggctataaaagcagccggaaagtacaaagtgatgatgaggggaaagccattgacgggatggctgttgcgaagcaattatatgagggaaatagtactcccggagaatatggatatcagcttttaaaaaagggtaaaaaacagatccctgatttttatcgttcagatctacaggcagagttggataaggtatggagcttccaaaaacaattttatctcgaaattctgacagatgaatttaaaaaagaacttgaaggaaaagggcagagggcaaccatagccacctttttgaatcgttataaaatctatacggcagataataaaggaacaaaagaagaaaagaagctacaggcttatgagtggagaagtaaagctatttctcaccagctggatattaaagaagtagcttatgtaattacagaaatcaataataatctcaataattcaagtggttatcttggagcaataagtgacaggagtaaagagctttattttaacgatcagacgattggggagtatctttatgtacagttgcagaaaaatccccataccagactcaaaaatcaggttttttacaggcaggattatttggacgagttcgagaaaatctgggaagcacagtcaaaattccattctgaactgacccttgaattaaaggatgaaatccgggatgtggttattttttatcagagaaaactgaaatcacagaaaggattgatcagtatctgtgaatttgaaaacaaggaaattgaaattcaggaaaatggaaagactaaaagaaaaacggtaggattaaaagtagcacccaaatcttctcctttgtttcaggaatttaaaatttggcaggttttgaacaacattgagattaaaaatgaagagggaaggaggtttttggatctggaagaaaaagaaatgattttcgatgaagtgaatctgaagggaaatatcaccgcacaaaaagctctggagcttattggatttaaggaaaaagaggtgaaaatcaattttaaaaccattgaaggaaataaaacgaatgaaaaattgtaccaggcttatctgaaaattctggacctggaaggatataatgtttttaagttgctgaaaattaaagaagataaagatgaagccaaattatctgaactgaaagtatctgcttctgaaataaaagcgatgataaaaccaatatttgaggctaacactatcaatacttccgttttggattttgatcctgaacttccgaacccggaatatgagaaacagcctttttatcagctatggcatttactatactcatatgaaggcgataattctgcttccggaaacgaaaagctgtatgagcttttggaaaagaaatttgggtttaaaaaagaacattccaaaatattatcttctattgtattttcacaagaatatggaagtttaagcagtaaagcaatgcgtaggattttcccatacatcaaagagcataaatatagcgaagcgtgctttttggcaggatataatcattcaaagaattctttaactgctgaagatttaaaaaacagagtgctaaaagataaattagatattctctccaaaaattctttgagaaaccctgtggttgaaaagattttgaatcaaatgattaatctggtcaatgaaatcatcaaagaatatggaaacccggacgagataagaattgaattggcaagagagctgaaaaaaaatgccgaagagagagctgaaatgactaaaagtatgaatgaagcaacacttctccatcaaaagtatgcagaggaactaaaaagagaatttggtattcctaagccgtcaaaaaatgatattatacgttataagctatatctggaattggccgctaatgggttcaaagatctttatacggataagaaaatacaaaaagaaaacctttttacgggcaaatacgatatagatcatattattccgcaatcaaggttttttgatgacagtttttccaataaggttctggttccgaggcagtccaatctggataaagggaattttacggcttacgattttatagaacagggtaataaagaagatttcggaaaatatctgaatgtcattaaagagctttacgagaaaaaatctatttctaaagccaaatatgagaagttattgaaaaaagggttggagattggtgatggttttgtagaacgggatttacgggactcacaatacattgctaaaaaagccaaagaaattcttttcggaattacccactctgtgatatctacctcaggaagtattacggataagctcagggaagactggaatctggtgaatacgatgaaagaactgaatttggaaaaattcagaaaatcaggacttaccgagattgttagaaactctaaaggagaagaaaaagaaatcatctctgaatggtctaagcgaaacgaccaccgtcatcatgcgatggatgcacttacagttgcttttacaacccataatcatatccagtatctgaactatctcaatgcaagaagtaatgaaaagcataaggaacacaaaaatatctatgctattgagaatatgattacagaagtaattgaaaaaaagaatggctccggatcgaggagattcatttctccgattaaagatttcagaaaaatggccaaaaaacatttacaggaagttttgatctctcataaagcgaaaaataaagtggtaacctctaatatcaataagattaagaaaaaaggcggagtcatcaaaaaaacgggacttacaccaagaggacagctacataaagaaacagtctatggaactgccagaattttgcagaccagagaagaaaaaatatcggcaaaatttgatctgcagactattcagaaagtgcagaatgaagtctacaaaaatgcattattgaaaagattgaatgaaaatggaaatgatcctaaaaaagctttttccggaaaaaatgccatccagaaaaatcctgtttattataacgaggaaaagactggtgttatccctgaaaaaattatcctctcatggtatgacaccatttttacgattagaaaacctataaatgcggacaattttaaggattataagaatctggaaaaaattatagatgccggaactcggaaaattttaaaatcccgtctggatgaatttgatggtaatgcaaaagaagctttttctgatttggacaaaaacccgatatggcttaataaggaaaaaggaatttcaataaaaagtgttaccattaccggagtcagcaatgcagaatctttacattttaagaaagatcacttcgggaatgaaatattagatgatcataacaataaaattccggtggattttgtgagtacgggtaataatcaccatttagcagtgtatataaaagaaaatggagaattagatgatgatatcgtctccttttatgaagcggttgaaagagtgaaccaaaaattaccggttgttaataagaattacagatccggtgaaggataccgttttttgtttaccttgaagcaaaatgaaatgtttctgtttctgggtgaagatttcaatccgaacgaaatagatttatatgataatggaaatttagaaatgatttctaaaaacttattcagagttcagaaaatttcaaaattattatatggcaattcatatgttagagaatatgttttcaggcatcatttagaaacatcagttgaagataagaaggagttaaaggatataacatataaaagtgtaaaaagtcttgaggggttgagaaatattgtaaaggtcaggcttaatcatttaggtaggattgtacaggcaggagaatattaataccctataagaatcatgattacccgttccatctatatcggcagtccggcatatctgaagctcaaagatgagcagatgaaaattctttgcccggaaaccaaaacagaaaaaggaagtgttcctgtggaagatctgggattgctgatgctggatcatttccagatcacggtttcgcatcagcttattcaaaaaatgatgggaaataatgtagttgtggtaagttgtgatgctcatcatttaccctacgggatcatgcttcctctatatgggcatacagaacattcagacagagtgaaagatcagttggaagctagtgaaccacttaaaaaacagctttggaaacaaaccatagaatgtaaaatagaaaatcagatggaagtcctcagaaaattagggaactactatgaacctatggcagactatcagaaaaatgtaaaaagcggcgatatcaccaatatggaaggtattgcagcgcagcattactggaaatatctgatcagtctggattttcttagagagcgttttggagattctcctaatcagtttttcaatttcggctactctgttttgcggagtattgttgccagggcaattgttgaaacgggactacttcctgtattgggaatttttcacaaaaataaatacaatccttattgtcttgctgatgatctgatggaaccttatcgcccgtttattgacttactggttatggattggctgacgaaaaatccaaactctgatgagctgacaaaagaatttaaggcccatatattacaggtggcaacaaaagatgtgaaaatcgatggtaagaccagaccgttgctggtagctgtaaagacaacggttgcttcgctttataaatgctatacaggagaaaaacgtctgatctcttatcccgaattgatatgaatgccgaaaggtttaacgcttaccggattatgtgggttttagtattatatgatttaccaacggagaccaaagccaatatgaaggatgccaatcgtttccgcaaagcattgatcgacgatggttttaccctcttccaattttctatgtatgtacgtcactgcccaagccgtgaaaatgctgaagttcatataaaaagagtaaaatttatgttacccaaagccggtaaagtggccattatgtgtattacggataaacaatttggagatattgaaatcttttttgccagaaataaagaagagccaccaccaaccttccaacagcttgaactattctgatttttttaattctaaaaataaatataacccactataattcagtgggttatattttgaggctgtgactaatcactaagatactaaattttgagagcaattcacaaccatttggtggcgtatagctaaaagtaccatgctgtgactaatcactaagatactaaattttgagagcaattcacaactttacagacgcccagaaaatggcacgaaatgctgtgactaatcactaagatactaaattttgagagcaattcacaacaatcaggcaatgagtataaaaacaattatagctgtgactaatcactaagatactaaattttgagagcaattcacaaccctcttccccgttattatagggataagctagctgtgactaatcactaagatactaaattttgagagcaattcacaacaggcaatacgacatccccttccctaccgcagctgtgactaatcactaagatactaaattttgagagcaattcacaacattaatattaatagaaaaattgaataacccgctgtgactaatcactaagatactaaattttgagagcaattcacaacttgaaaatggatggcaaccttaaaggtgccgctgtgactaatcactaagatactaaattttgagagcaattcacaacagcctcaatatgggcgaattggtcccgtgtgctgtgactaatcactaagatactaaattttgagagcaattcacaacaaagcgatgacttacgtcttgatcggccgcgctgtgactaatcactaagatactaaattttgagagcaattcacaaccaggaaacactacagccccttccctaccgcaagctgtgactaatcactaagatactaaattttgagagcaattcacaactacaaaacgtatatttgccgtagaagacaggctgtgactaatcactaagatactaaattttgagagcaattcacaacctactcaggaaggctaaaatatatcaagctggctgtgactaatcactaagatactaaattttgagagcaattcacaacattgttgatattaataaaacaaataataacgctgtgactaatcactaagatactaaattttgagagcaattcacaacataggacatatatatgccggcgacaaatacgctgtgactaatcactaagatactaaattttgagagcaattcacaacccggcagtaaatatgaaacctccgtaattggctgtgactaatcactaagatactaaattttgagagcaattcacaacgaatctgttgatagaaatagctctttgtttgctgtgactaatcactaagatactaaattttgagagcaattcacaaccataaatgaaagcaggaaaaaagaattccggctgtgactaatcactaagatactaaattttgagagcaattcacaacaggataaaaagagctttaaccgattaccgggctgtgactaatcactaagatactaaattttgagagcaattcacaactcacgtggctgggtggaattttccttatccgctgtgactaatcactaagatactaaattttgagagcaattcacaaccatttctatatccgatgctgagccagtgaagctgtgactaatcactaagatactaaattttgagagcaattcacaacataacatgtcacacttagaattagtatttagctgtgactaatcactaagatactaaattttgagagcaattcacaactcttgcagattatttaggattgccggccgtgctgtgactaatcactaagatactaaattttgagagcaattcacaactcatcagctatctgtgtatctaagtggcgagctgtgactaatcactaagatactaaattttgagagcaattcacaacgcacgtaacagactattaatacctcacaatgctgtgactaatcactaagatactaaattttgagagcaattcacaaccaaaaaacagattaaaatgaaaacaaacgagctgtgactaatcactaagatactaaattttgaaagcacttcacaacaatgacgtactggaatggttatccatgaaagctgtgactaatcactaagatactaaattttgaaaacaatcaaaactactcgagaatctcatcataatacaccggaatatcattagacctgtcaaatcccataattataaccttgtagtttttagcatcgtcattattataaaactgaatggttgccggttcattgggttgtgtttccagataaggattccagtaaagagtgcttcgactgtcttttggaatatttttaaaatcgggattaatataaaccgaattattaaagggaatttctttatcatatcctttaaatgtgtattgctttaatccggataatttatcttgtgatttaatttctggagccatattaccatgacgcgtatatatagctatggctccatttaaactgcccataccagctggaaaagttcccttgataactttaaccatagctatacttgatacagggatcatttcaatctgactggtgcttactgccatttcgttaagaaaaataagaggtttgtagcccccgagattcactttatatcctataccagtagaatatatttctaatcctgctactcgagcctgcagccaggtaaatatgttaggtgctgtctgagcttcttcatgatcatttacaaaatcaaaaatttgttcattaatgctttgaaataatggactgcttaatttttttcaagaatttttaatttatcacttttagatgttttaatttttacttcctcgatatctgttattttttcagatataaatttttgagtgtttttagtcgctatggatctaatttcttcgggagataatgcatcttcagaaagtctctttgtaagattaaacttgcttttaggtaaattatttttatagggtataaaagcataatttggctgaaaaaaaacctgaaagtctcttttatccattttttgctctttatttaattgatatgaaagtttcatattatcttcgaatatcattccgcttagtgtaaaatttccattttcatctgtttgtatctcataaaattttgagccaaattcaggaatatcaaaaattaagcttaaagaagcgttgacagctggctgattattaatcattactttggccttatatgtaatataagatgaatctgccggatattttataacagggtaaatacctgaaataatatttttccaatcaaaacgtttccatttttcagaaattaatagagcatctaaagcttcggaattatgattctttatgaaatattgtgcgggttttataatattagaagtaatgtctccagtaagccacaaacggcttagtaaattgttttcttcttctgaactctttatttcgggatcttgaaccagaacggtgtaattatttgttatattaaatgagtttagctcacgtggttttttatttaaagatatttcttgtaatacaggtcgttgtatttttaataattcaggttgtacgaaacaaagtctttgagcaataatattttctttgtcatcaaaaacagtgagttgtaaaataccatttataagattatcagtaggggttagaatatggttgatccgataattttttgaattgtgctttatgaacaagacgattgttaatagtacctaagaccgtataataattattttcttgagataaattctttgactttagagtatattttacagcatccatactgcttataacttgtaaattaatgcctgaatcagaaacatttggtaaatcaatactctgttttttacccatattatcttgaattacaagtccatatttttttccactttgaggagtaaaactaaaagatccaacattttgatcaaatcctttgaagctagtaattttcacatcaggcttttccatatcaataagataaccatgccaatctgaaggtgtaaacgtttcagaccgtaatcttactgcaaattttgtattgatatcacttataaaagttccactttctggataagctgaagctgtccaatctgaaactgtattcattgtaagtctttctggagaatttggattataaacttcaataggttgtattagttggaaatcttcattaaaattagccatccaagcagtatatgctctaatataataaattccctcttttaatttttctggaagcgcaatactcccatgaccttctcctttaaataaagaaattaatttttttgctatttggatcttatgactatcgtaaaattctatatataaagatgtcgaaatgttagaaatagcatacccatcaaatacaaaagacttgaaccatagattctctcctgccacataactgcttttattgaatagcaggtgtaccttttcctgcggatatttttctgcaaaaatgcgtaaagcctgctccgctttgtcctgtgctttggaatagctgatcatgcaaagggcagccaggatgatgaatttttttgtcataggtgttttaattgaaattgtgcctttatttgaaggtcaaaaatacatttttcattagctttgaccaattaattttatgggatgatcttttattttcttttgatgaatatccttacattgatatttttcagttatgataaattttcagctaaaaatcataaaaaaagaatatctgagcatacgcttttatcattaacgctttttgggggaaccatcggtgcggtttccgggatgtttcttttcaggcacaaaatttccaagacgtcatttttgctgaaatttggagtaatcattttaatacagatcattcttattttttctttcagaaaatacctctattcatttatttgatccataattcttcactgaaatatttcagttttttatcatcaataaaaagccttccttcataattgaaaatattttcagacgggatttcagatgcagtattgtcaatttttcctttaagaaaagatttgggtttggaggcagaaatcgttaactggaaagaaacccttttgggtttggaataaaaaagaacctgatgagtctggtagcctgtactatccgtaactttaaaatcgttttttaattccagggtatccgaaaacctgatggattcctttttccagccctgaaatatggagccttccactatcagtaggctgtcgtttaattttgaaaaagtgaatatagaaggatagtcattcattgtaagctctttctccttaaaatcttttccggtaaaatcaaaagtaaaaggttgaggttgagacttttcgcaggaaataatgcttattacagcaacaaacatacaaactacattttttgaaaacatactggctataatttaaacagttgataaatgtattgaatttttaataacaaaacatacttctttttatgaattataagtcttaaaatgagtttagggtttcttatctgtattctaaaacagaggctttggtttaatttcctcattatgaatttgttaaataaattacaatcataataattaattcattaaaaatcactacttttgcacccgtaaaaatcttatatgcaaaacattagaaatattgcgattatcgcacacgttgaccacggtaaaacaaccctggttgacaagatcattcacgctaccaatattttcagggaaaatcaggaaagtggcgaattaattatggataacaatgatcttgaaagagaaagagggatcaccatcttatccaaaaatatttctgtaacctataaggacacaaaaattaatgtaattgatactcccggtcacgccgatttcggaggagaagtggaaagagtattgaaaatggctgacggagttttactattggtagatgcctttgaaggcccgatgccgcaaacccgtttcgttttgcataaagcccttcagttgggactgaagcctattgtggtgatcaataaggtagataaagaaaactgtcgtcctgatgaagttcatgataaagttttcgatcttttctttgcattggatgcaactgaagagcagttggatttccctacctattacggttcctcaaaacagggatggttcaatacatctttagagcctacagataacattcttcctattcttgatggtgttctggaacacgttccggctccgaaaatagaagaaggaagccttcagatgcaggtaacttccttagactattcttcattcctgggaagaattgcgatcggaaaagtgatcagaggatctttgaaagaagggcagtggataggccttgcacaggaaggagataagatcgtaaaaggaaaagtaaaagaattatatattttcgaaggattaggaaagaaaaaagtaacagaggttcaggcaggagatatttgtgctgtggtaggattcgatgctttccagatcggggatactttcgttgaccttgaaaatccggagccaatggaaagacttgcgattgatgagcctacgttgaacatgacgttctctatcaacaactctccgttcttcgggaaagatggtaaatatgttacttccaatcaccttaaagaaagattggaaaaagaattagagaaaaaccttgcattaagagttcagcagacagatgatgctaatacattcttggtattcggtagaggtattcttcacttgtcggttcttattgaaacaatgagaagagaaggatatgaaatgacgatcgggcagcctcaggtgatcctgaaagatattgatggtgaaaagtgcgaaccttacgagacaatggtagtagacgttcctgaagaatattcatcaagagtgatcgacctggctacccaaagaaaaggagatttgctgatcatggaaaccaaaggagaaatgcagcatatggaattcgatattccttcaagaggtttgatcggattgcgttcccagatgttaacagctactgccggtgaagcgatcatggcacacagattctcagagtataagcctttcaaaggtcagattccgggaagaagccagggtgttttagtgtctaaaaaccagggtccggcaaccgcttattctattgaaaaattacaggacagaggaagattcttcgttgatccgggagaagaagtttatatggggatgatcgtaggagaacagaataagcccggggatcttgtcgtaaacatcgtggaaggaaaacagcttaacaacatgagagcttccggaaaggataaagatgggaacattgctccaaaaatattattctctcttgaagaatgcatggaatatattcagcaggatgaatgcatcgaggtgactccaaacttcatcagaatgcgtaaaaagctattggctgaagaagacagaaaacgtgctgaaagaatggcaaaagcagaataatttctgtacaagataaaatattgaagccccggtttttcggggcttttttcttagataaagctaaaaatgcctattttggcataataatctcttagaaaatacaatttaaatgtagttttgcagcctatgaaagtgaataaattaacgctgatatttttggtgggaatgtttgtatcatgcagcagtgcccgctcccttcagaataatacggtaaagcccattacaaaaaccccgttagggtcagttacaaccccttccaaaaacaaagattccattaaaaccattggtacagctgtacaagaagaggtttttaaagttacccttcccgagatcaggagagagttcaggggtgtttgggtggcaagtgttgccaatatcaactggccttcaaggaacaacctgtctgttgagcagcaaaaagcagaagctgtccggatgctggatatgctgaaagacaataatttcaatgcggtgatctttcaggcacgtccttccgcagatgccttatataccagtaatatcgagccatggtcttattttttgacagggtataccggtcaggctccctatccgaactatgacccgttgcagttctggatcgaagaagcccataaaagagggctggagctccacgtatggctgaatccttacagagcgcaccatgccaatggaggtacggtgaccagccagtctatggtcaataggttgcctgaacttatcgtaaggctgaagaacggaatgtattggtttgatcccgctggtccgaggacacaggggcatgtttccaatgtggtgaaggatattgtgaaaaggtatgacattgatgcggtgcatttcgatgactatttctacccgtatgcaacctataacagaggagcagattttccggacaaggccagctggaatgaatatctgaagaatggcggtacattatccagagcagactggagaagagacaacgtcaataaattcgtagaacggatctataaagaggtgcatgccgagaaaaaccatgtaaagttcgggatcagcccgtttgggatctggaaaccgggatatccggaaggtattgcaggttcttcacagtatgacgagctgtatgctgacgcaaaattatggctgaacaaaggctgggtcgattatttttcaccgcagctatactggcctgtaaatgcgaaagaacagggctttgagcccttgctgaaatggtggcagtccgagaatacccagaaccgtcatctctggccgggattgaataccgtggaaataaaggtttcggaccgtgcggcagaaattaaaaaccagatcgagatttccaggcaggttttgaaaaatgatgccggggaaattcattggagtattgcaggattaaccaagaatccggc

SEQ ID NO: 2178 - DNA, 24212 bp, synthetic construct
  misc_feature 1..24212: note = Synthetic
  source 1..24212: mol_type = other DNA
tgtggttttctctgacagattttaaaagcacagttgatgaatttcttcgcctattctggattggcggagcctatctgatctactttttcattgtttgcagcgtttgtgtaatggtatctgcagtaagcaaaacttcaagatcttctttagtcaaactgataggtttgtggctgctgtttatcgtgattattcccagaacagcacaggctttcggagcgtatctgcatccggcgccatcaaaaatagattttgacaccaacgttgaaaatgaactggtaaaaaccggagacagccacaatccgaatgacatctattaccaacgaataaaagattctcttctgcatgcttatcaggtgaaaaccgtggaagaactgccttttaattacagcggctatatcatggcggaaggagaaaaaatcagctccggaatttacaacagacattggcaaaaacagcttgatatttatgaagaacagaacagcattaaccgttcactggcctttgtgaatcctttccaggcggttaaagatctgtcggcagcacttaccggttcagattttaattcctacatcaattatcaggaacaggttgaaggatacagataccagctggcacagctaatgaacaaactgcagatggaaaacatcagcaacaaaaagcaacagggtaatgataaaccttataccatcagcagtgatcactggaaagaactccctgattttcaataccggtttattgatcagacaacactgtttcagaatgagatggtttctgtgatttcccttctggtgtgggcattgggccttcttttcgtccttcattttatgtctaaaacaataaaaataaattaatcatgtatcttttattatttaagaacttcatccgttcccgttctgcctatctgggaatgctgttcctgctgttatcaggtctggtcagtatttttgtgggaaggcagtttatagagaaacagaaagccaatattgagcatacggctgtataccagaaagaacatattgaaaggtatacaggctatatagaaaaggatctcggacttttattatattacctgaaatttggattggttaataaaacagacaacctgaatgcgctttcaatagggcagcgggatgtaaatccttctatacagattttaacgatcagaaatctggaaggacagaagcacgatacggatcttcagaatcctgtaagtctgcttctgggcagtctggatctgggctttgtgattattttcctcttcccgttggtgattatttcttactgttataatcttttgtccgaagaaaaagaggaaagtacatggattctgctttccgtacagtcccaaacacctttcagaattctgtttaaaaaatttatggtccgttttgcgcttattaccggaattttactgttgctgattattctgacagttcccattctgaacttaaggattaatggggcactggcaggttttgttctggtatcagtcttttatattatcgtttggtttgctttaagtttctgggtagtttcctggaataagagttcccgagcaggtgctgccgggcttttgtgtttctggattgtgcttacagttatttttcccgccgtgctcaatacttttattctaagtaaatatcctttaccggaagcattggatactgcaattgagcaaagagaggcctatcatgaaaaatgggacaccgaccagaagccgactttagacaaattttacaaacattatccgcagtttagatcgtacggatatccaaaagaaagcttcagctggctttggtattatgcgatgcagcagatgggagatgatgagtctaaaaaccaatctgatcaattgaaagcaaagctttggaaaagagaagaaatgagccgtaccctttcttattttgttcctggacttcatgtacagtttcagttgagtgatcttacaggatctggattagccgatcagttaaggtttacacaggctgcagagcgttttcatgaaggcaaaaggcttttgttttatcctaaaatctttgcgaacgagccgacggggagtatctactggcagcaatttcaactggaatattacagcgaacggagcaaaattaactggttggttatgctggggccattattgctgtttagtctcctgtttttttatctgggaactgtcaattttaagaagcaaacggttttgtaaggtatctgttgaaacaaagatagaatcttgaagaagaataaatggatggacgaaagtaaaatataataacctaataatccttttacaggatcaataaggctaataaaagcactgaatttttattataaccataaaaaatgacagccgtgtgaaagaaaagaagaaaaaaatagcattttgactcaaatttttttagtcgtagttaggctggaattaccataaaacctatatttgcaccctaaattttaaaaataatgaaagaactaattgaaaaaatcagcgctgaattcgaagcgtttgcaactgaggctaaccaacaagcagaaaaaggaaacaaagctgcaggtacaagagctcgtaaatcagctttagaacttagcaaactgttcaaagaattcagaaaagtttctgtagaagaagctaaaaaataattcgttcccaagccggctcactgagccggtttttttatgccatgattgtactggtcaacggtctgattctgaccaaaattcccagactgacatatttgtaaaatagcccttttatttctgcattttcttctttattcacgcaaattctgttatctttaagcattcaatatatgttatgaagataaataatttttttgctctgtctgcgcttatgctggccgcccagttctcatgggctcaggtgaaggtaggtcctaaagaaaaacttgatcctattgtgaaaagctttgtagatgaaatcaataacaattcccagctggaaaatatggcctatgagcttctggatggtatcggaccacgacttgtaggaactcctgaaatgttggctgccaatgaatggtctgcagctaaactccgttcctggggaatagaatcaagtttgcagcagtttggcacatggaaagggtggcagcgtggaattacccatgtagacatggtgtacccccgtgtgaaatcattggctgcaacacagcttgcgtggagcccggcaacgaaaaaagcagtagaagctgaggctgtagtgcttccaaaagtttcttccaaagcggaatttgatgcatggcttccttccgcaaaagggaaaatagtgcttatggcccaataccagaaaatcggacgttcagatgagcagatcaaagaatttgctacaccggaactgtatgaaaaactgaaggcagaaaaagaacaggccggaaaagacttccgtgattatgtaaaaaacattggctatgacaataatacgcttccggaagctttggaaaaagcaggagcagcaggaattgctatttccaattggacaggtatcatgggagcgaacaggattttcggagcgaagacttcaaagattccaatgatcgacattgatttggaagattacgggatgctttacagaatggcagaaaagggtgcgaaacctaaaatcagggtagaagcgcagtccaaaatccttcctgatgcgaaaaaccttaatacgatcggtattataaaaggaaaagaaaagcctgaggagtatgtgattctttctgcccaccttgattcctgggatggtgctcagggagcaacagacaacggaacaggtacgcttaccatgcttgaggccatgagaatactgaaaaaatattacccgaacaataaaagaactatcgttattggactttggggaagtgaagagcagggattgaatggttccagaggcttcgtagcagataacccacagattataaaggggacacaggcagtattcaatcaggataacggaacgggacgtgtaatcaatatcagtgggcagggattcgtggattcttacagctatatcgggaaatggctgaatggagttcctaaaaccgtgagagatcacattaaaacagatttcccgggaatgcccggcggtggcggttctgatcatgcgtcattcgtagcggccggagttccaggattttctttaagctcattgaactggggatatttcggatatacatggcacacaacgaaagatacgtatgacaagatcgtttttgatgaggtgaaaaacaatgtggttttaacggctgcactggcttatatggcatcagaagaccctgaatttaccagcagagaaaggagagtgatgcctaaggatgataaaggggaaacggtaaaatggccggaagctaaggaaccgagaagagattctaaggaatataaatagacgttttggagaaccaagagccaagaaccaagatttcagacatcagattggagattttgagactaaagtgaatggtgaattttgcttcgcaagtgaatggtaaattctaaaaaccaagatgcgagatatgagattttattaaccgggttttaaatttcctggaaatattaaaaggctgtacagattattgtacagcctttatttttgcggatagagaaggttccttatttcttggattttacttttcttaatgatataagttttgcagatcttattgttcaggttcatgctgaaatgcatctcagtatgttccttttcccacgtatgattggctagcgggatataatctgaaaagatgggccagaaatttgcgagacacaaaaagtttctttttaaagataataacagcccgggatagtttccaaaatcatcaattacttttattttaaatacagcttttcctaaagacgttcccaagtaccattcgcataaagtcccagaaataatgacacacggaatggaatacaaaaaactaatgaaacctattttttcaaatacaaaaaagaaaataaggaagaagggcagcatatcgataagtttagcgagaagtctttctgtttcgttgcctttataagttgcatcgtagggaaaatcatattcaaaagaattataaattctgtacccaaattcatcgaactcgtgggtgggtcttcggatgattcttctttccttaagttcggatattttcattggtttttttacagttctgattttttttctgctcattcaaacataacaataatagtttaataaaacacgtcaacttctgtcgtatcgcgcgcctacatttgcattagtaaaattaaagaagaaatattttaccaattaatttaaaccaaaaaacaaaattttatgatttacgcaaatgctttttttacatcgggtaatagttatcctaacgaagaccttgtgcagttggtagataattacacgcacgaggctgttgtttacaaaaaaattgggactgccgttgaggatggcgtcatctaccgaaaaaaagacaatgatttttatgaaagacaatggtccggatatgtcaacgtattatggtggaatatcagggaagccggaatcctggcaccaacagttacagagcgtatcaacaaagctttggctctgggatataatacattctttgatgaaatgtccattgaaattaaaggaacgctttaccttcaagacaaccagaaaatcctttcaaataagtgtacgataaaacagaccgaagtcaaagcagaaatttttaactgtgagcaaaaggaaaatatttccattacaggatttatgttaaaaggagaaggtgttgattatgttgttaatgccagttcccgaaatgtaggaattctttgcacccaagcaaaaaatcttatgatcgagaagaacatatttgaaaactttacctattctgcggtatcaggactgaatggtgtagagtatttaacctttagattcaataaagtcaagaatttatttaccaaaacatgggcagaagaaattaccggtggtagaaaggacaatatggggattgtagtaggaggaaaaaatatcacaatttttaaaaattactttgaaaattcatcacaaggtatctatattgtcgaaaattctaatttcgtcagtatttcagataatgacgtagaaaatacaatcctggagcatggaatgtaccttgattccggtatttccaatcttacggtgataggaaacagagtgagaaataccatgaaagtagggattaagcttcaaaactcggataatgcaggttatatcagtaataatatagtgatctccaataatattgttgaaaatacaagtgtaggcggagatggtattttaatcaataatacaacgcctggtgctccccaactttatgcaaaaaatgtggtaatctcaggaaatgtggtgagaaatgcgggccagcatggcatcaatgtcagatttgttgacttgggtgtagtttccaataacgtgatcaatggtattagctatgcaggaatttatatttctgacaccaaaggggtggaaatctgtaataataatatcaagacaacccaggaaagtggaattatgattgaaggaaagaattatttattatctgccaactttaacaccattgaaaatcccggaatgaaaaattcaggtttggaagatctcttaacgggaattaccatacgcggcacaagaaataaagaaatctctgtaagaaataacaagatgataggcagcggtgatgctatgaaatatggtatttttgtagagtttatagaagatccggtagtacaacagacttttcaggatacttatgaaattgtagggaacacagtattgaatgctgttactccatatagatttttaaatactgctgtagctttacggcttttgaataacaattacaaaaatttattaacggctcctgtacaggaatcgtaaaagagaatattaaagcttatcttaaataatagaaacctgataaggctgtctcaatggacagccttatttatgcgataaagtgcgatgtgatttttaaaatttaatgcaaaattccaaatctgaaaacttagaaacagaaggtttataatcgtctgtactcaactttccaaagccatattcacaaaaaataaaaggcaggccattggtttttgcagaatcataatcggtttgcgtatcaccaatataaactgaattttcactacttaaatgactcctttctaaaatcaaacggatattctcagatttaggttttttagtccggccgtaacattcaatatctgtaaataagtcgttgaactggtaatagtctaaaaaagcttcaatatatccgtcctggcagttgctgactatgaaaagctgatgatttaccgccagatggtgcagggtttctgcaactccgtcatacaaaataccaccatgaaggcgcagaactttactttcctgctgtacaacctcagaaagtacttccttaattttctgatcagaaattcccggaatgatatcttttaaaatgtcatctgccagtaaacccaggtattggttcatatcttcaggtttcatttctttttttatcagctcatgtctcatcaggacctcattccatactttgatgatagtggctctgggatcccaaagtgttccatccagatcgaaaattaaattcttatagctcaattgtattgttgtttttattaatgttggtattttaacggtcttttaaatgcattataaaatcatgctcagctgcactctttttctggcttcatccacttctgtcactcttacacgtacatgctgatgaagttttaccacttcatttacatcagaaacaaatccgtccttcagctgggagatatggacaaggccgctttccttgatccccatgtctacaaaacagccgaaagccgtaatattattgacgattccgggaagaatcattccgggttttaaatctctgatgctttttacattaggatcaaattcaaataccttagctgcttttctagggtctaatcccggtttttcgagctcttttaaaatatccttgatccctaaaattcctatttcttctgtaacataattttccggctttaccaaagctgttttctctttgctggcaatcagctcgttggtttttatacccaggtctttggccattttttctacaattccgtaagcttccggatgcacggcagaattgtcgagtggatttttcgcattggcaattcttacaaaagctgcagcctgctgataggctttttctccaagcctcggaacttttttaagctgtttcctgtcttcaaaagcaccattctccgttcggtaattaacaatgttctccgccattttctccccgatccccgaaacatagctcaacaatgatttgcttgctgtattcagattgattcctacagaatttacacacttcataactgtagaatcaagttcgtttttcaattgagtttggtctacatcatgctggtattgcccaacaccgatggattttgcatcaattttaaccagttctgccaacggatcagccagtcttctcccgatagaaaccgccccacgcaccgtcacatcataagatggaaactcgtctcgcgcaattttacttgcagaatataccgatgctcctgcctccgaaaccacaaaaacctgtagtggtttatcaaatgcaattttcttaatgaaaaactcagtttcacggcttgctgttccgtttccgatggaaatcgcttcaatattgtaggcattcaccatagaacggatctttttcatggccattccgctttcattctgtggggcgtgagggtagagggtttcattatggagaagatcacctttttcatcaatgcagaccactttacagccgcttttgtaccccggatcaatggctaaaattcttttttcgcctaaaggtggcgcgagaagaagctggctcaggttttcggaaaatatttcaatcgcttttttgtctgccttttctttagcctcctgcaaagcttcgttagaaatggcagactctaaaagtcttttatagctgtctttaatggccagggcaatctgatccgaactttcattattggatttgatgatggctttttcgataaaatcaatggcctcttctttatcaatgcctgtattaagttttacaaaaccttcagattcagctctgagcattgccaatagcctgtgagaaggagtcctgttcagattttcttcccattcaaaatactgcgaaaatttttgagcgtcttcatcatcttttttgaccttgaccactttagaagtgatcacggccttacgctggaacaggcggcgaaggtttttacggacgtacatgttttcattaatccattccgccatgatatctcttgcaccctgaagtgcttcttcctcagatgaaacttcattgttcaggtattgggaagccaaaaactgcagatcattgcttttctggctcataatgatcctggctaaaggttccagtcctttttctttggcggtatccgctttcgtttttctgcgttttttgaagggcaggtataaatcttccaattccagaatgtcgaagctttcctcaattctctgtttcaattcggatgtcagcgcattctgttcttcaattgattttaaaatgctgtcttttcgctttatgatttcttcaaactgtttactgattttagaaatctgttcgatctgaacttcatcaaggttcccggttttgtcctttctgtaacgggaaataaacggaatcgtacagtcttctgctaataactgaagggtattgttgatgctcttttcgggtatattgagctgttgctgtataaaggttacggttgtcattattttgttttcggaaggctaaaatactgctttagaatgaaaaaaaggcgagttgccccgccttgaatgttttcacaacggaataatccttattgtgaattgcttttcaaaattattaagacaaatataataaaatagattgtaatgaaaagtatggaaaaccgtaattagcattatttatttcttcttacatttatgaaattctaataactgatacacatgactaagagaattttgggactggatcttggcgtttcatctattggttgggccattgtggatgaagatgtaaaaaatccggaaaataataaaataattaagttgggagtccgtgttaatcctttaacagtggatgaacagactaattttgaaaaaggaaaacctattacgactaatgccgggagaactttagccagaagcgcaagaagaaatctgcagcgttttaagttgaggagagaaaacttattagatatactcatcaaaaataagattctgagtgaagatgatattttagcagagaatggaaaaaattcgacgtttcaaactcatgcattgagagctaaagcagcaaaggaaagagtagaactgtatgaattggcgagggtcctatttctgattaataaaaaaagagggtataaaagcagccggaaagttcagaatgatgatgaaggtatggctattgacggaatggagattgcaaaaaaactgtatgaagaaggtcttaccccaggagaatacgcttatcaacttcttaaaaatggaaagaaaaagatcccggatttttacaggtctgatcttcaaaatgaatttgatagggtctggaaatttcagaaacagttttatcctgaagttttaacagatgatttaaaaaaagaattagaaggaaagggacaacgggctactattgctgtctttctgaaccgccacaaaatctatactgccgacaataaaggaacaagagaagaaaaaaaactcatggcttatgaatggagaaacaatgcggtaggtaagcagttagaaattaaagaagtggcgtatgtcattacggaaatcaatcataatctgaataattccagtgggtacctgggcgcaattagtgaccgaagcaaagaactgtattttaatcagcagacaataggagaatatttatataatcaactttgcaccaattcgcatacaaggttgaaaaatcaagtgttttacagacaggattatttggatgaattcgaaagaatatgggagacacagaaaaacttccatcctgttttaagtgcaagactaaaagatgatatccttgatgttgttattttttatcagagaaaattaaaatcacaaaaaggattaatcagtttctgcgaattcgaaagtcgtgagattgaaattaaggataacggaaaagtaaagagaaaaaaggttgggttaaaagttgctcccaaatcttcacccctatttcaggaatttaagatctggcaggtactcaacaatattgaaattaaaaatgatgaaggacgaagaccacttgattgggaagaaaaagaattgctctttgatgagctgaatatcaaaggtaatcttggttctcaaaaaattttggagcttatcgggtttaaagcaaaagatgtcaagatcaattttaaatcgattgaagggaatagaacgaacgaaaaattttatgatgcttatctgaaaattttggagctcgaaggatattctattttcgaattgttgaagataaaagaagataaagaggaagtcaagttatctgatctgaaagttccggcttctgaaataagagaaatggttagatctgtttttgaagttaattatatagatgtttcgatcttggattttgatgcagaagtttctaatccggaatttgaaaaacagcctttctatcagctctggcatttactgtattcttatgaagctgatgattcagcatctggaaatgagaaactttatgaactgttgaataaaaaatttggcttcaaacgagaacatgctaaaattttatcgtcaattacttttcctcaggaatatggaagcctgagtagtaaggctatgagaaaaatttatccttacaataaagaaaataaatacagctatgcttgcagtcttgcaggatataatcattctaaggattctttaactgcggatgagcttgaaaaaagagttttaaaggatacattggaaattcttccaaaaaattctcttagaaatcctgtagtagagaaaatacttaatcagatgatcaacgttgtcaatgccgtgattgctgaatatggaaagcctgatgaagttagaatagagctggcaagagaattaaaaaagaatgcagaagaaagagctgaaatgaataaaagcatcaatgatgccacacttcttcatcaaaaatatgctgaaatcttaaaaaaagaatttaacgttaccagtccatcgcgaaatgatattatcaggtacaaactttatcttgagctttcgaacaatggatttaaagatctatataccaataccaaaattgaaaaagaaaatttatttacaaacaaatatgatatagaccatattattccccaatcaagattttttgatgatagtttttccaataaagtgcttgttccaagacaggccaatttagagaaagcaaacctcacagcgtatgactttatttccggtaaaggaaaagatagggaggaacattttcttaatatgattaaggaattatttaataataaagatatttccaaagctaagtatgaaaagctacagaaaaaaggggcagaaatcggagaagggtttatagaaagagatttacgcgatacccaatatatagctaaaaaagcaagagaaattctctttggaattaccaattctgtggtttctacttcaggaaatattaccgacaaacttcgtgaagactggaatcttataaatacgatgaaagaacttaatctcgaaaaattcagaaagctaggattaacggagatggtcatcaactcgaaaggtgaagaaaaagaggtcattaaggactggacaaaacgaaatgatcatcgtcatcatgcaatggatgcattaactgttgcctttaccactcgtaatcatattcagtacctgaattatctaaacgccagaaaagatgaaaagcataaagagcatcatcatatctatgccatcgaaaatcttattacagaaatagttgaaaagaagaatggttctcaatcaagaaaatttaaatctccaattgctggttttcgtaaagaagccaaaaaacatcttgaagaagtactgatttcacataaagccaaaaataaagtagtcacctctaatgttaataaaattaagaaaaaaggaggaataataaaaaagacagaacttacaccgagagggcagcttcataaggaaactatttatggaacggctaagattttacagacgaaagaggaaaaagtatcagctaaatttgattataaaaccattctgaaagtacaaaataaggagtataggaatgcacttttgcaaagacttgaaaagaatgacaatgatcctaaaaaagcatttgcagggaaaaatgggatacttaaaaatcctgtttatataagtgatgacaaaaaggggaccgtacctgaacaagtgattcttgcatggtatgatactgtgtataccatcagaaaatctgttaatcctgaaaattttaaagactataagaatttagaaaaaattatagaccagggtactagagaacttttgaaaaagaggctggatgaatttaatggaaatgcaaaagaagccttttccaatttagataaaaatccaatctggttcaatcaggaaaagggaatttcaattaaaacagtgagcattacaggtgttagtaatgcagagtctttacattttaaaaaagatcattttggaaatgaaatactggatgacaatggaaataggatttctgtggattttgtaagtacagggaataatcatcatttagctgtttatcttgatgcagaagaaaacctcgatgataggatggtatcattttatgaagctgtcgaaagggtcaatcaaaatcaacctgtgatagataaaaattataataatgagaaaggatatagtttgttatttacattaaagcagaatgaaatgtttctttttccaaataaagattttgttccaaatgaaatagatctgtttgacgagaaaaatgcagcggtcatttctaaaaatttgttcagagttcagaaaatttcaaaagttagttacggaaactcttttattagagattttgtatttagacatcatttggaaacgactgttgaagaaagaaaagaattacgaaatattacttatgtacaattgaaaagtcttgaaggtttaaggaatatagtaaaagtaagattgaatcaccttgggaaaattgttcaggttggagaatattgaaaagtgaaaaaatgataacccgttccatttatatgggcaatccacctgcctaatcagtaatccatgaaaaaatatgtttatgaaatgtaaaaacgaaaacaaaaaaagtttaggaaatattatagaaatcggagaatactaagaactaaaattatgtccaaagccgcccttaaaaaagaactttctagccttaccaaagagcaattggtagagcagattcttgatttgtatgataataacaaagctgtaaaagagttttatactttttacttgaatcccaaaaacgaaaaagaattagtagataaatataaaaaactgatccgaaaagaatttaacgtagaaaatccgatgcgaagtacagaaaagttttcggttgcaaaacgtgctatcactgattttaaaaacttgcaaccctcaccagaatctttggcagatgtgatgctctacttacctgaaagtgcctgtgaacttaccgcgttatatggagattattccgaacaattttacaattcgtcttataacaactataaatcggcgctcgaatttttaaagaaacaccatttactaaagcaatttcaaaatagagccatgcaatgtgttgaatgggcttcttcttgtggttatggttttgcagatgatattgcggatatttattatcagtattacgaagaataaatttatagaaaaactaaagctatgattacccgctccatctacatcggcaatcccgcttatctcaagctcaaagacgaacaaatgtatattatggaaccttcttccaacgagatgaaaggcaaagttccagtggaggatttaggcttgctgatgttggatcattttcaaattactatttcccatcagctgattcaaagaatgatgggaaataatgtggtcgtggtaagctgtgatgcccatcatcttcctcatggtattatgttgccgctgtatggacatacagaacattcagatcgcataaaagatcagcttgatgccagtgaaccacttaaaaagcagctatggaagcaaacggtagaatgtaaaatagaaaatcagaaagaggttcttttaaaattaggtaattattatgagcctatgcttgaatatcagcgaaatgtaaaaagtggagatattacgaatatggaaggaattgcggcacaacattactggaaatatctcattagcctggattttttaagacaacgttttggagattctcctaaccagttttttaattttggatatgcagttttaagaagtatagttgccagagcattggtggaaacgggattgctgcccgtgttggggatttttcataaaaataaatataacccatattgtcttgcagatgatataatggagccatatcgcccatttgtagatttcctcgtgatgcaatggcttatacaaaatccggattccgaggatctcacaaaagagtttaaagctcacctattgaaaattgcaacagtggatgtcttgattgatgataagaagagaccattattggtggcagtgaaaacgactgcttcctcgctttataaatgttatacgggagaaaaacgtctgatttcttatcctgaattcttatgaatgccgaaaggtttaatgcataccggattatgtgggtgttagtactgtatgatttaccaaccgaaaccaaagcgaatatgcgtgatgctaatttgtttagaaaacggttgctggatgacggatttacgttgtttcagttttcgatgtatgtaagacattgtccaagtcgggaaaatgccaaagtccatatcaaaagagttaaaaatatgttgcctaaagcaggtaaggtagccatcatgtctattacagataagcaatttggagatattgagattttctttgccaggaatagagaagaacctccgccgaccttccaacaactcgaattattctagttttttaaatcctaaataataataaaatccattgataatcaatggattaaattttgaagctgtgactaatcacgaagataataatttttgaaagcaattcacaaccgtgacgggaaaagcttcgaaagttaataagctgtgactaatcacgaagataataatttttgaaagcaattcacaacacataatcaattcagaaagcttactaagaagctgtgactaatcacgaagataataatttttgaaagcaattcacaaccccaatacacaataaaatgtagtgaggaatgctgtgactaatcacgaagataataatttttgaaagcaattcacaaccctaacaagattataatcatccataagatcgctgtgactaatcacgaagataataatttttgaaagcaattcacaacggctttggtatctgctcagaacagagagaggctgtgactaatcacgaagataataatttttgaaagcaattcacaactccgtcccaccatttgaatggtactatctcgctgtgactaatcacgaagataataatttttgaaagcaattcacaacgagattggaatagttatgcgattgctggatgctgtgactaatcacgaagataataatttttgaaagcaattcacaacctggaatggcatttcaacgtcttcaaccttgctgtgactaatcacgaagataataatttttgaaagcaattcacaactgacaacaaataacgaactatggagtattggctgtgactaatcacgaagataataatttttgaaagcaattcacaacatactatggaaagtcaatcatcatggatatgctgtgactaatcacgaagataataatttttgaaagcaattcacaacgccaaggtatctgttgctgtccaattggctgctgtgactaatcacgaagataataatttttgaaagcaattcacaactactaaagacttattagctgcataactcttgctgtgactaatcacgaagataataatttttgaaagcaattcacaactaaagatccaggagattacgatggaacaccgctgtgactaatcacgaagataataatttttgaaagcaattcacaacagtgcattaggctttgaccagtccacagctgctgtgactaatcacgaagataataatttttgaaagcaattcacaactacaatgacaatggaagctttttgtaaggtgctgtgactaatcacgaagataataatttttgaaagcaattcacaacggaactgctgttttcgccaactgttcagcagctgtgactaatcacgaagataataatttttgaaagcaattcacaacgtagtaatttgatttacgcgaagcactttggctgtgactaatcacgaagataataatttttgaaagcaattcacaaccgaaatcattaacccggcagcgccaaaaatgctgtgactaatcacgaagataataatttttgaaagcaattcacaacgggtctattgaggttttagattacgttcctgctgtgactaatcacgaagataataatttttgaaagcaattcacaactttgagtctacaattaagaatctgagacaggctgtgactaatcacgaagataataatttttgaaagcaattcacaacggaaaaagcaatgatcctgcacggatccaagctgtgactaatcacgaagataataatttttgaaagcaattcacaactatggagttaagcggcttcaacgtggtggcgctgtgactaatcacgaagataataatttttgaaagcaattcacaactacaggacactattaccaaatttctaaacagctgtgactaatcacgaagataataatttttgaaagcaattcacaacacggttattatttccccatcattaattttagctgtgactaatcacgaagataataatttttgaaagcaattcacaacgcatctacgaagtctaaaaacagatccagtgctgtgactaatcacgaagataataatttttgaaagcaattcacaacgctggcttccatattggcaaatatacataagctgtgactaatcacgaagataataatttttgaaagcaattcacaacatgttgcatttctgatattaaatcagctatgctgtgactaatcacgaagataataatttttgaaagcaattcacaaccggaggagtataaggtttatttatattctggctgtgactaatcacgaagataataatttttgaaagcaattcacaacgattgtatgtcctgtattgatgggttcccggctgtgactaatcacgaagataataatttttgaaagcaattcacaacatcaaatactaaaggcttaacaggtacatggctgtgactaatcacgaagataataatttttgaaagcaattcacaacagatttgaagaatgtaaattctgtggcaaggctgtgactaatcacgaagataataatttttgaaagcaattcacaacttcatggacagacttaaagctgataaaagcgctgtgactaatcacgaagataataatttttgaaagcaattcacaacatcacggttgtttatctttgcgaaagaatggctgtgactaatcacgaagataataatttttgaaagcaattcacaacaccaagacagtaaagaaatccccttctggagctgtgactaatcacgaagataataatttttgaaagcaattcacaactcccagttatcacccattacctggaatttcgctgtgactaatcacgaagataataatttttgaaagcaattcacaactatgcctacaatgctcccagatgaattagcgctgtgattaatcacgaagataataattttagactgacaaagtaggcaattttactgtggagggaaatattttggatatcctttttcaactgtttcatttttacaatagccaataaaaaagaaatttttattttcttgatgtatgttaagatgataattgatatggtttttctatttttggaacttgaaattaagattttaattaaatttttttaatacaaataaacaatatgaaaaaacttagtgtaattgcattggtaggaataggattacttgcagcatcatgtacgaaagaaaagtcagcagatattgcaacagagcagacagtggcagaaagtaaaggagaagtgttagcagttgatgttgctacttctgtagtaaactggaaagctttccacaaaggaggtatggctcctcgttggggaacacttagtgtaaaatcaggagatttaagcgttgaagaaggtcagcttactgctggaaactttgtaatcgatatgaattctattaaagtagatccggcttcagtaacagaaaaagataaaaaaccagcagatcttgaagctcacttaaaaaatcctgatttctttgatacagcaaagaacccaacttcagattttaaaattacaagcgtggcagatcttaaagaagcacctgcagatgcagtagccggagcaaacaaaacagtaagcggaaaccttacgttatcaggaaaaacaatgaacgtaactttccctgctaaagtagatgttaccgaaggttcagcttctgttcaggctaaatttacagtaaacagagcagattggggaatcaaattcggtacttcagaagcagatccggcagaatggatgatcagcaaagacatcgaaattgctgttgatgtaaaagctaaaaaataatttgttgatacaaatacttaggctgctttcttaggaaggcagctttttttgttgcgagcgatgcactcgaagccattgctcaattcactacttttgcactatgattatgatatacattctgctgataataaattttattactttcattatttttagctgggacaaaagactttcaattaaacatagaaggagaattcctgagactacacttttaggagcagcttttataggaggaactataggaggaattttaggtatgtttattttcaggcataaagtttcaaaaaaatcatttttgctgaaatttggcgcaataattttaattcagatcttatgtatttatttttcagaaaaatattggtaaggtcaatcattaaaacccaatggtagattcttaatcttcaatttaaatatatttataaaatattcaattttaaagctttaacggggcagagcagtgaacatgctcattatgaatttgttaattaatctatattcttgctcattattcattaaaaaacactatttttgcacccgtaaaaatcattcatgcaaaacattagaaatattgcgattatcgcacacgttgaccacgggaagacgactttggttgacaagattattcatgctacaaacattttcagagaaaatcaggaaagtggagaattaataatggataacaatgaccttgaaagagaaagaggtattacgatcttatccaaaaatatttctgttacctataaagacactaaaattaatgtaattgatacacctggtcacgccgatttcggtggtgaggtagaaagagttttaaaaatggcagacggggtaatcctattggttgatgcctttgaaggaccgatgcctcagacgagatttgtacttcaaaaagcattggaattaggacttagacctttagtggttatcaataaagtagataagccaaactgtcgtcctgaagaagttcatgaccaggtatttgacttattcttcaatcttgaggctactgaagagcaattggatttcccaacgttctacggttcttccaagcaaggttggttcaacacttcattggagcagactgaagatattcttccattattggatggtatcctgcaatatgttcctgaacctaaagtagaagaaggaacgttgcagatgcagatcgtttctcttgacttttcttctttcttaggaagaatcgcaattggaaaagtgatcagaggagagatcaaagaatctcagtggatcggacttgctcaggcagacggtaaagttctgaaaggaaaagtaaaagaactatacgtttttgaaggtttaggaaagaaaaaagtctcagaagtaaaagcaggagatatctgtgctgttgtaggttttgatgctttccagatcggtgattcattcgtagatcttgaaaatccggaaccattgccaagaacagccattgatgagcctacattgaacatgacgttctctatcaacaactcacctttcttcggtaaagacggtaaatatgtaacttctaaccacctgaaagaaagattaacaaaagaattagagaaaaacttagcattaagagttcagcagactgatgatgccaatacattccttgttttcggtagaggtattcttcacttgtcagttttaattgaaaccatgagaagagaaggttacgaaatgacaattggccagccacaggttatccttagagaaatcgatggagaaaaatgtgagccttatgagtctttggtcgttgatgttccggaggaatttgcttcaagagtaatcgacttggctactcagagaaaaggtgaccttcacattatggaaactaaaggagaaatgcaacatatggaattcgaaattccttcaagaggtttaatcggattgcgttctcagatgttgactgctactgctggtgaagctattatggcgcaccgtttcacagaatataagcccttcaaaggtgctattcctggaagaaacaatggagtactgatcagcaaaactcaaggtcctgccacagaatattctatcgctaaattacaggacagaggtaaattcttcgtggatccgggcgaggaaatctatgcaggtatgatcatcggtgaacaaaataagcctggagatttggtagtaaacattgtagaagcaaaacagctgaacaatatgagagcttccggaaaagataaagatactggtgttgcaccgaaaattttattctcactggaagaatgtatggaatacatccagggtgatgaagcgattgaggtaactcctaacttcatcagaatgagaaagaaaatcctttctgaagaagaaagaaaaagaatggacagatcagcgaaagcataagaaattcttatatatactagaaaagcctcgaatttttcggggctttcttatgagactatgtcttaaaatgtttattttggcataataatctcttagaaaagaataaatttaaagtagtttgcagacgatgagaatgaatattataaagcttaccgttttggccggagtttttgcatcatataccagctgctcagtacagaccagtactgtaaaaacagcaccagcaaaaaatacggcaaagcctaacagcaataccataaaacctaaagatccggttaccacagcaaaacctataacagcagtacctcctgctgatgaaaacttcagaaccgctcttccggaggttaaaagagaattccgcggagcctggattgctagtgtagccaatatcaactggccttcaagaaataatttaacgattgatcagcagaaagcagaagccataagtatgcttgatatgttgaaagacaataatttcaatgcagcgatattccagatcaggccttctgcggatgcgttgtatacaagtaatatagaaccatggtcatactttctgaccggacagaccggaatagcgccatatccgaattatgatcctcttcagttctggattgaagaagcacataaaagaggcttggaacttcatgtatggttgaacccttaccgtgcccatcactcaaacggtggtgctgtaaacagtctgtctatggcgagcaaactttccgatattgttgtaagattaaagaacggaatgtattggttcgatcctgccaatcccaaaacgcaggggcatgtttccaatgtggtaaaagatattgtgaaaagatatgacattgatgccatacattttgatgattatttctatccttacgcaacctacaacaggggagcagactttcccgataatgcaacctggaacgaatatcagaggaacggtggaacattatccagagcagattggagaagagataacgtcaatagatttgtggaaagaatttacaaagaaatccatgctgagaaagactatgtaagatttggaatcagtccgttcggaatctggaaacccggataccctgcaggaatcgtaggatcttctcaatatgatgaactatatgctgatgcaaaattatggctgaataaaggctgggtagattatttctctccacagctgtactggccgattgattcaaaaggtcaggggtttgaagcacttttgaattggtggaaatccgaaaatacaatgaaccgccatctttggccgggccttaacaccgttgagatcaaagtatcggatcgccctacggaaattaagaatcagattgaaatttccagacaggttcttaagaacaatgccggagaaattcattggagcattgcaggattaaccagaaatgcaggcatgctgcctactttaaaaaacggaccttacagcgaaaaagcattagttccgaaaacgccatggataaaggcagttccattacagactccgactttatttacaaccgataatggaagttttgtacaaacgaactggagtactaaaaatatcggaaatgtcttccaatgggtactttttacccagtacaacggagtttgggaaacggaaatctttacattggataccctttcaaaagacattcctaaatctaaagagggtaaaagattgaatgcagttgcaataaaagcagtagacagacttggaaatgaaagtgattatatagctaaaaagataaaatagatgttttgaagaaaaagagtttgaaggaatagaaaaaggtagagggactgaagttgcaaaaagatctctagctttcatcaaaaataataaaaccagttcagaaaaggactggtttttattttagaataactataaattattcatttaaattaatgtaattcagttatttgtaaataagatttaaattgacaatgaaaaaaataaaaccctatcggaatcatttttgcatattattttcataatcacaaaaata

SEQ ID NO: 2179 - DNA, 24212 bp, synthetic construct
  source 1..24212: mol_type = other DNA
  misc_feature 1..24212: note = Synthetic
aaaaaatgacagttcggcagaagaaaagaagaaaaaaatagcattttgacccaaaattttttatccggagctaggctggaattaccataaaacctatatttgcaccctaaattttaaaaataatgaaagaactaattgaaaaaatcagcgctgaattcgaagcgtttgcaagtgaggctaaccaacaagcagaaaaaggaaacaaagctgcaggtacaagagctcgtaaatcagctttagaacttagcaaattgttcaaagaattcagaaaagtttctgtagacgaagctaaaaaataattcgttcccgagccggctcactgagccggctttttttatgccttgattttccttttgatcagactctacccattaaaatatcctggtttgaaatgtagtgggttttaaaagttaaattttattaaaggaatactttatttccctgtctgggtatatatttgtgtagttagtttttttaaaattgattatactttcagtatgaagcagtcttatttttttatgattctcttttttggacttttctcggctcaaaaattaaaagtaattgattctgaaaatggaaaagctattccacatgcacggcttatccttcatgaccagatcgtttatactaatgaagatggttttgcacctgtagggcagggggcctcaaattttgaagtctcagcttccggctaccaaaaaaagaaagttactgcttttaattccctgatcaaacttacacgtgcttataaaaatattgaagaaataaaaatagtcaatgtagatatcagaaagctcctaggagatgtaagtaaacactatcagaaaagatattttaatgaaccctccctttacgatgtggtatacaaagaaaaaagactggataatgacagactttatttcctcgttatcgctgaagctaaattatggagcaaaagcaatcactacaactataaggatgggattcggaaaaactatgatgagattctccagatgcagcttaataatgtaaagtacctgaaaaatgtaaaagctgacagtatctttacaacaggtaccaatgaattctctcatgaatatatggggaattattttttcagttttgaactgaaccgaacccttaatcatgtaagaagtatcggttcaaaatattcgggaagactgatctttgaagaaggggacgagcagctgattacatttaaaatcaagtcaggtgcaggtattgagctgaaaggggaatttaaatataataaaaccgataaggtgatcacctactttgaagtacattatctgcaaacaggctatcctccggtcaggagaaaaacagcagaaggggtagagtatgattaccagcttggagatgcagctcttatttttgatttctacaaaaaagacgggatgtacctgcctgctttaaccagatttgaaggggataaatattcggctttctatcttggaaagaagcacgaaagaaaattcagcagagaaattatctataatacttttgagaaatccaataaagaaggtcttacccagaaagtagatttcagcaaaagtatttgggaaaacgtacctgtaaaagaacagaaagaagatgctatcctgctttcctccgaagaacaggtttttattgacaaaaaataacaggcttttgattatatataaaagccatttgatcttttacctttgaatatttgattttaaaaagaagaaaactatttgaaatagctttgtataaagtctttttgtttgattctcttcttcatttccttaaattcctttatctttaagcattcaatatatgttatgaagataaacagattttttgctgtacccgcagttgtgctggctgcccaattctcatgggctcaggtaaaggtagatccgaaagaaaagcttgatcctattgtaaaaagctttgtagatgaaataaacacgaattcccaactggaaaatatggcctatgagcttctggacggtataggaccgcgccttgtaggaactcctgaaatgctggctgccaatgaatggtctgctgctaaactccgttcatggggaatagaatccaaccttcagcagtttggaacatggaaaggatggcagcgtggaattacacatgtagatatggtatatccgcgtgtgaaatcattagctgcaacacagcttgcatggagcccggcaacgaaaaaagcagtagaagctgaagtgatcgtacttccaaaagtttcttctaaagctgaatttgatgcgtggctgccttccgcaaaaggaaaaatagttcttatcgcacaataccagaagataggacgttctgatgagcagatcaaagaatttgcaactccggaactgtatgaaaaactgaaagcagaaaaagaacaggccggaaaagatttccgcgattacgtaaagagtataggctatgataataatacgcttcctgaagctttagaaaaagccggagcagcaggaattgctatttccaactggacaggaatcatgggagcaaacaggattttcggagctaaaacttcaaaaatcccaatgatcgatatcgatgtggaagattatggaatgctttacagaatggctgaaaaaggagcgaaacctaagattaaagtagaagcacagtctaagattcttcctgatgcaaaaaacttcaataccatcgggattatcaaaggaaaagaaaagcctgaagaatatgtaattctttctgcccaccttgattcgtgggacggagcacagggagcaacagacaatgggacagggacgcttacgatgcttgaaaccatgagaattctgaaaaaatattacccgaacaataagagaaccatcgttctaggactttggggaagtgaagaacagggactgaatggttcaagaggttttgtggcagataatccacagattatgaaagggacacaggcagtttttaaccaggataacggaacaggccgtgtgatcaatatcagcggtcaggggtttgtagattcttacagttacatcggcaaatggctgaacggagttccaaaaacagtaagagatcagatcaaaacagacttccctggaatgccaggcggcggcggttctgaccatgcttcttttgtagcagcaggagtacctggattctctttaagttctctgaactggggatatttcggttacacatggcataccacaaaagatacgtatgataagatcgtttttgatgaggtgaaaaataatgtagttttaacagctgcattggcttatatggcatcagaagatcctgaatttacaagcagagaaagaagagtaatgcctcaggatgataaaggcgagacggtaaaatggccggaagctaaagagccgaggagagattctaaggagtataaataattaaatataaaatgaaactattaactacaatactaacagtatgttctgtaataacaagtagtcttgttttttctcagagcacaaatgaaactaaagcaaaagaaattattgaaaaagcgattaaggctacaggaggtaaagagcttctaaacagtatcaaaactctttattccaagtcttccacggtaatggatggaagaaatgtgaattatatcacaaaagaaatggctccgaatatgggtagttttgaggtagaatatcagggaagaattgtttacagatcttggtttgatgggaaaatcggttatgaaacggttaatggtcagaaaaaaattgcagatcaagaagagtttaaggataagcttgatagaaaatatattatgaatgaactctcttatttagattctagtatatatagtgttgaatttatcgaaactgataatacccacaaacttcataaagtaaaagcaatagccaaagatggcagtatcattaatttatattatgataccgacagctttttattaaaaaaagaaatcaaagaaaatccttcgaaaggttctttttcaacaattctttgtaatgaatataaaaaatacggggatcttttgtactgttcaaaaaatacatttaaatcagagaatggggatcaaatagttacgttacttgatttgtattacaacaaagacattaaaagagcagattttaaatattaattttatagattatttcttgaataaaaaagtagcttagtttaagctacttttttattcattacaaaattatactcagttattcaccttgactacttttatctgagcatgttgatgaagctttagctttatgcaaaaaatgtagttaaaaataaaagccagcatggaatctatattagatttgtaaactttgctgtggtctctaggagtgtaaccaattattacagtattaaagcccctttatattaattaaagatttaataagcttaatacccttgagttttctctatcataattataagatttttgaaaatagttctgggcagcaagccataaaaagaaagtaatagatatattatgaaagattaattaaaagtgataaggctgtcaattgggacagactctttgttcttaagtatcagttctatgccgatctaaaaataaaagatcctctggtttatcctgtttcaatagctcttgaatttcagcaatcttactttccttaacgatataagttttacagattttgttattcaggttcatactaaaattcaggtgagtaaattccttttcccatgtatggtttattggcgggatataatctataaagacgggccagaaattagcaagacacaaaaagtttctttttaaagataacaacagtccgggataattgccaaaatcatcaatcacttttattttaaatatgctctttcctaaagtagttccccaataagattcgcatatactccctgaaataatcacacacggaatagaatacagaaagctcatgatcgctatatttccaaacaggaaatagaaaataagaaagaagagcagcatatcaataagtttagcgaaaagtctttctctttcgttgcctttataagtagcattgtaaggaaaatcatattcaaaagaattataaatcctgtatccgaattcatcaaattcacgggtgggtctgcgaataattctcctgtctttaagttcagatatcttcatgtttttttatagctcagattttttctgattattcaaaaataaaaaaagttcagtaaaacacgccaacttctgtcgtatcgcacacctaaatttgtatcagtaaaattaatgaaggaatattttaccatttaatttaaaccaaaaaaaaacaaaattttatgatttacgcaaatgctttttttacatcgggtaatagttatcctaacgatgacattgtacaattggtagataattacacacaccaggctgttatttataaaaaaattggtacagccgttgatgatggtgttatttacagaaaaaaagataataatttttatgaaagacaatggtctggatatgttaacgtattatggtggaatattaaggaaaccggaatttctgtctcaacggttacagaacgtattaataaggctttggctatgggatatgatacattttttgatgtaatgtcaattgagattgatgaaacgctttatcttcaggacaatcaaaaaatcctgtcaaataactgtaagataaaacaaacagtaaaaaatagggaaatttttaactgcgaggataaagaaaatatatctattaaaggtttcagtttagaaggagagggcgatgagtatttagaaagttctagttccagaaatgtaggaattctttgtcacctagcagaaaaccttattatcgaaaagaatatctttaaagatttcacttattctgcagtatcaggatggcaaggagtggagcattttattttcagattcaacagggttataaatatatttacctatacttgggcaacgcagaattccagttacagaaaggataatatgggtattgtagtagctggaaaaaatatcacaatttttaaaaactattttgaaaattcatcacaaggtatttatattgctgaaaattccaattttgtcagtatctcagataatgatgttgagaataccattctggagcatgggatgtaccttgattccggtatttcaaatcttacggtgataggaaacagagtgaggaataccatgaaagtaggaattaaacttcaaaatcatgatgatatagaccatccagactatgtctctgacaatgttgtcatttccaataatattgttgaaaatacaggcgatgggggcgatggtattttgatcaataatacaacagtgggaactccgcagctttatgcaaaaaatgtggtagtttctggaaatgtggtgagaaatgcgggtcagcacgggattaatgtaagatttgtagatcttggggtggtttctaataatgtcatcaatgatataagctatgcaggaatctatatttccgatacaaaaggggtagaagtatgcaataacaatatcaagacaactcaggaaacgggaataatgattgaggcccataattatttattatcagccaattttaataccattgaaaatccgggaatgaaaaattcaggtttggaagatttgttaacaggtatcacaatacgcggtacaaaaaataaagaaatctctgtaagaaataacaagatgataggcagcggtgatgctatgaaatatggtgtttttgtagagtttataaagccagatgaaaaacatcctgaaaagcagacctttcaagaaacgtatgaaattgtagggaatacagtcttgaatgctaaaaatggtcaggattatagatttttaaatggaactgtgcctttgagacttctcaataataattataaaaatttactaaattctcctggacaacaataataaaataaggctgctaaagcttttcatcagttgaaaaatataggctgtccattattgggacagcctatatttaattgatgaagtataatcattgtaattcttaaaatcaaatatagaattccaaatctgaaagttttgaaatggaaggtttgtattctggaatactcaatgttccaaaaccatattcacaaaaaataaaaggtaaactgttcgctgttgcagaatcataatcagtctgtgtatcaccaatataaactgagttttcaggacttaaatgatttctttccataatcagccggatattttcagctttcagtttttgggttcggccatatgattcaatatctttaaataaatcggtgaattgataataatctaaaaacgattcaatatatccgtcctggcagttgctgacgataaaaagggtgcagctgtttgctaaactctttagggtttccatcactccgtcatacaaaataccgccttggatgtgcagtatctcattttccttttgtataatttctgaaaggacctgctgaatcttttggtcagaaattccgggaacgatattttttaatatatcgtcaaacaataaccccatatattgattcagatcttccggtttcagttctgttgttatcaattgatgttgggttaaaacctcattccatatgttaataatcgtggctctggaatcccagagggttccgtccagatcaaaaattaaatttttattgctcaaaatatattgttattttctggtatttgattgataatagtaaacaggtttcacaaaggagaccttataaaatcatgcttaactgaaccctttttcttgcttcatccacttctgtcacttttacgcggacgtgctgatgaagttttaccacttcattcacgtcggatacaaatccctctttcagctgggaaatatgaacaagcccgctttccttgataccaaggtctacaaaacatccgaaagcagtaatattattaacaattccgggaagaatcattcctgcttttaaatctctgatgctttttacatttgggtcaaattcaaacactttagccgcttttctaggatctaatccgggtttttcaagctcttttaaaatatctttaattcccaggatgcctatttcttctgtgatataattttcaggctttactaaagctgtcttttccttgctggcaatcagttcattggttttaattcctaaatcctttgccattttttctacaattccgtaagcttcaggatgtaccgcagaattatcaagcgggtttttagcgttggcaattcttacaaaggctgcagcctgctggaaagccttttctccaagccttggaacctttttcaattgctttctgtcttcaaaagcaccgttttccatacggtaattgataatgttctctgccattttctctccgatgcctgaaacataacttaataacgatttgctggctgtatttaaattaattcctacagaatttacacatttcatgaccgtagaatcaagttcgtttttcagctgagtctgatctacatcatgctgatattgtcctacaccaatggacttggcatcaattttcaccaactcagccagtggatctgccagtcttcttccgatggaaaccgcaccacgcacagtcacatcataagaaggaaactcatcccttgcaattttacttgcagaataaaccgatgctcctgcttctgaaaccacaaaaacctgtaaaggcttgtcaaaagcaattttcttaatgaaaaactcagtttcacggcttgccgttccgtttcctatagagatcgcttcaatatggtaggcgtttaccatggaacggatctttttcatagccattccgctttcgttctgcggggcgtgagggtagagggtctcattatggagaaggtctcctttttcatcaatacagactactttacagccacttctgtatcccggatcaattgctaagattcttttttcacccaaaggcggtgcaagaaggagctgacttaagttttcagcaaaaatttcaatggcctttttatctgccttttctttggcttcctgcagggcttcattggaaatggcaggttccaaaagtcttttatagctgtcttttatggccagagcgatctgatctgaactttcattatttgatttaatgattgctttttctataaaatcaaccgcttcatctttatcaattcctacattagttttcacaaaaccttcggattcagctctgagcatagccaaaagtctgtgagaaggagttctgctaaggttttcttcccattcaaaatactgtgagaatttctgtgcctcctcgtcctcttttttagccttgactgctttagaagtaatcattgcttttcgttggaacagacgacgcagatttttacggacatacatattttcattgatccattcagccataatatcccttgctccctgaagagcttcttctttcgatggaacttcattattcaggtatttagaagccaaaaactgcaaatcattacttttctggctcataatgatcctggctaaaggttccagtcctttttctttggctgaatctgcttttgtttttcggcgttttttgaagggcaggtataaatcttccaactcaggaatatcgaagctttcttcaattcgctgctttaattccggagttaaagcattttgttcttcaatagattttaagatactttccttgcgctttacaatttcttcaaactgtttgctgattttggagatctgttcaatctgaacttcatccagatttccggttttatcttttctgtaacgggcaataaacggaatggtgcagtcttctgctaataattgaagggtattattgatgcttttttcggatatatcgagctggtgctgtataaattctatggtcctcattgttctgttttcgaatcgctaaaataaggtttttggaataaaaaaaggcgagttgccccgccttgaatgttttcacaacggaataatccttattgtgaattgctttcaaaattattaatacaaatataataaaattgattgtaatgaagagtatgggaaaccgtaaatggtattatttatttcttcttacatttataaaactctaataactgataagcatgactaagagaattttaggactggatcttggtgtttcatctattggctgggccattgtggatgaagatgtaaaaaatccggaaaataataaaataattaaattgggagtccgcgttaatcctttaactgtggatgagcagactaattttgaaaaaggaaagccgattacgactaatgctgggagaactttggcgagaggtgcaagaagaaatcttcagcgttttaaattgaggcgagaaaatctattagatatactgatcaaaaataagattctgaatgaaaatcctgttttggctgaacatggaaaaaattcgacatttgaaacccatgcattaagatgtaaagctgcaaaggaaagggtagagctgcaggaatttgccagagtgctatttttgatcaataaaaaaagaggctataagagcagccggaaagttcagaatgatgatgaaggcacagccattgacggaatggagattgcaaaaaagctgtatgaagaagatcttactccgggagaatatacttatcagcttcttaaaaatggaaagaagaagactcctgatttctacagatctgatctccagaatgagcttgatcgagtctggcaatttcaggaaaaattttatccggaaattttaaccaatgattttaagaaagaattagaaggtaaaggacaacgggcgacaatggctgtctttttgagccgttacaaaatctacactgctgacaataaaggaacaagggacgaaaaaaaacttaaggcttatgagtggagaagtaatgcactagctaaacagttagaaattaaagaagttgcttatgtcattacagaaatcaataacaatctgaatacttcaagtgggtatcttggagcaattagtgaccgaagtaaagaattgtattttaatcagcagacggtaggtgagtatttatataatcagctgtgtactaatccgcacacaaggctgaaaaatcaagtgttttacagacaggattatttggatgagttcgaaagaatatgggagactcagaaaaattttcatcctgttttgaatgtaacattaaaaaatgatatttgcgatgttgttattttttatcagagaaagctgaaatcacagaaaggtttaatcagtttctgcgaatttgaaagccgtgaaattgaaatcaatgataaaggaaaaacgaaaagaaaaacagttggattaaaagttgccccaaaatcgtcacccttgtttcaggaatttaaaatctggcaggttcttaacaatattgaaatcaaaaatgatgaaggaagaaggctgcttgatttagaagaaaaggaattgctttttgatgaactgaatatcaaaggcaaccttacttctcaaaaagctttggaacttattggacttaaagcaaaagatattaagataaattttaaatcgattgaaggaaatcgaacgaatgaaaagttttatcaggcgtatcttaaaattcttgaactggaaggttataatattttcgaattattgaaaataaatgaagataaagatgatgtgaaattatctgaattgagagtgccggcttctgaaataaaagaaatgatacaatctatttttgaggcgggtcaaataaatggttctattttaaattttgatgcagaacttcccaatcaagaatttgaaaagcagtctttttatcaactttggcatttactgtattcttatgaagttgatgactcggcatcaggaaatgagaagctttatgaactgttgaataaaaaatttggcttcaaacgggaacatgctaaaattttatcaacaatttcttttgcccaggaatacggaagcttaagttctaaggctatgagaaaaatttatccttacagtaaagaaaataaatacagctatgcttgtagccttgcaggatataatcattctaaagattctttaactacagaagaacttgaaaaaagaattttaaaagatacattagaaattcttcctaaaaactcattgagaaatcctgttgtcgagaagatacttaatcagatgatcaatgttgtgaatgctgtgattgctgaatatggaaagcctgatgaagtaagaatagagctggcaagagaattaaaaaagaatgcagaagaaagagcagagatgacaaaaagtatcaataatgcaacactgcttcatcagaaatatgctgaaatcttaaaaaaagaatttgatgtttccagcccctcacgaaatgatattatccggtacaaactctatctggagctttcgaataatggttttaaagatttatataccaatacaaaaatcgaaagagaaaatctgttcacgaacaaatatgatatagaccatattattcctcagtcaaggttttttgacgatagtttttccaataaagtattggttccgagacaggcaaatttagacaaaggaaatcttacagcgtatgattttatttcaggaaaaggcaaggatagagaagagcattttcttaatatgattaaggagttatttgataataaagatatttccaaagctaaatatgaaaagctacaaaaaaaaatatccgaaattggagaaggttttatagaaagagatttacgcgatactcaatatatagctaaaaaagccagagaaaccctctttggaattaccaattctgtggtgtctacttcaggaaatatcactgataaactccgtgaagattggaatctggtcagtacgatgaaagaacttaatcttgaaaaattcagaaagcttggattaacggaaatagtaataaactccaaaggtgaagaaaaagaagtcattaaggactggacaaaacgaaacgatcatcgccatcatgcaatggatgcgttaactgttgcctttaccactcataatcatattcagtatttgaattatttgaatgcaagaaaagatgaaaagcataaagaacactccaatatttatgctattgaaaaccttataacagaagttgttgagaaaaagaacggttctaaaacaagaaggttcaaatccccaatttccggttttcgtaaaactgcgagaaagcatctcgaagagatattaatttctcataagaccaagaataaagtggttacttccaatattaataaaattaagaaaaaaggaggaatggtgaaaaagactgagcttacacctcgagggcagcttcataaagaaactatttatggaactgcgaagatcttacaaactaaagaggagaaagtttctgctaaatttgattatgaaacaattatgaaagtgcaaaatacgaattataaaaatgcacttttacagagacttgaaaataatgctaatgatcctaaaaaagcatttgcagggaaaaatgcaatacttaaaaatcctgtctgtataaatgatgacaaaaaagatattgtccctgaaaaagtgattcttgcctggtataatacggtatatactattagaaagtctgttaatcccgaaaattttaaagattataagagtttagaaaaaattatagatcagggtattaaggaacttttgaaaaaaagactggatgagtggaatggaaatgcaaaagaagccttttccaatttagaaaaagatcccatctggttcaataaggaaaaaggaatttcaattaaaacggttagtattacgggtgttagtaatgttaaatcgttacattttaagaaggatcattttggacatgaagtgcttgatgataatggaaataaaatccaggtagattttgtgagtacgggcaataatcatcatttagctgtttatgttgatcctgaagaaaaccttgatgacaggatgatgtcattttatgaagctgtggaaagagtcagtcaaaatcaacctgtggtggatagaaattataatactgagaaaggataccgtttattatttacattaaaacagaatgaaatgtttctttttccaaatgaagattttattccaaacgaaatagatctacttgacgagagaaacttaccagccatttctaaaaatttatttagagttcagaaaatttcaaaagtgggctatggaaattcatttgtcagagattttgtatttaggcatcatttggaaacaactgtggaggaaagaaaagaattgcgaaatattacttatgtacaattaaaaagtcttgaaggtctaagaaatattgttaaagtaagattgaatcatttagggaaaattgtacacgtcggggaatattaaattatatagctatgataacccgttcgatctatattggtaatcctgcctatctaaagctcaaagatgaacaaatgtacattttggagccttcttcgcgtgaactcaagggaaaagttccggtggaagatctgggactgctgatgctggatcattttcaaatcaccatttcacatcagctgattcagaaaatgatgggcaataatgtggtcgtgataagttgtgatgcccatcaccttcctcatgggataatgcttccgctgtatgggcatacggaacattcggatcgtgtaaaagaccagctggaggctagtgaatcgctcaaaaaacaattgtggaagcagacagtagaatgtaaaatagaaaaccagaaagaagttcttaaaaaactcggaaactattttgaaccaatgctaacctatcagagcaatgtgaaaagtggagatataaccaatatggaaggaattgctgcacagcattactggaaataccttatcagtctggattttttaagaggtcgttttggagattcacccaacccgttttttaattttggatattcggttctgagaagtattgttgcaaggtcaattgtagaaaccggacttctacctgttttgggtatttttcataaaaataaatataatccttattgtcttgccgatgatttgatggagccgtttcgtccttttatagattttctcgtcatgcaatggcttaatcagaatcccaattcggatgatctttctaaagagtttaaggcccatatactgagaattgcaacggtggatgttttgattgatgaaaaaacgagaccattattggttgcagtgaaagctactgcttcttcgctttataaatgttatacgggagaaaaacgtctgatctcttatcctcaactgatatgaatgccgaaaggtttaatgcataccgtattatgtgggttttagtattatatgatttaccgactgaaactaaagccaatatgcaatccgctaatcgctttaggaaaggtttgctggatgatggttttacattgttccagctttcgatgtatgtaagacattgtccaagccgtgaaaatgccgaggttcatattaaaagagtgaaatttatgttgccaaaggcaggtaaagtagctattatgtgtattacagataaacagtttggtgatattgaaattttctttgccaggaataaagaagaaccgccaccaacctttcagcagcttgaattattctaaattttccaatcctaaataaacataaaatccgttgataatcaacggattaatttttgaggctgtgatcaatcacgaagataataatttttgaaagcaattcacaactacatcatcccccttagcccactgctcaatgctgtgatcaatcacgaagataataatttttgaaagcaattcacaacttgctttgacttagcatcaatatctaatacgctgtgatcaatcacgaagataataatttttgaaagcaattcacaacagcggattaattttaagttttttcgtagaggctgtgatcaatcacgaagataataatttttgaaagcaattcacaacacgccatcgcaaatgcatttggaccagaatgctgtgatcaatcacgaagataataatttttgaaagcaattcacaacagttcaactgtttccactttgataccatcagctgtgatcaatcacgaagataataatttttgaaagcaattcacaacctttctcttgatttaattcaaagtacatacgctgtgatcaatcacgaagataataatttttgaaagcaattcacaacacgccatcgcaaatgcatttggaccagaatgctgtgatcaatcacgaagataataatttttgaaagcaattcacaacagttcaactgtttccactttgataccatcagctgtgatcaatcacgaagataataatttttgaaagcaattcacaacctttctcttgatttaattcaaagtacatacgctgtgatcaatcacgaagataataatttttgaaagcaattcacaactcaaaagctgaaattacatcttcaataaatgctgtgatcaatcacgaagataataatttttgaaagcaattcacaacccatatgctttaatagctgcagtacctaatgctgtgatcaatcacgaagataataatttttgaaagcaattcacaactatgaaaacaaatgcattgacaattcaaatgctgtgatcaatcacgaagataataatttttgaaagcaattcacaacttctacaaatttatataactctaaatcccagctgtgatcaatcacgaagataataatttttgaaagcaattcacaacagattaccaaacttactcttttgaggtcgcgctgtgatcaatcacgaagataataatttttgaaagcaattcacaacgagcttcaatgatcgttaagtatgccgcctgctgtgatcaatcacgaagataataatttttgaaagcaattcacaactataatgctggttttactgcaggtgaaaatgctgtgatcaatcacgaagataataatttttgaaagtaattcacaacgacattgccaatgccctgaatgtaacaaatgctgtgatcaatcacgaagataataaattttaaacagctaaaatagccattttttctatggcgttaaatgttttagattttgtattttcatcatcctgttttttataatcatcattaaaagacgaatatttttatttcttgatgtatgttaagatgttaattggttatgtttttctatttttggaatctttaagtttaatattttaaacaattttctaaacaaataaacaatatgaaaaaacttagtgtaattgcattagtaggaataggattgcttgcagcatcgtgtactaaagaaaaatcagcagatactgcagcaacggcaacggagcagacggtagcagagagcaaaggagaagtattaccggttgatgctactacttctgtagtaaactggaaagcttttcacaaaggaggtatggctcctcgttggggaactcttagcgtaaaatcaggtgatctaagcgttgaaggaggtcagttagctgctggaaactttgtaatcgatatgaattctatcaaagtagatcctgcttccgtaacagaaaaagataaaaaacctgcagatcttgaagctcacttaaaaaatcctgatttctttgatactgcaaagaaccctacttcagatttcaaaattacaagtgttacagatttgaaagaagcacctaaagatgctgttgcaggagctaataaaacagtaagcggaaatcttacactgtcaggaaagacaatgaacgtaactttccctgctaaagtggatgttactgatacttcagctgctgttcaggctaaatttacagtaaacagagcagattggggaatcaagtttggtacttcagaagcagatcctgctgaatggatgatcagcaaagatatcgaaattgctgttgatgtaaaagctaaaaaataattgttagatacagataccgggagctgccttcatatgaaggcagctcttttttataaagataatcgaaaagaatagctgtctttttaggaccctgtttaacatataaataaagcagtaaaaaagcctgatctactgtaagtatttaggcttttgtttctattggctcaggtacaaatgagtttatgggataatttcattataatacaccggcatgtccttatttttatcatatcccatgatgatgagtctgtaattcttcgcatcatcatttccgtaaaactgtactgtagtggcttctttcggctgtacttctaaaaacgggttccagtaaagaacgcttctggtgtcctgggaaatattttttagtccatcattctcgtatataagattgttgaaaggctcttctttgtcataaccaaccaatgatatttgccttaattgggagggttttgtagtggcaccggttgagccacctcttcgggtataaatagcgattgcaccgtttccacctccgaaacctcctgagaaaaacccttttatgacttttaccatggcgatatctgataccgatagatttcctatttcacttggattgacttgtatttcatcaatataagtgtttaccactgcatccctcagataaggaacgtaggtgccatttcttgtttgaatttgcaatccggctactcttccctgcaaccattgtaaaacattggttgtaccgggagattgtaaatcattaacaaaatcgaaaacttcttcatttgcccctctgaacaaagggctgcttagctctttattgagctgtttggttttgtcttttttctccccttttaattttatctcttctatatcggttgttttctcattgatatttttttgaaagttaatgcttgcgacagaccgaaggatctccgcgggtatttggtcatcattaggccgctgtataagcttgtaatgagttaatggaaggttttttccgtagggtacaaaactgtaattaggctgaaagtagacggaatagttatttttaatttgttttggatccgaattgagctgataagaaaacttcattgaatcctcaaaaattaaattattcagagaaaagaaagcgttattgtctgattttatctggaatactttaggtcctgatccggaattaaaaattaaatttaaatccgtattcggagcaggtttaccttcaatatttatttttcctttgtaagaaagatagttttcaggtgtatatttaatcattgggtaattgccggatataatagatttccagtcaaaacgtttccattgttccgagatcaagagagcatctaatgcatctgtatttctgttttttataaaatattgggcgggattgtatattttagaagcaatatcgcccgtaagccataaagaacttaataaactttgatcttcttcagtactttttgtgttggcatcaataactaaaaccgtataacttgaagattttgcctctttggcaatatcaaacgaaactttcccacggggtgtactttttacggataaagactgtaacgtaggctcctctgtttgcagcaattgtggctgtacaaaagaaagtctgttcgctactatgttttctttgtcatcgaagaccgtaagctgcaatattccgctgataagctggttgttaggaatagagtactgggtttcatcagagatggtgccgatctgagccttataaaccagttgattgtttattgtccctaaaattttataatattgagattcgttagaaagattttttgcttttaaagtatattttatagcatcaacattgctcgttacctgtaaatttatccctgatggagcgacttccggtagatttatgctttgttttcgtccggctttgtcctgaatgacgagctggtatttttttccgcttgtgggagtaatgttgaacatgcctacattctgatcaaaccccttaactgtacttatttttgcattaggattttcagtgtctgttacgtacccttcccaatcggaagtagatacctcatttgactgcagtcgtaccgcaacttttgtactgattccatctataaaggttccgctttccggatgtacggatgcagtccagttcggattggaatctactgttaatttttcaggtgaagaaggattgtaaacagcaatgggctttaccagctgaaaatcttcactgaaattggccatccaggtcgtataggccctgatgtaatatacatcttcctttaaagaggcaggaagggaaatactgccgcttccttctccatttaataaaggaaataattttttactgatttgttttttattacggtcatataattctacaaatagagtagtagagatacttgatgtactgtatccatcaaatacaaaagatttaaaccatatataatctcctgcgacaaagttatttttgtttaataacaaatgtattttttcctgagggtatttttgttcaaatgtttttagagcctgttctgctttctgttgagcattcatgcagattaccacactcattgtaagtaaaaggattaattttttaaacatattaataaaatattgtgttttaaatatggaacacttaagttacatttttatgatgatgtgttatatacaatctctcccgaaaatttaaattaaatagaccacaatgaatgatctcatcccatccattaaaaatagaatatccggaatagaagtattttaaacgatcataatgagttccgtcaaattactatatttgcttcaatggtcaaaataatattgttaggaattaatctttttagttttctgatttttggattagataaaaatctggctgtcaggcataaacgaagggtttcagaaaattcacttttaggattaacattcattggaggaacggcaggtgctattttaggaatgctgattttcaggcataaaatttcaaaaaaatcctttttaatgaaatttgtagcagtaattctgattcaggcagttttaatctgtttatacttctggtttctagatccggtgctataaaaagcaaggtttaaaataacagcttcccttttattaaaccataacctgtctgtttttttagaacgtataattaatatttgggccacttaaaccggtcatattttatgcaggaaaacgattgaagcaaagataaatgcagcctgtgacagaagttgactgatattattttagccggcttttttgaaagaaataacataaatttctcattatgaatttgttaattaattcatattcttgcttgttattcattagaaatcactatttttgcacccgtaaaaatcattcatgcaaaacattagaaatattgcgattatcgcacacgttgaccacgggaagacgactttggttgacaagattattcatgctacaaacattttcagagaaaatcaggaaagtggagaattaataatggataataacgatcttgaaagagaacgaggtattaccattctatctaaaaatatttctgttacttataaagacgttaaaattaacgtaatcgatactcccggtcacgccgattttggtggggaagtagagagagttttaaaaatggcggatggggtaatcttattggtggatgcctttgaaggaccaatgcctcagacaagattcgtacttcagaaagcattggaattaggacttagacctttggttgtaatcaacaaagttgacaaaccaaactgtcgtcctgaagaagttcatgataaggtatttgatttattctttgcacttgatgctactgaagagcagttggatttcccaacgttctacggttcttctaaacaaggatggttcaacacttcattagaacaaacagaaaatatcttcccattattagatggtattttacagtatgttccggagccgaaagtatcagaaggaactttacagatgcagatcgtttctctagacttttcttctttcttaggaagaattgctattggaaaagtaatcagaggagagatcaaagaatctcaatggattggtcttgctcaggcagatggaaaagttttaaaaggaaaagtaaaagaactttacgtttttgaaggattagggaagaaaaaagttacagaagtaaaagcaggtgatatctgtgctgttgtaggttttgacgctttccagatcggtgattcattcgtagatattgaaaatcctgaaccgttgccaagaacttctattgatgagccaacgttgaatatgacgttctctatcaacaactcgccattcttcggaaaagatggtaaatatgtgacttctaatcacctgaaagaaagattatacaaagaactagagaaaaacttagcattaagagtagaacaaactcaggatgcaaacactttcctggtattcggtagaggtattcttcacttgtcagttttgattgaaacaatgagaagagaaggatacgaaatgacaattggtcagccacaggttatcttgagagaaatcgacggagaaaaatgtgagccttatgaatctttggttgttgacgttcctgaagaatttgcttcaagagttatcgatttggcaactcagagaaaaggagatcttcacattatggaaactaaaggggagatgcagcatatggaattcgagattccttcaagaggtttgatcggattgcgttcccagatgttgacggctactgctggtgaagctattatggcgcaccgtttcacagaatacaaacctttcaaaggagcaattcctggaagaagcaatggtgttttggtaagtaaaagccaaggtccggcaactgaatattctatcgctaaattacaggatagaggtaagttttatgtggatccgggcgaagagatctatgcaggaatgatcattggtgagcaaaacaaaccaggcgatcttgtcatcaatattgtagaagcaaaacaattaaacaatattcgtgctgcaggtaaagataaagatggaggtgttgctccaaaaatattgttctcactggaagaatgtatggaatatatccagtctgatgaagcaattgaggtaactcctaacttcatccgtatgagaaagaaaattctttctgaagaagaaagaaaaagaatggaaagatcagcgaaagcgtaagaaattcttatatattagaaaagcctcgaatttttcggggctttttttatgagactatgtcctaaaatgtttattttggcataataatctcttagaaaaaataaatttaaagtagtttgcagacgatgagaatgaatattataaagcttactcttttaaccggagtttttgcatcatatgccagttgttccgtacagagtaatacagtaaaagcaacacccacaaaaaatacagctaagccaaacagcaatatatcaaagcccaaagaacctgttaatacagtaaaacctgtaacagcagtacctccggctgaggaaaacttcagaaccacacttccggagatcaaaagagaattccgtggtgcctggattgcaagtgtagccaatatcaactggccttcacgaaatgatttaacggttgatcagcagaaagcagaagccataagcatgctcgatatgctgaaagacaacaatttcaatgcggccatcttccagatcagaccttctgcagacgcgctctatacaagcagcatagaaccttggtcttattttctgaccggacagacgggaactgctccttatccaaattatgatccccttcagttctggattgaagaagcccataagagaggtttagagcttcatgtctggttaaatccataccgggcccatcattccaacggaggcgctgtaaacagcctgtctatggctagcaaattgtctgatattgttgtaaaattaaagaacggaatgtactggttcgatcctgcaaatccaaaaacacagggacacgtttccaatgttgtgaaagatattgtaaagagatatgacatagatgcagtacattttgacgactatttctatccttatgctgcgtacaacagaggcgcagattttcccgataatgcaacctggaatgagtatcagagaagcggaggatcattatcaagggcagactggagaagagataatgtgaatagatttgtggaaaggatctataaagaaatccatgcagaaaaaaattatgtaagattcgggatcagcccgttcgggatctggaagcccggatatcctgcaggaatcgttggatcttcacaatatgacgaattatacgcggatgccaaattatggctgaataaaggttgggtagattatttttcaccacagctttactggcctatcgactcaaaaggacagggctttgaagcattgctaaactggtggcaatctgaaaacacaatgaaccgtcacctttggccgggacttaatacggtagaaataaaagtctcagaccgccctgcggaaatcaaaaatcaaattgaaatttcaagacagatcctaaaga

SEQ ID NO: 2180 - DNA, 24209 bp, synthetic construct
  source 1..24209: mol_type = other DNA
  misc_feature 1..24209: note = Synthetic
gattaatctgaatgattaattctttggtaaagggttgtatgtttttagttcaaactggtcaccatcaaaaacaccgtaggtgaaatattgaatccagtcgccaagattaatgtattttgagttttcgggaagatcaatatttaagggaagatgtctgtgcccaaatacaaaaaaatcgcgatgtttgtcttctaacttgcgtttgcaatattgcacaagccattcattgtcttcaccaagaaacttggcatcttcatctccagaaatgagtttgtttttaacggagaggtattgggctaaccgaacgcccagatctggatgcaaccaacgaaatagccatttgcaaaacggattggtaaatacctttttcatgcgtttatagcctttgtcgccagggcctaaaccatcaccatggccaataaaaaaggttttattgttaaaggtgaattctttaggttgatgaaatacaggaatgtttaattcttcttcaaaatagccattcatccataaatcatgattacccacaaaataataaataggaatgccagaatcgctaatttcggccagcttacctaatgttctggtaaagcctttgggaactacggttttaaaatctatccagaagtcaaataaatcacctaatagaaaaatagcagcagcatcttctttaatcgcgtctaaccaggctacaaatttcttttcgcggggcaatgaagcctcatttgtgggagcgcccaagtgattatctgaagcgaaatatattttttttcctttgggaatttgcatgcgtaaatataaggattcctgttgaggttactgggtatgaatttttgttccttttttgcgttagggattgtggtactgttgaagctctttttgtgtggttgcacctatgcaacacaaaaaagcgactaccaaaagcccgacccttgtggtaacgccctaaatattatcgtaagcaaaccactgcgcaaaagagctatctgtttcttgcaattttagcgagtgcaggctaatatgactggggaggcgatggctgattttttttgcaaaatcgagtaccatcatttcactggttggctgataatctactagtaacacattatgtcctcgagactccagttctttggctaattcaatgtgcggtgtgtttttattgaacaccgtggcatgatcaaaaacactcacaatttcttctttaactattttttttaaatcaccaaaatctataaccataccgtattttacgttggtgttgtctgaaataggtttgccaattaccgttacagaaagtttgtaactatgcccgtgaacatttttacattttccgtcatatccatacagggcatgacccgtttcaaaggcaaattttttggtgatacgtatgttgtttcccatgtggaaaatatttaaagtacaaagatattcattttgttttaccaattggtttttagattacatttgcgcacttttatttcattaaagataagaggtagatgatgtgcatatgaaacacctttttgaggccattgattttgccgaaaaccctttatacgaaaagattatttcggatattggaagtcagcaatttagcattgttgagaatttcttcacccctgaagaggttgaatgcttaagacactctttgattgaaaggcgggaagaggatgcctttaaaaaagcagctattggcaatcgtgttaatgaaacgattataagagccattcgtggcgatttaattttatggattgatgagaccgctgtgaatacttctgaaaccttgtttttcaataagataaatagcttggtgtcttatttaaaccgtacctgttttatgggtattttgcataaagaatttcattatgcggtgtatccgcctcacaccttttacaaacgccatattgatacctttcaaaatgatgataggcgcaaattatcttttgtatgttatttaaatgaagacggttggttgcctgaatatggtggcgaattggtgctttatctcaatgatgacggccaggaagtagaaaaagttatttacccgtttccaggaaggattgttgtttttgaaagtcaagtgattgaacacgaagtgaaagccgtaaaaaaagagcgcttaagtattacagggtggttaaaaacccgataattaacgccttctgtatctgttcacaaagtatacaatgattaaaaaaatggcaagaacaagaaagagtatatttcccatggcatgaatgatttattgtgaatttctttttttattatagcggtagagcaagtaagccaaagtcacaagaaccacaaaaggtagcatagaaccaataaacacgccaatttcataagctttatcgggagcgtttttaattttttcttcaatattaacctcttgaaaaatagttaaaaatagattcatattttatataagcaacgtgttaagggctttgtggtacatggctgatgcaaagttaatgcttttgggctaggggcaaaaatactcgcctgaattttataattagtggaatgccccgcgctataatccagaaggtcatcgcaataaaaatggcatataatttatacccgtagctatctaaccaaaataacataggaacaaaaactaagaaggttgaaaaaagtagcacattacgcaagtatttcatttttccgaggcctttaaaaataccatcaaaaataaaggctaaagtacagaagggttgcatggccaaaaccatccaaaacacattataaaaagcatttaacacctcaggttctttggtgaaaattctaccaataggaatgtataaaatagcacctgttataccaagggtaataccaataataataccgtatgttataagtttgttgcttaatgatattaaactggaatacgcctgagcgccaaataatttaccagaaaggatgtttcctgcgctagcatagccatcaacaataaacgcgcctaaaaaccaaagatttattgctatggtgtaagcggcaatgtaattggggccataactagtggcgtaggcgctggcaaaatataaggtaacatttaaggctatggttctaataaaaagatttaaaatcattaaaataaaccgatgtatttcaggattaaaaggtaagctgggctttaggggaatgcttgttttttttaagagataaaatgctgcgagtccagccattactatttgcgccattacactggcataggccgcacctttgatgtgcataggttctataaaacccttaacaccgtataccagaacaacatctaaaataatgtttaaaacggcaccaatggtagcaataatcatggggtaaaaggtgttttgtaaccctctaaacacgccaaaaatggcaatggtaaacaaggtaaaaggaaagcctaatactctaattttatagtatagtacactgtagtctagaattaaatctgaggcgttatatagtttaaatatgtgttcagcaaaagggtaggtcgttataatgatgagtatgcttagagaggtaataatcagtatggcctgagcaggtagatttttaatgtttgtgagttgattggctccaagatattgagatactatagaggatatggcacttcttgtttgcccaagaacccaaataagcatagatataaaggtggtaacaatacctattgctgccaaagattcggtggcatttattggtatattcccaacaatagcggcatctgttaaagataatataggttctgatacgcccgaaattaatgcagggatagcaagtttattgatgtgttttaagctaatatctatgctcacaatactaaatcttaactcaagagagtttcactttattttgaaaagtaaaaatcatcaagctttttctggcagcgaagttcgtaaaacttttgatttcttcgattttttaaaaaggtatctagtcttattatttaatactttacttttgtttcaaatttattgtaaatttaggtttaagctttacccatatgaagaatattttagttcccgtaggatcctcaaaaaatgcgaaaagtcacttgcaatatgctgtagattttgccgaggcctttaatgccaaactttttgtagttcaagtgtataatgtttacactaaagctggtacgttaatgaaggtagatcaagttattgagcgtgaaagcatagatttcttaaacaatttggtagcacaaattgacactaaagacgtagaggtcattgtgaaaacactcaaaggaaagtttatagacacgcttgagctggcttgtaaagctgccagtgtagatttagttttggtagagcctagaactaattctataaaagatgaagtctatttaggaaaaacctctggaaaaattattaaacaaatggaggttcctgccttgattgttcctgaagggtatacgttttctgaaccgactaatatgttaatggccgtgaaatctgccattataagaaaaaatacggctttagatccgttaaaagaatttaaggctaaattcaatccttctattgatttgttactagtgaaaaccccagattttaaggatgaagattttgatgttacagaagatttgaaatctgtggtaaatacaattaccactactgaacaggccaccgtttttcaagggcttttatatcactatgaaacacataagccagatatgctttgtgtagtgaggcgtaaaagagggttttttgaaaagaaatgggaaaaaaataccattctaaaaaaggattttaacagtaatatccctgttttagtattaagcggtatgaaagactaagtatttatttttaaaagattgagtatttatagcttaagttattttacgaacacctagctgaattaaagtaaccaaaccgataaataatataaagtacagcgatagtcttctgaatttattttgcggaatatagactaatattttctttcctagaaaggaacctaaccacccaatacctagtaagaaggggatatattttaggtcgtgtttatgaatataaccattgttgtagtacacaaaggttctagaaaagtcaatcataaaatcaatacaagctgaggtggctataaacacgcttttttctaaattaaaagcagccatagttaagcctctaatagcgcctcctgtgccgagtaagcctgccgaaaacccggataatgatccgccaataaaggcatttttcttgtttgctgaaaaggtaattttacttttaattaaaaaaagtaaacttaggcttaccagaaacaatcctaaaaatatttctaaaaaatacgtgtttaataattttgatgccaaacctccaataataacaaaaataacagatggtataccaatgtatatcaataactttttgtttaaaccctttttaaataatactattttactgaggttgcttgacaaatgaaatatggcggttaagcctaaaacactataaaaatcaaaataaaaattgcctatgggcacaaaaaatacggaagacccaaaaccaccaatggtgccaattatttcggcaattaatgctaatagtaaaaaaacataattgatgtttgtcattaatttttagaagaacagggttctttgtttttagggtttagtgtaatgtttccttatttaatgtttaaaagagcatcgttttttaacttagctttcttaaaactaagcatgcttcccagaagcatactggtgcaactcattatagtgccataaattgtcggatcaattcttgaattgaaaatataacaaaataaccacgttaaacctccaattatgatagccgcccaggcaccatgagtatttgcctttttccaaaaaagtccaaaagtaaatggtgcaaaaagacacactaaaattagacttaaagacgcttcaactaaacgtataatatcagtatcatcatatgcaaagtaacaagaggctagagcgactaaaatgacacttaatcttgtgtaaagaagtaatctcttatccgaaattttgtttgcataaggtttaataaggttttcaccaataaccgttgcaggcgctagcatagcaccgctagaggtacttagaatagccgatattaaagccccgtaaaagagaatttgtattggtatactagtcattgtattcactaaagagggaataatatcttgattattaccatcttttaataactcaggatacaggtaaacccctcccaaaccaataataagaggaatactggttatgataactaaaagtatagcaccaagaaaaagcccattacgagctgagcgttcactttttgctgagaacacacgttggtaaatttcttgtacgggtattgcaccaataatgaaagccaataaaagcgcaatataatcagaccactcatcaatgcctcctgttggaactagataaaaaaattcggtaggtttattttcaaagataggtagtatacctcctgttttacttagcacttctataagaactatattcaaaccgagaagaatcatgatgctttgtaccatatctgtataggccacagcccacatgccacctatataggtgtaaaatacaacaataagtgcgcctagaaatatgccatattcaatggggattccaataacggcattaaatagataagctaatgccacaaattgtgcagcaatccaatgcggataagctaatatcattaagatggaagatgttaattctagttttttgttgtatcgaatcctaaaaaagtcgttgattgttaccagattcattcgatataatttacgggcatagaaccaacccacaataaataggcaaatgctaccagacaaaatcagcgtaacataagatgaaaaaccatccttaataaaataaccgggattacccatgatttggctacttccaaaccaagtagcaaataatgttatggcaacaaatgacgttgataaattctttccagcaagtgtaaaatcattagaggtttttatacgtttagaagcccaaaacccaatacccaaggtaattaataggtaaattatgatgaagaaacttatcatatttagattttggattattaaaccgttgcgttataaataagacctacaattaaaacattaaattaagtaggggcatttacaaatcatgtacaatactttacattctaaagataagagtaatcttatttggttgtataaagtcatggtgtttatttctgatttttagatagttttatcaacacttcaatggttttatcagggtcttttttgtcaacaacaatatgatggtgataacccccagctatttaatggtttcttttaatcaatgcgatgagcgacaccattgaccacacaccctcaagtagtataaatggcatatatttcatgagtactgacgcaagacaagctaaaacagcaccaaataggttcagcagaataaaagttaagctattgttgtttagtctgcctgatacattaagcgtatatgctattaagatttgaaatactcctacaaaacctatccaatctgttgcattcattcttttaatgtgttgtatagttgttggttacaacttttttgctattcctttttttctaattgtttgtgtgaaccatcacagtttggctttcgttctgaaagtccgcaaacacaatcattcaatccatagccatccataatgcgttccatatttttttcaattctggacattttggtttttgattgtttcggtttgtcaaaatgtaaaagatacccccgttgtcgtccagcagtgaggttatcaaatgctttttcaaaagcaggattttccttaaacttttgttctagctcttttggtctattaaaggcgcttgtctttttcttctcaacgtgctttccaaatgtttcaatttcaatagcttctttaatgtatgcttttattgttgatttgagttcttctatttcagatagactggtaaatcgaatttgtcttgcagactgcatattttccgtttgttgcactaacagtttttcagggtcttttagtaaagcacctttatgaaacagcaaggcacaatagtttttaaattcgtgaattagtacaatgttttttccattatcggtgtagcatggatgcatccatttgaatgtttcgtttaatgcacattcaagcacaatttcacgaagtttggttaattctgtttgccattttttaaggctgtttaagtatgtattaacatcttggttcattattttgtttgctaatcggttttgatatagaatgacatgagtgttttatactactatggtgctaaatttagcaaaacaagttgaatttgtgatagtaaattaagctgtcgtggcatttacaattttggctgtagtttcttgatttttctttacattatcaataatataaaggggtttaaattgaatttggtaattttataaaaaattaaatatcagttaattatgcgtaaaataatgttgattatcattatgcttgcttatacgtgttcatctaatagcaaagatcaacatccaagtccggatccatttggtgggaaggatttgtattctcaatcttcaagttctgaaagaatattaatgggtaagtggtattttggatatcgctatagtgaaatgcttagcgggtcaattgaaattagttatgattctggaacttactggccaactggagacagaaccgatactatacaattttattcaaaagaattgattggttttagttgggattgtccatatgagaatccaaataaatctttggttaaacttgtagaatcagaatctgctagttattttccatggtgctttcccagtggtgttaatggttggttaatagaagacgaattacttacttactacagggggtacgatactaatgattttataacatacccaataattgaaattaataatgattcaatcttcttcttgtataaagattatcctagtaacgacataagtggaatagataaggaatatgctgttttttttaaaaagcaagattaggttcttgtttttaccatattaactgaataagtatgccacatatttctattaccaaacataaaggtgaaaacagtttggtatcccatttttcaaatgttgtgtgttttacacttttgaaaaaatccaacctatttaaagtcaccagatgcacgtagtaaaaatagttttggaataacccaactcccatatttcaaaagccattgaggtagattaagtactaagagtatagatttgagcaaataaaacattccaaagagcgttaaccccatcgccaccattacactgtctatttttttcggattcagaacgcgctgcccattttctttggttgggattgattctgcaaagccaaatgttcctccaatagcccaattgaaatgaatcattcctaatccaactagaatggcgcttaataaaattgataaaatcatagttttagctcattttgtttaaagaggtactaacatgtttggtaaacaattagctatgtttatctattggttgaaaagttaagtattacaatacattttttgtaataaaattaaatgcggctgtgttttgatggtagttttttacattaaaatgtatacatttgcatacttttgaaagtgaatgcaagatggcctaatagggtagtggtataaaatcttgtaaacactataaaacagtaagcggggatgtagctcagttggctagagcgcttgactggcagtcaagaggtcgtcggttcgagcccgatcttctccacagtaacagtaaggcttcaaaagatgttttcttttggagcttttttatttacatgcaatttgcacgccgcataattaagagcctctacattagtaaataaaaaagccccgaattggaagtcgaggcggcttaaatgttttcacaacggaataatccttattgtgaattgctttcagtaatacaaatataggtaactcaaccctaattataatgatttttgtcagttaaatcttaaaatattttccttatgtttaaaagaattgtcttcaaattttaaatatgaaaaaaatattaggattagatttaggaactacctcgataggttgggcgttagtaaacgaagctgaaaacaacaatgagacatcagaaattataaaactaggcgttcgtgttaaccccttaactgtagatgaaaaaactaactttgaaaaggggcgtccactttcaaccaatgccgaccgcacattaaaaagaagtactcgtagaaatttacaacgctataaattacgtcgtaaaaacctaattgaaatcctaataaaaaacggcttcattaatcatgaaacacccctaacggaaattgggaaaaacactacgcaccaaaccttacaattacgtgctttagcaactaaaacagaaataagcatagaagatctggcaagagtctttttaatgattaataaaaaaagaggatacaaaagtagtcgtaaagcaaataatgaggaagaaggtcaggctatagatggtatggctgttgcaaaaacgctatacgaaaacaatcaaacaccagggcaatatgttttacaattgttaaaagacaacagaaaatatattcccgatttctatcgttcagatttacaaaatgaatttgataacgtatgggaacatcaaaaaaaatattaccccactattttaaccgatgctttatataaagaattacaaggcaaaaacaaaggagcaacttgggcaatctgtcaaacaccttttagcattgaaggcattaaactagaaggaaatgctaccgaacaaaaactgaaacgctaccaattacgttctgatgccttgcatcaacaaatatctcttgaacattttgccattgtattacaagaaattaacaacaatcttaaccaatctagcggttacttaggagctatttctgacagaagtaaagaactgttttttaacaatgaaactgttggagaaaatctatataatcaacttcttaataaccctcatcaatctttaacaaatcaagttttttaccgtcaagactatttagatgagtttgaacgtatttgggaaacacaagctaaatttcattcagaattaactgaaaaattgaaaacagaaattagagatgttatcattttttatcagcgtaaattaaaatcacaaaaagggttattgagcttttgtcagtttgaaagctgggaacaaacttataccgaaaaagaatcaggaaaacaaaagaaaagaactgttggtaatcgggttatttctaaatcatctcctttatttcaagaatttaaaatttggcaaaatattaataatttgcaattcaaaagaattgacggaaaaactaatgatttatttaatcaagatattgaaaacgattatgttttagatgaagaaattaaactgcttctatttgaagaattaaatgttagaggggatttaaaagccaacgaagttcttaagtttttaggtaaaaaacctaaagaatggaaatgtaactttgaaaaaatagaaggcaatcgtaccaacaaagcgctttttgatatctatcaaaaaattgctgactatgaaggtttcggacacgactggaataagaagacagctattgaaataaaagaagaactaaaagctatatttcctcaaacgggtattgatgcttctattttagattttaatgcggagttggaaggcgctgcctttgataaacaaagtagctatcaactttggcacctgctgtattcggcagaagatgactcaaaaataacagaagacgataaaaacctatatggcaacagtaatgtggctttaaaaaagaaattacacaccaaatacggatttgcaccaaaatacgcaaacctcttgtgcaatataaaactacaagatgattacggaaacttatcatcaaaagccataagaaagattatcccctatttaaaagctggacacatttattctgaggcctgtaaaatggcaagctacaatcattcaaattctgaaaccgtagaagagcgcgctaaaaaagtatatgccgataaattggaattagtaaaaaagaatagtttacgaaatccagttgttgaaaaaatcctaaatcaaatgattaatgtaattaatcaggtgatagactcgtatggtaaacccaatgaagtgcgtatagaattagctcgtgaattaaagaaaaatgctgatgaaagaagagaaatgaccgttaatattgctgcagcaacaagaagaaatgaagatattaaaaagtccattaccaaggaatttggtattccaaacccaactaaaaacgatgtcattagatatcggttgtggcttgagttagaacaaagagggtataaatcgttattcaccaacacctatatcccaaaagaaaaactcttttcaaaagaaattgatgttgaacacattataccaaaagctttattgtttgacgattctttttccaacaaaactttggcttatcgccatatcaatcttaaaaaagcagatagaactgcctatgattttatttcagatgaatatcagtcagacttagaaaactatatagaacgtgtagaaagtttatacaacaaaggtaagggcagcatatcaaaagctaaacgcaataaattattaatgcctctttctaaactacctgatggctttattgagcgtgatttacgcaatagccaatatattgctaaaaaagcgagacagctgcttctagaagtgtttcctgaggttattccaacttctggaaatataactgataaacttcgtgaagactgggatttaatcaatgtgatgaaagaacttaactttcctaaatataaagctttaggtttaaccgcttttgaagaacgcctagataaatcaacagaaaaattaaaacaagtagaagttattaaagactggactaaaagaaatgaccatcgacatcatgcaatggacgccttaacagtcgcttttacatcacataatcatattcaatatttaaacaatttaagtgcatcacgaaatgaacaaagtgaactttacggtataagaaataaaatcacttacaaaaacgaagaaggtaaacgaaagtttatcaagccgatgaataattttaggggagaagccaaaaagcacatagagtctgttttggtttcacacaaggccaaaaataaagtagttactaaaaatataaacaaaagcaaactaaaaggaaagaataaataccaaacaaaaatacagttaacacctagagggcaactacataaagaaacggtttacggtaaaagcaaacaaacattgagcaaagccacaaaactcaataaaaaatttaccattaaagatgcacgtcttattattgacaaaaggcaacgagagctagtattacagcatttaaaaaactttaataataaccctgatgtcgcttttgatactaataccttaaaacaaaatcttatactttttaatgaaaaccctttaaaggaggtattatgttttgaggaaatttttactattagaaaggatataaatccagaaaattttaaagatgtaaaaaccataaataaagtggtcgatttaaaagtacgccaaattttattagataggctttcaaaatataatggcaaaccaaaagacgctttttcagatttagaaaaaaatccaatctggttaaataaagcaaagggaatatctataaaacgagtaacaataataggggttagcaatgcagaacccctacaccataaaaaagaccacttaggaaaagaacttttagatgatttgggaaaccgacaagctacagattttgtaagcactggaaataatcatcacgttgctatatataaagatgcgaatggcaagctacacgaaaaagtagtttcgttttatgaagcagttgctcgagttaatgaagatctacctgttattaataaaactttaaatgaacattttggttggacctttcaatttacaatgaaacaaaatgaaatgtttgtgttcccttcgaaagattttgaccccaaagaaataaacctattagataaaaataattttaatctaataagtcaacacctctttagagttcaaaagattgctactaaaaattatatgtttacacatcatttagaaactcaggcaacaaatggtgatgatttaaaaaaacttaaaatgttatctggaaaaaaatatcattttattcaaacgcctgaaaaacttgacagaattataaaagtcagaataaatcacattggtcaaatagtccaaataggagaatattaacaccatgataaaacgcaccctattctttggcaatcccgcctatttaagtactcgaaatgagcaattagttgtgaactttccagaagaaggtaaggccgaaaaaaccattcccattgaagatttaggttatatcgtgttggaagatcctcaaattaccattaccaacgggttgctacgtaaattggtagaaaataaaaccgctgttattacttgtaatcaacaacatttaccctgttctatgttacaacccttggttggccacaccgaacaaaccgaacgcatgcgttatcaacttaatgccagcatacctttaaaaaagaatttatggcaacaaaccgttatggccaaaatagaaaatcaagctaatcattttttgattcgtggtaaaaatgccttacgactaaagcgttatgccaaagaagtaaaaagtggtgatttggataatcaagaagctctagcagcagccttttattttcaaaacctctttaacattaatggttttagccgtaatcaaaaaggtgttgctcccaacaatttgctcaactatgggtatgctattttacgtgcggtaaccgcaagagccttagtaagtagtggccttttaccctcgtttggtatttttcatagcaataaatacaatgccttttgtttggctgatgatgtgatggaaccttatagaccttttgtagatgctcttgtttttgacattgtagaaagcggttgccaaattgaagaccttaaccaaagtataaaagccgatttattaatgattccagctatagatgttattattgatggtaaacaaagccccttaatgaatgccatgagccgaaccacggccagtctgtttgaatgttttgaagggagtaggcgcaaattgttgtacccagaattcaaatcatcattagaaacctttatcagataacatgaatacagactatggaatcctacttaacccgattaaaccaatatagatgtatgtgggtactcgtgttttttgatctgcctaccgaaactattacagaacgtaaggctgctacacggtttcgaaaaaatttattaaatgatggttttgggatgttccagtttagtatctatacccgattttgtgcaagtcgggaaaatgcatcggtacatattaaacgtactaaaaaggcgttgccaaaaaaaggaaaagtctgcatcatgcaaataaccgataaacaatttggtatgatggaactctttcatggtcagaaagaagcccatttagaaccgccttcacagcaattagaattgttttagaaattgaaaaaccgatacaaacgttgttggtttttaatcctttccatgataaagcaaccgtctaaacatcaccataaaaaacaggataccaacccattagagcaagtatcctgtgaattctccataaatttaaagaactgaaagcaattcacaactgggaaacgcttcaagaaaaaaagaatccacctgtgaattctccataaatttaaagaactgaaagcaattcacaacacctgtgtctttggtgtctaaaattaaaaccctgtgaattctccataaatttaaagaactgaaagcaattcacaacaggatatggaatggataatgtgtttcaccacctgtgaattctccataaatttaaagaactgaaagcaattcacaactatttatatcatttgtgtttcctgctctatcctgtgaattctccataaatttaaagaactgaaagcaattcacaactgtaatctgtaacagctatgttatctgtagcctgtgaattctccataaatttaaagaactgaaagcaattcacaactgtaattgctttgaaaccatgatcttgtaacctgtgaattctccataaatttaaagaactgaaagcaattcacaactgattatggattaattgcaactgatgatgccctgtgaattctccataaatttaaagaactgaaagcaattcacaaccttaaatttccgcctagcatgtacattttacctgtgaattctccataaatttaaagaactgaaagcaattcacaaccaatgcttaggtgattattgggagagtttcctgtgaattctccataaatttaaagaactgaaagcaattcacaacacttcacttaagaaccattttagagtccaatgttttgttacaagtccaaattatttatgatgtctttatgtgatttttaggttattttcagtagtcgaactagggcatctaaaatgcttccttttgaatttgttaatttttaaaggactaattaaaaaagtgaggttaaatagctctccaaattgttggtttttaacaagatggtttttggtaagaaaagttatctttgaatgaactattgattaacatgctgtcaaatgaaaaccagagtatcctttcttttattatttactagtttaatgtcattttctcaagtatttgactgggaaaaccctgaagttattgcaattaataaagaagcacctcatgcctattttgtttcgtatgactcagaggataatgccttaaaagatgagcttaattcttcacattacaaatctctcaatggtatttggcagtttaattggagcgagaattcagataaacgtgacaaaactttttataaattaaatagcaaggctttaaagtatagaataccagtgccttcaaattgggaaatgcatgggtttggatatcctttttatgctaacattacttatcctttttcaaaaaataagcctttagttcctcatgattataatccagttggtcaatataaaagagagtttgatattgatgcctcatgggctaataaagagatttatattcattttggggcagtaaaatgtgctttttacctatgggtaaatggaaagaaagtgggctatagtcagggcagtaaattaccagcagaattcaatattacgtcatacctaaaggagggtaaaaatgagttggctgttgaagcatacaaatttacagacgctagctatattgaagatattgacttttggcgtttggcaggaattgaaagagatgtgtttttacatgctcgaccaaaattaatgctacaagatttttttgcaaaaagtactttggatgaatcacttgaaaatggactaatggatttatctgtagatataaagaatgttagccctaaaaaatcagtaaaagttgttgttaaactctatgacggtgatacaattgtttatgagtcaacacaaaagcgctctgttaaaaagggagaggtgtctgaactaaattttaaaacctttatagataatgtaaaagaatggtctgcagaaacgcctaatttatataccctcctaatagctgtaaaagatagtgatgataaccttttagagtgtacgtcgcatcaaataggatttagaactgtgatgctaaaaaatggacaactattaataaatggacagccagttttatttaaaggcgttaacaggcatgaacatgatcctaatcttgggcatgtcatgaccaaagagatgatgctaaaagatattgaattgatgaaaaaattcaatattaatgctgttagaacatcacattatcctaatgatccctattggtataaactatgtaataagtacggactctatgtaatagatgaggccaatattgaggcccatggctacggttggattgtaaacgaagtcgcaagagatcctagttattataagtccataaccgatagaattcagcgtttgttttacagagataaaaacaatccgtctgtagtaatatggtctatgggaaacgagacaggaacaggacagccttttgtggatagctataattggttaaaaaaaatggatagtacgcgtttagtatcttatgatagagccgaagtagatccagattttgatcatgtgcgtcataccgatattataggttatatgtatgctccaattgcagatattaagaaagaacatctgccagcaaaccctaatagaccctttatttgggtggaatacgcgcattctatgggaaatagtacggggaatctaaaggaattatgggatttcgtaagaacagaaccaagagttcagggcggttttatttgggattgggttgatcaaggtcttactttgaaaagtagttcaggtgaagaatattggggatatggtggcgattttgagcccgaaggcaagcctcatgccggagctttttgtttgaatgggttaatctttcctgatagaacagtacagccggcactttgggaagtaaaaaaacagtatcaaaatattcatatgacggtgttggattctgaagatttaacgttcgaaatttttaatgaaaacttctttactgatttggctaaattcaatctagaatgggaacttttaaagaatggtttttcggtatctagtggaaatttacatctagaaggagcgccgttgtcaaagcaaagtattagtctaaaaaataatatcacaaattttgaagcaaatcaggagtatatagttaattttcattggaagctaaaagacgctcaaggcttgttgaataaagggcatgaagtagcaaaagatcaatttattatacaaaatccgaaagcgtttactacccatttaaacacttttgatgctattaaggttaaagaatctaatagtcaaatagatgtgataagtactaataacattattatcaaattcgataaattatcgggaaatttaattgcatatgaggttaaaggtaacaattggttgacggctccattagttttaaatacttggagagcaccagtagataacgatttgggagctaaaatgcctgagaaatcatttaagtggaaggatatagaatcgaatttaaaagcagaaagggtatcttggaaaaaattaccggataatcgtgttatggtgactacccaaaaatccaatcctgatattgctaacttttttgttaattacaccattgatgacaaaggaaaaataaaagtgcaatatgtgtttgaaagaacaggaggtacggggttaatgcctcgtataggaatgaatcttaaattgattaatcgcatgaaagatgtgcgttactttggaagaggaccacatgaaaattaccctgatcgcaaaaccgctgcttttttaggtatttataaggcgtcggttgaagaatgttatgtgccatatattcgtccgcaagaaaatggttatcgaacagacacaagatggttagaagttacaaatgataaaaatagtggcttgcggttttcaagtcatcagctcttaaatttcaatattaatcactttaataatgaagattttgagataacaggaaaaaacagacataccattgatattgtacctagaaatcatgtaaacctaaatattgattataaacaaatgggtgttggaggtgataccagttggggactattaccatatcaagactatttaatatttcccgagccgatgaaatatacgttttttattgaaccgattattaattagtcatgcttaataaatgtaataatagagtcagccgctgtttttaattcagtggacaatgtgtttttttgccatgggtgctttgtattgaacacatggtctgcgtttttaatgatttttaatttgctgttagcattccatttgtgaagctgataagcttcgtctatcaatacactggtatctgcgtctccatgaataatcaaataagggatttttaaatgttctacggctcgttttatggttaaccgtttctcattggctttaaaatcttcataaaactgatagaaatgtggcatgtgctgtttggttctgccatttatcacatattttacaccatcttttttccattgctctaaatcgcctagtgttgctgtgcgtttagcataatcacatacccctgctaagctcacaacgttggtaattctcgtgtcttcttctgctttaatggtaactattccgcctcccctactatggcctattagcgttatgtttgttctgtttatttctgattggaaatcggatgtattgtaaatccaatcaataacagttgttaaatcatccagttctttggagtagttgttatttccaaaggcttccaaatcgggaaaatctatgggttgctcaacggttccgccattgtgtgaaaaattgaatttggtaaagaaaaatccagctttagcaaaggcttcagccattaagtcccaagcaccccaatctttaaatcctttgtatccatggcaaaatataatgaggggtttagggtgttgggtttcattataatatatatcaatgagaataggtttgttgtgcttacccagaatgactatgttttttgtgacgttcatattaaagctctttttcaataaaatctgtgtttgtattgcaaatctctgtaatgagtttgtaaagttctttttcaaaatgggccaatgtttccgctgtaatcatggtgttttttgtacgacttgatgattgttcttttttagaaaatttcaagaaaccttgtcctaagtttttaaaagacacaataccagcttccaatggtaattgaacttgatttgatttgctcatcatataggcgtacgttaatacttgaaaactcttgctgtattttttgtagtctgttgttatatcttcccagttaaccacttctacttggttttgtaacacgctacctgttttgtaatcaataattcgggtaagcccattaaacgcatctacacggtctacaaaaccctttaatgttaccggaaaatctaattctggaatatggattttaatttcatttttagcttctattgctagtattttaatggtatttccctgttgcaaagatttcatttctaagtctaagaaattggaaatataacgtttcgctatttcgtatataatgaggtttttaccggtgtaaatgtctccttctttataaatgtttttaaaatggtatgaaacacgagcttcaatcttggttttaaaatcttttataagatctgtatttaaatactgcccaatatacggtgtgtaaaaatcctctaaggtattatgaaccactgtaccaagggtattggctgctacggtctcttcaacggtattatagtcttttatttttaaaacactttggtaataaaaatcaatcgggtttcttatgtaatttgttaaagaagaaggagaaaacccctgttttgccaactgaattagtgcttcttttaaagcagttgttttttttattgtttttaaggtcttctctatttttgggaccaaaggcgctacaatttgatgatttatctggtgtaagttttctaattccagttgtgttataaatcggcttttttctccgcctgttaatatatcggcttctgtgttatacagaataaaaatatttttagcgcgttgcaggagtctgtaaaaatgatacgtataaacggcatccttttctttgtaggtaggtaaaccgttttctaatttcacgtcaaaaggaataaaagaattatggctttttcctgctgggagaataccttcattaaccgacgaaataatcactgtttcaaagtcaagtacacgagattctagcatacccataatttgaagcccttgtaagggttctccttgaaaatctaaggtttcaatgcttaataattcctggtaaacactgtaaagcgttacgatgtcttttatatactgatgtttggcgtttaaacgttgtaattcattaaatagctcgttgaatcggaagagatattctaatgatagtaaatgagtgtctttatcttggtctaaatgttgcttaatgattaaaataagcttgtgacaactatttagcgcaatatccatgctattttgccatgatgaaaagagtaaatcaattattgtagaacattcaggcgccaaatcctttaaacgtgcattggtaatgtataccagattatttgtgttgatggtttctatgatgatattggcaaaatcaatctcatttaccattaataacggacgaatatactgatgcgaaataatgttaataacctctttgtaataatactttcttgaggtgtttttatgtagttgaaaaagcgcatcaaataaggaggccaggggtatggattttaaagggaaacccattgtgacattcaaattatcaacactcttgggtagtgaatttagtacaggaataagcagattttcgtctcctaaaactaccgctgtattctgtaaggtgtgttgttctacttttagttgatttaaaatagaaccaatgtgtttggcctgaccaatattttttggaataccgtagatagagatgttttttgcgttggaataattgtttgtaacccaatgaaatgggttgtttttaaagtaatgccagttttttttgtgttgacgcataaataaagcggcatcatgtttttgattgctcataaatgcatggtcaatatcccaatagatttgtgcctgattatgctctaaaagggtctgtattatagtttcttcagcagtatttaatgcgttaaatcctaaaaatacaaattgtttattgggatggttttttatataatctggtagttgttcaaccgcttgcctgtaaattaatccttgatagcctattccttgtttaatcaggtgattggtatagtgattatagtaaattggtagctttttccagaagtttaagtaagcagttacaaagtttgttttgggttcttcaagagaccaatgttttaggtcttcaatggcacttaaataattaaaaatatgatcctgaggaatgaggtaacgatcaatttcattgaaatcttgaaggagtatttgtgcccatttagaaaacgagtcgaaagtatcaccatctttttctggcgttaaaaacgaataggtattgtaaaactcaaaaagcaattctgtattcgtggtgcttttaagtaaagataactcttcaacaaatgcttcaatactcagtatagcgggggcaaagctggttgtttctaaagccgtatgaatttgatttttcagaaaaacacctgcccgtttactgggtagtacaaaggtaatttcagagaaattaacgttttgctttttaaggtcgtttaatacttcaaaaatgaaagttgtcatgctataaaaataaaaaacgcttcggatatccgaagcgtttttcaaaacgtttatttgtattttacttattttactaagttaatttcaacacgtctgttgttagctcttccagctcttgttttgttagtatctataggtcttgactcaccataacctttagaagaaagtctagcaccatcaataccgtgatcaactaagtaatctttaactgattttgctctagactcagataatttttggtttaatgactcagaacctacgctgtctgtatgaccatcaatagtgaacttagcgttagggtattcttttaagatatcaatgatgttttttaatacctcagaagattgagctttgattgtagattttcctgtatcgaataagatggttttagcataagcgtttaatgcttttttaacagcctctgtcacttcaggacaaccgttgttagcaacagttccttttacatcaggacataaatcatctttatctaacacaccatcaccatctctatctggccaaggacatccgttgtttgctgcaggacctggctcgttaggacatttgtcatcggcatcagcaacaccgtcaccatcagcatcaggacatccgtctagtgcttttaaaccagcaacagtaggacatttgtcatctttatctggaacaccatcaccatcagaatctggacatccgttaaattcagcaggaccagcttcgttaggacagtcgtctttactatcttcaataccatcaccatcggtatcaggacatccgttaaactcagctaaaccagcaacgtctggacaagcatcgtctttatcatatataccatcaccatcggtatcagttcctccaaatttaattgaaagcccaattgtgtgttggaaatgtttgtctaaataatcttcaaaggcatgtttgtaagacgctt

SEQ ID NO: 2181 - DNA, 24209 bp, synthetic construct
  misc_feature 1..24209: note = Synthetic
  source 1..24209: mol_type = other DNA
tgatttccggggtattaaaatcgggaataatcacaaaactaatctctgtagctctttttcctgcaacaatgcccggatatacagagccgcttttgatcaagctgtatcctgcgggctgctgatcagcgtaggtcatgaccagctggttggaaagattgttcagttcattgatcatctttctcggatctatttcgttattgatatattgcctgatatcttcttcagagacaaaatccttatgcagggcatacactgaagaatcgatgatggtgataagatcagagattccttcttcagaaccgatcataaattttgaaatgatttccattctttttttctgcaaaattatgacattaattcatgcagaaaggatacagatggttaagaatttcggaatcagcttcttttagtacagccgttcccggagaccttttaattccgcaaaaattaatcttaagaacaatgcggaagtaatccgtgaaaacattttcctttacaggtaaatatgatcatcatttccgggttgtttttgcagaaagaattactccggaaagtattcatctgttagaataaacaggaaaaaaactatggatttatataggatgaaaaatatgatgaaagagttctgataaaatatagaatccttcattattcaatcaggtacttctcatttttactgtgatcaatttccagctgtggaactccatcagtaacccggaaagcaaaaccttctatccatttttctttaggaagatcaatatcttcaccgttgagaatatgtttctgaaagaaataagagatgtcctgatccaggtacttttgaacaaactcaataaaaagctcgtctgtaaactttattttcttctctttacaggttttcagcaaatctcgcatcaaatcatctaaagattttttatagcgggttttcagtatgatttgattatcaagccaaagggcaaaaatagcgcctcgtctgtaagggattttttctacatttctgcttttccagaaatcatcctttattttataattaggaatatttctctcaggattcttccaatgggccttaaggatttcatgattaaacaatttttgccactcatccattgagaggtcctttattcttaacctgtttttgtaggtataataatcagtaaagccttcactgaaccaataattcagttcttcatgtttgttttgaatcgtatttccgatccactcatgcattaactcatgatgaaagagatacagataagaatccttgtcattgaaaggattattggttccttggattataaatgcatttttaatagcggaacctgtagtgctgtaacctttatataaactgtctttttgtgaaacagtgggagtcatgataacagtaaaataatcctgatcatagtctttccagaaatccctttgagaatgtatggccttcttcaggttagaaaacaggaaatcatcggtgaaaccgttactccattcatctctcaaagcaaaatagacaggcttatcatgtattgtaaaagaataaaacctgtaatcaccaccaataaataaagaattataaaagccgctccaaagagcagtcttaattttctgttgttgaacttgagatgcaaaattattatggagtgtgaatttttttgggaaagctatccattcaataacgaattgaaattcctgctcatccggcatctctgtaaaagagaccggaaccataaaaagattcttacctaaaacatgaaagaaagtgttgttgattctcggtcggttaaagattttatagctgggatcagtaaaatcctgcttaatatgatacaccagagaaaagtgagttccttttttctgacggatctttattttgttgtctttaggtttactctcaaatataatatcaggattgtcctcctttaacaaaacaaggtttttaaaaagctcattctcgccccagttttcatttgcataatagaaagataatgtatctgatgctttttttaatgtataatctacccgcacttttaaaccattttttgaaaggtcttcatcataatatactttatagctgattttattttgagaataagcaataagcggaagtataaatatcaggaaaattaattttttgaacatggattaagtcgttttcccaaatttaacacaaaaatctatagctgagattccgttttgaagtagaaaagataaaaccgtcagtacaggttatccatacaatagcaattaatacatcgataaaaatcggttcaaggatagaaatatgctaaaatttcagtcattttgcccaaacttttttctttgctactaggctggaattaccataaaacctatatttgcagcctaaatttttaaatataatgaaagaactaattgaaaaaatcaacgcagaatttgaagcgttcactactgaggcaaaccaacaagcggaaaaagggaacaaagcagcaggaacaagagctcgtaaagcagctttggaactaagcaaactgttcaaggatttcagaaaagtttctgtagaagaatctaagaagtaattcacctttagccggcttttggagccggtttttttgtgcattgaattgaggtcctttatactgaatccaaaattagcgttaaatagtattaaattattttaaaaatttatctttctttatacttctggtatatatttgcgctgtttattttaaaaactaataataccaataaccatgaagttcttttattttttatttattttctttttttatgctgtttctgcacagaaaataagaattgtagatgccgaaaacggaaacccggtttcaaatgccaggatcatactccgggatcagatcatttattccaatgaagatggttttgcacctcttggccaggatgcaggagattttgaagtttcagcctcaggatttcaaacagaaaaagttccggttttcattgcggagatcaagcttaaacctatttataaaaatattgatgaaattaagatcatcaatgtggatatcagaaaaatctttgatgatgtaagcaagaactacgataaacgttactacagtggaccttccctttacgatatcgtttataaagaaaaaaatcttgataatgataagctgttttttctggtaattgcagaagccaaattatggagtaaaagtaatcgctataattttaaagatggtatccgcaagaattatgatgatatccttcagatgcagctcaataatgtaaaatattttaaaaatgataaatccggtactgtgctttcaggaagaacagatgaattttctcacgaacaactgggcaattttttcttgaattatgagctttacagaatgcagcagcacctgaaaatgaaagagtgtaaatactcaggaaggctgctctttgaagaaggagatgagcaggtgattgcctttaagattcaatccgggaacggtgcgcagatggaaggggaatttaaatataacaaggcggataaggtgattacttattttgaaaatcattatttccagagcgattatcctaccatgaaaaaaacgggaacagatggccgggaatttatgtataagttgggtgatggcatccttatctttgacttctacaagaaagacggagtatatgttcctgcacttaccagacttgaaggagataaatttaccattttctacaaggatgaaacccatgtcagaaagttcagccgtgaaatcatctataacacttttaacaaaactgataaaggactcgatccgaaagtgaattttaaagtgagcatctgggaaaatgtacctgtgaaagaagaaaaaacagaaacaatattactttctgcggaagaacaggcatttgttaatcaaaaataatttttcctcagagatatacggtgaacttcacaaagggattgataatttaatttataaatgaggaaagtgttcagaatatccttctgtacgtacttttttatgtctgatttttcattatctccttaaattcttttatctttaagcaatcaatatatattatgaggttaaatagattttttgcagtgcctgcaataatgctggctgcccagttttcatgggctcaggtaaaggtagacccgaatgagaggcttgatcctatcgtaaaaagttttgtagatgaagtaaacaacaattcacagttggaaaaaatggcttacgagctgctggacgggataggtccccggcttgtaggaacccctgaaatgttggccgccaacgaatggagtgcggctaaactccgctcctggggagtagatgcccatcttcagcagtttggaacatggaaaggatggcaaagaggaactacccatgtagatatggtgtatccaagggtaaaatcattagctgcaacgcagcttgcctggagtccgtcaactaaaaaagcggtagaagcagaggtaatcattcttcctaaggtttctactaaagcggagtttgataagtggcttccttctgtaaaaggaaaaatagtgctgatggcacaataccagaaaatcggacgttctgatgagcagatcaaggaatttgcaacccctgaactctacgaaaaactgaaagcagaaaaagaacaggcagctaaagatttcagttcctatatcaagaatatcggctatgataataacacccttcctgaagctttagaaaaatccggagctgcaggaattgctatttcaaactggacaggaattatgggagccaacaggattttcggagccaaaacaaccaagattccgatgattgatatcgatgttgaagactatggaatgctttacagaatggctgagaacggggcacagcccaaaattaaaattgatgcacagtctaaagttcttccggaggctaaaagcttcaacaccattgggatgatcaaagggaaagagaagccggaggaatacgtcatcctttctgctcaccttgattcatgggatggagcacaaggagctacagataacggaaccggaacaattaccatgcttgaagccatgagaatcctgaaaaaatattatcccaataataaaagaacaattgttatcgggctttggggaagcgaagagcagggactaaacggctccagaggatttgtagcagataatcctcagatcataaaaggggtacaggccgctttcaaccaggataacgggacgggtcgtgtcgtaaacataagcggccagggatttgtaaaagcatatgattatataggaagatggctggacggggttccgaaggcggtaagaagtcatatcaaaacagatttccccggaatgcctggcggtggaggttctgaccatgcctcatttgtagcggctggagtaccgggaatttctttaggttctttgaactggggatatttcggctatacatggcatactacaaaagatacctatgataaaattgttttcgacgaggtaaaaaacaatgtggttttgactgcagcattggcttatatggcttctgaagatccggaatttgccaatagagagaaaagagtaatgcctcaggatgataaaggggaaacaataaaatggccggaagctaaagagccgagaagaagctcaaaagattataaataacaattaaatagtaatgattcatgtccgcggctgcttctgaacagaagcagccgcggtcactttaagtatattttacagtaaaaatccgtgttacaattaaacgtgaagcttaatttctgaaaactgtgagataaaaggctggtaatctgcagtatttaattgtccgaaaccatagctgcagaatataaacggcagattattatagagagcggaagtataatccgtttgagtatcacctatatataccgagttttcagggttcatatcattcctttccatgatcagcctgatattttccgatttcggttttccggtccggccatgagactcaaagtctttgaataaagggttaaacttataatagtctaaaaaggcttcaatatatccatcctggcaattgctgacaataaaaagattatgggtaccggcaagaagctgaagcgtttctccgactccggggtagagaacaccaccgtgttgacgcaatgcgatattttcatatcccgaaacttcagtaagaatacgctctgtctgctgatcggaaataccgggaacaatatccctgataatatcttctgtaagaagtcccatatactgattcagatcttcgggtctcatctcttcccgtagcaggttatgtttagctaaaacattattccatattttgatgatggtcgctcttgaatcccataaggttccgtccagatcgaaaattaaattcttgtaattcaatatatttttgtttaggtgttatgttcttgtttgtaatatttaataataggctcacttttttaaggaagctagaattgagtttcttttatttttcttgatgatgaaagaatagtgattagtgttttctcatgacggttgatgtactccattgttttatctgtaataacccggataagctctggtaatttaaatgggttatcatgcaaaaactgaagaaaatcaatatcagaaaaatcaatattataagattcaaaatttccgatgctctctatacctctccaccatccactgattttcatatcgggaaaatattctttaaagagtatctgataactattgtaaaaatccagtattccaatgaacaggtcattttgattattgctatagccactgaaagattccattccgaagcagataatttgtttatcatcttccctgtaatcttttaaactaaaccaaatgtgtgagttcttttcttctgctctgttatggttttcaaagaaatagtatctgtcttcatatattttttccagctctttttttagcccgtctctgattttattaagaatgatagcttttgcagaatgaaaattatctgagatttccttggcgctttttaaatcgcttaataataaactttttatttcatcactcatatcattattgatggtctggttggttaacttttttaccaaatataaatattgcttaatggtttctctcaagacaggttgattaacaacctgctggtggcattcttcaagccagtttttaatatgacttttataagttatcaaataaaaatctttattgacttctaattgtcccttacttttaccggagggttcattcccataaaggttcaaatacagcagtactgcctgtttgtaatgatttttatatctttcaagttgagatacctgatcaacggcataaattttattttcaatgatgattgtattgttaccatcttcaataataatatctatatatccacctgtttttctctcaggatctatactcccaaggtatttttcaatcgttactttagcattttcaaaattaaattgatggatgggctttaagcattctatctccttaaaaaacaattttagaaagacagaaccctgtccatgagagcctctaggatttaataattcaccaatcattgcagaatgggtatatctttcattggtttccatactcatgattgaaaaaatgttgaaattttctccacggatttgagctatatcatggtatttttttgaaattacagataccttttccaataaaccttttatttgtgataactgtatattactcatatttataaaatcatgctcaactgtactctttttcttgcctcatccacttctgttacctttaccttaacgtgctggtggagcttcactacttcattcacatcagatacatatccgtctttcagctgggaaatatgaaccaatccgctttctttgattcccaggtccacaaaacatccgaaagctgtaatattgttaacgattcccggtaagatcatgcctgctttcagatctttaatactttttacattgggatcgaattcgaatattctggcagcttttctcgggtctaatccaggtttttcaagttcctttaaaatatctttaatgcccaggattccaatgtctccggtaatatagttttccggttttatcagggcgattttttctttattggctatcagttcattggttgtaatgcccaggtctttagccattttttctacaataccatacgcttcaggatgcaccgcagaattatccagcggattttttgcattggcaattcttacaaacgctgctgcctgctggaaggccttttctccaagtctaggaacctttttcagttgttttctgtcttcaaaagcaccgttttcagtcctgtaattcacgatgttttcagccattttttctccaattccggacacatagcttaataatgatttgctggctgtatttaaattgatgcctacagagtttacacatttcatcacggtagaatccagttcgttttttaattgagtctggtctacatcatgctgatactgtccgacaccaatagatttaggatctatttttaccagttctgccagcggatcagatagtcttcttccaatggaaaccgctccgcgaactgttacatcataggtgggaaattcttctctcgcaattttacttgcagaatataccgatgctccggcttcagaaaccacaaaaacctgaatgggcctgtcaaaagcgatctttttaataaagaattcagtttcacggcttgctgttccgtttccgatagagatggcttcaatattataggcgttgaccatggaacggatttttttcatcgccattccgctttcgttctgaggagcgtgagggtagagggtttcattatgaaggaggtctcctttttcatccaggcaaactactttacagccacttctgtaacccggatcaatagccaggatccttttctctcccaacggcggagccaaaagcagctggctcaggttttcagaaaaaatttcaatcgcttttttatccgctttttctttcgcttcctgtaaagcttcattggaaatagccggctccagaagtcttttatagctgtcttttatggccagggcaatctgtgcagaactttcgttatcagatttgatgatagctttttcaataaaatcaatagcttcttccttgtcaattgccacattggtttttacaaagccttccgcttccgctctcaacattgctaaaagcctgtgagaaggagttctgttgaggttttcttcccattcaaaatattgggagaatttctgagcgtcttcttcatcttttttcgcctttaccaccttagagctaataaccgccttacgttggaatagacgacgcagattcttacggacatacatattttcattgatccattcggccataatatccctggctccctgaagagcatcttcctcagaagggacatcattattcagatattttgaagccagaaactgcagatcattgtttttttgactcataatgatctttgccagaggctcaagacctttttccttggcagcgtctgctttggtctttttacgctttttaaaaggcagatatagatcttccagttcctgaatatcaaaactgtcctctattctttgttgaagctcaggcgttaagcctccttgttcttctatagattttaaaatagattcttttctttttacaatctcttcaaactgtttgctgatctttgaaatctgttcaatctgggtttcatccaggtttccggttttatctttcctgtaacgcgaaataaaaggaatggtgcagtcttctgctaatagttgtaaagtattgctgatgctcttctcagaaatatcgagctgcttctgtataaatgctacggttgtcattgtttagttttcggatagctaaaataggggtttaaaaagaaaaaggcgagttgccccgccttgaatgttttcacaacggaataatccttattgtgaagtgctttcaaaatttatcaatcaaagatataaaatcaaaatcaaaatacaatacgggaaaccgtaaatggttttctttttttcttcttacatttatgaaatactaataacaaactgctatggtggaaagaattttaggactcgacttaggagtttcttctataggctgggctcttgtagaggaagatgtgaaaaatccggaaaataacaagattataaaattaggagtaagagttaatcctttaacaatagatgagaaaaccaattttgaaaaaggtaaatctattacaactaatgccggacgtacttcagcgagaagcgcccgtaggaaccttcagcgttttaaactgagaagaaaaaaattattagagattttaattcattataaaatcataaaaaacgatgctgttctggctgaaacaggtaaaaacactactttccagacgcaatatctaagagcaaaagcggccagagaaaaaatagaactggatgaactggcaagggttcttcttctgatcaataaaaaaagaggatacaaaagcagcagaaaagtccaaaatgatgatgatggaaaagctattgacggattatcagtagcgaaggagttatatgagaaaaattataccccgggtcaatatgcctatgatcttttaaaaagagggaaaaaacagattccggatttttacagatcagatcttcaaaatgaattggatcgtatttgggaatttcaaaaacaatatcatcctgatattttaaccgatgaatttaaaaaagaacttgaaggaaagggacagagagcaactgccgctatttttctgaatcgttataaaatttacactgccgataataaaggaacacgggaagagaaaaagattcaggcttatcagtggcgagtagaggctctttctcagccattggatgttaaagaagtggcatatgtaattgcggaaattaataataatcttaataattccagtggatatcttggtgcgatcagtgatagaagtaaaaaactatattttaacggacaaacaataggagaatatctttttgaagagctttcagcgaatcctcatacccgtttgaaaaatcaggtgttttaccggcaagactatcaggatgagtttgaaaagatctggaaaatacagacaaaattccatcctgaattgactaaggaattgaaagaacaagttcgtgatattgttattttctaccaaagaaagctaaagtcacagaaagggctgataagtttttgtgaatttgaaagtagagaaattgaaattgaagaaaatggcaaaagaaaaaggaagaaggtcggattgaaagtagctcctaaatcttcacctttatttcaggaatttaaaatctggcaggttctcaataatatagaaataaagaatgaagatgaacgaaggtatttggagccggaagaaaaagaactgcttttcaatgagctgaattgtaaaggaaatcttacttcacaaaaatgcctggaacttttgggttttaaatcgaaagatgcaaaacttaattttaaagttgtggaaggaaacagaaccaatgaaaagttatatgatgcttttctgaaaattctggaactgcaaggctataatgtttttgagcttttaaaaataaaagaggataaggatgaggctaaattatctgaactgaaagcttctgctgacgagattaaagggatgataaaagagatttttaatgcaaatcttattaatacatccattcttgattttaatgcagaattggagggaaaggattttgaaaatcaggcttcttatcagttttggcatttgatgtattcttacgaaggggataattcgccatcagggaatgaaaaattatatgaattgctggagaagaaatttggctttaaaaaagaacactccaagattttatcaacgattgttttttcacaggagtatgggagcctgagtacaaaggctatgagaagaatttacccttatattaaagataataagtatagtgaagcatgtcttcttgctgggtataatcattctaagcactctttgactaaagaagaattggaaaacaggaaattaaaagagcaattggaggttttacctaaaaattctttacgaaatcctgttgttgaaaagattttaaatcagatgattaatcttgtgaatgctacaatttctgaatatggaaagttggatggagttagaatagagctagccagggagctgaagaaaagtgcacaggagcgtgaagatatggcgaagagtattaatgaagccacactccttcatcaaaaatatgcaactattttaaagcaagaatttggtgttgttaatccatccagaaatgatattatccgatacaaactatatatggaacttaccgttaacgggtataaagatctgtatactaatactaaaatagaaaaagaaaatctttttacagataagtatgatatagaccatattattccacagtcaaggttttttgatgatagtttttctaacaaggttttagttccacgacagtcaaacttagataaaggaaatctgactgcgtatgattttatgtctaataaagggagtgaaagagaagaacatttcctgaatgtaattaaagaattattggataaaggcagtatttcaaaagcaaaatatgaaaagctaaagaaaaaaggattagaaataggagatggatttatagaaagagatttgagagatactcaatatattgcaaaaaaagcaaaagaaattctttttgagattactaattctgtggtaaccacttcaggaagaatcacagacaaattaagaaaagattgggatcttgtcaatatcatgaaagaacttaatcttgataactacagaaggttaggtttaacagaaattgtcagaaattcaaaaggagaagagaaagaactcattccggattggacaaaacgtaatgatcaccgtcatcatgcaatggatgctcttaccgttgcattcactaccagaaatcatattcagtatctgaattatcttaatgcaagaaaagatgaaaagcataaagaacaccagaatatttatgctattgaaaatattattacagaagtcattgagaaaaaaaatggttcaaagaccaggagatttaaggctccaatgaatagtttcagacatgaagctaagcagcatctgaaggaaatattggtttcacataaaactaaaaataaagtagtaacctcaaatatcaataagactaagaaaaaaggagggattcataaaaaaacagaacttaccccacgaggacagcttcataaagaaacggtgtatggcagcaagaaatttctacaatcgagagaagaaaaagtatctgcaaagtttgactatgaaactatattaatggttgttaatccaatacatagaaatgcattactgaatagattgaaggaatatggaaacgatcctaaaaaggcattctcaggtaaaaatgcaataaataaaaaccctgtttacttggatgattctaagactgatattctttccgaaaaagttactctttcctggtacgagaccgggtatactattaggaaatctgttacgcctgataattttaaagactataagaatctggaaaaaataacagatcttggtataaagaaaattttaaaggaacgtcttgatcaatttaaaggaaatgcaaaagaagcattttctaatctggataaagatcctatctggctgaatgaagaaaaaggaattgcaataaaaaccgtaacgattactggtgtgagtaatgctgaatccttacactttaaaaaagatcatttgggtaaagaaattctggatgaaaatggaaataagatccccggagattttgtaagtactgggaataatcatcatttagctatttacttagatgaagaggaaaaacttgatgataaaatggttacattttatgaggcagttttaagagtaaatcaaggtttgcctgtaattgataaagactataataaggagaaagggtataagtttttaatgactttgaaacagaatgaaatgtttgtatttcctaatgaagattttgatcccaacgaaattgatctacttgatgagaggaacttagagcggatatccaagcatttatttagagttcagaaaatttcaaaggttgggtatggaaattcttttgtcagagattttgtattcaggcatcacttagaaacaaccgttgaagagagaaaagaactgcggaatataacctatatacagcttaaaagccttgaaggactaagaaatattataaaagtaagattgaatcacttgggaaaaatagtacaaataggtgaatattaaataattactatgataactcgatctatatacattggtaaccctgcctatctaaaacttaaggatgaacagatgtatattctggatccctctaccaaagatttgaagggtaaaatccctgtagaggatcttgggttgctgatgctggatcattttcagatcacaatctcccatcagctgattcaaaaaatgatgggaaataatgtagttgttataagttgtgatgctcatcatcttccccacggaattatgcttcccatatatgggcatactgaacattcggatcgtgtaaaagatcagctggaagccagtgaaccattgaaaaaacaactctggaaacaaactgttgaatgtaaaattgaaaatcaaaaagaagtactgagacggttgggaaactattatgaacccatgacagaatatcatagaaatgtaaaaagcggtgatagtacaaatatggaaggaattgctgcacagcattactggaaatatctgatcagtcttgattttttaagggcccgttttggtgattctcccaatcagtttttcaactttggatattctgtcctcagaagtatagtggccagggcaattgtagaaacaggattattaccggttctcgggattttccataaaaataaatataatgcttattgcctggcagatgatcttatggaaccatttcgcccatttgtagatcttttagtgatgcaatggcttgaaaggaaaccggaaacagaggagttggataaagagtttaaagcgcatatccttaaaatagcaacggtagatgttggaattgatggaaaaacaaggccgcttcttattgccgtaaaaatgaccgcttcttccctttataaatgttatacaggagaaaaacgtttgatctcttatcctgaattactatgaacgccgaaaggtttaatgcataccgtattatgtgggtattggttttatatgatttgccgactgagaccaaagcaaatatgcgggatgccaatttgttcagaaaacgcttgctggatgatgggtttacactttttcagttttcaatgtatgtaagacattgcccaagccgtgaaaatgctgaggttcatattaaaagagtaaaaaatatgcttcctaaagctggaaaagtcgctattatgtgtattacagataagcagtttgcagatattgaaatcttttttgccagaaataaagaagagccacctccaacgtttcaacagcttgaattattctaatttttaaatcctaaataaataataaatccgttgaaattcaacggattagattttgaggctgtgactaatcacgaagataataaattttgaaagcacttcacaacttttaaataaaaatgggattaatactccatgctgtgactaatcacgaagataataaattttgaaagcacttcacaacgccaagatcaaaggtttgatcaggatattcgctgtgactaatcacgaagataataaattttgaaagcacttcacaacagtaaatggattgtttgaaagtctggaaaagctgtgactaatcacgaagataataaattttgaaagcacttcacaacgatctaatatgcattattaacccagggagcgctgtgactaatcacgaagataataaattttgaaagcacttcacaacatgatagtggtataaccattgattcacttagctgtgactaatcacgaagataataaattttgaaagcacttcacaacattatcaagaaattatatcaagtgccaatggctgtgactaatcacgaagataataaattttgaaagcacttcacaaccaaggaaacaattgattctggagactatggagctgtgactaatcacgaagataataaattttgaaagcacttcacaactgtgatttgagcgtctcacacaaggagagggctgtgactaatcacgaagataataaattttgaaagcacttcacaacagtgatgatgaatatgatttatctatatatgctgtgactaatcacgaagataataaattttgaaagcacttcacaactggccagagactcagaaatatgaggaatacgctgtgactaatcacgaagataataaattttgaaagcacttcacaacttcaataggttcatccttcagaaatcgatcgctgtgactaatcacgaagataataaattttgaaagcacttcacaactcaacctcgtatcttatgaatgccgtttcagctgtgactaatcacgaagataataaattttgaaagcacttcacaacaggaagaaatagcagcacaacaagaaactcgctgtgactaatcacgaagataataaattttgaaagcacttcacaacacgcagaacaatgtattgacgagttagaaagctgtgactaatcacgaagataataaattttgaaagcacttcacaacacgcagaacaatgtattgacgagttagaaagctgtgactaatcacgaagataataaattttgaaagcacttcacaaccacgaaaatatggagtggttcacccgttccgctgtgactaatcacgaagataataaattttgaaagcacttcacaaccattagattactcgaattctatatatgcctgctgtgactaatcacgaagataataaattttgaaagcacttcacaactggacgctgcaatctataatcttccgggatgctgtgactaatcacgaagataataaattttgaaagcacttcacaacttacatttacaaagtcaaatcaaagtaacagctgtgactaatcacgaagataataaattttgaaagcacttcacaacaacatgcttcgggtccacaaactgcatcaagctgtgactaatcacgaagataataaattttgaaagcacttcacaactgacgatgaattgacaaattgggcggaattgctgtgactaatcacgaagataataaattttgaaagcacttcacaacgagcgccacgcgaagttggtacaggatgaagctgtgactaatcacgaagataataaattttgaaagcacttcacaacaggttgcatataccggaaatcaatttttacgctgtgactaatcacgaagataatgaattttgaaagcacttcacaacaaggtattgcagatccttcgtcttattctggctgtgactaatcacgaagataataaattttgagagcacttcacaacaactctgtcaatattcatagtattttctgtgttgtggttaatcacaaagttagtgaatttcaacccaataaagtccctagctcaaagcaagggacttaactcttgctgatacattcgaattattctctgtttttaacaagtacccagccgttgtacctgactgaggtgttggcattgttattttcattccatgagattgtgtaccaataggtggcagtaggaagcttcttgccaaatgcggtgccgtcccatttgaagtttcttattttaccggcctcataaagcttatttccataccggtcataaacttcaaaaataaggtttctcttgtaagccagggctgaataatcaatattatcatttttaccatcttcgtttggagtaatggcatttatcaggttaggaactgtaatttctgctgctacgggaacgcagttgtattgatcttttacatagaagatatgttgtcctctcgtaagattcgtgaaaatattaacatcctgccacttaccggtctggtccgcagcgtactgatacggaggagttcctccggtggcattgattgtcgctgtattattgataatgtcaattgatttgataacaggattaggagaagcatggacttttaccgtttgtttagtggtacattctccagattttaaattaacccaataggtaccaacccctacattggtgatctgctgggttgtggctccggtactccataaataggcattgaagccgggaccggcatcaagactggttttatcctcaatacagattgttttatcaatcaatacagatgaagttttgggtgggataacctctaaagttacttttgctatcgaaaaacatccgttactgttggtgaccctgatgtagattgtgctattggaggcaatatacgaagcaggatttgcagtaatttcattcgttccgttcgtggcatctgccagtgatgggaaataccgtttggtaactcctgtctcagacgttacattggctgttgtaagattaaaagaagctgtagaagggttattttcaatataacatgatttcacggtagtatcattgactttcggaaggctgcttaccgttacagtagttggctggctgattgcattgcattgtgagtttaagacagagccctgagggcctgctttaaacctgattaaataattaccggcaggtaaccccgcagaattgaatgtgtaattaggattatgagtcggcgttccctggtctatccatgttgttccaccatcactgctatattgccactggtattccacagggttgtatgagcttcccgtaagggtggccgtaaaatctacagtagcattcttgtttggacacaacgtggtgctggagccgggcagtgcctgcatggtggccggaacacaaggctgcacagtaatgtcatcaatcgccaggtcattaccacagccattaccaacagagttgttgataaactgaagttttacggatgtgctggaagcattgttgaaaataatagagtattgtgtccaggtttgattggtcggaatatttcctgtggccgaagtacccagcgtgttacctgtggccggatcaattgcccggagtgtaacgttgggatattgatatcctgtaccgcaggtgccgggagggttaacattgagaatccaaacagctaattttaaagtagtgtttggacaaaggttgctcattgtatattcaaaaaaaatggtagctgctgtagacggtgcattaatcagcatcatcagcccattgggattcccggtatgatcagcggaatttaaaaaaccattgcctcctgtacttggcgtttttaccaatccggaatagccatccgccaaagcgcctccaccgggagggcctgccgtacctacaaaaatagttgaggtagtggcgcctggagcataagtggataatggaccataccatttatcagttacgttgccctgtccgaaagtttgattcacaatcgggggtccccatgttccggcacaggttggaggagcttgcgcattaagttgcaaaacgctaaaaatcaaaaataagaaaaccaagatagaaccggctttctttcctgaaagtaatgttttcttcatatcttaaagtgtgtttttttaatgatattatatcacaatggttatgtatttaattgatttaatatcgaaattttaatacttaattaaaagttgtagtaaattttcaaggaagttgatgtttttagtttttatttatgtttttattatttattttagttaattatttgaaatttaattgtatttaaggtgttttgtttgtgaatttacataaaaataatgatattttttaattaattatctttttgaaacttctatgtcaggatggtgattttaaatgaaaatagatttaattagaaagtaaaaagaaataaaaatttcatttcttgatatatgttaagataccggacaatagctttctctatttttgtacccgaaaacaacaaaaatttcgataaacttttaaaacaattcaataatatgaaaaaacttagtgtaattgcattagtaggagtaggattgctggcagcatcatgtaatagcaaagaaaaatcagatacggctgtagctacagaacaggctgttgcagaaagcaaaggtgaggtattggctgtagatacaacggcttcagtagtaaactggaaagccttccacaaaggtggtttcgcgcctcgttggggaactttaaatataaaaacaggtgatctaagtatcgaaggcgggcaggttaccgctggaaattttactattgatatgacctcaattaaagtagatccggcttcagtaacagaaaaagataaaaagcctgcagatcttgaagcccacctgaaaaaccctgacttctttgatgtagagaaaaatcctgtttccgactttaaaattaccagcgtagccgatttaaaagaagctcctaaagatgcagttgcaggagcaaacaaaacagtaagcggaaaccttacactatcaggaaaaacaatgaatgtaagcttcccggctaaagtagatgtggcagataatacagcagctattcaggctaaatttacagtgaacagagcagattggggaatcaaattcggaacgtcagaagcagatcctgctgaatggatgatcagcaaagacatcgaaattgcaattgatgtaaaagctaaaaaataaggtattaaacaaaataagttataaacccttgataacaattgagctgccctatgaggcggctcttttactttttcagattcatgactaaattaagtagacaaaaatcaattcaattcccatgaatcctgaatacggacaccgtattcacttccaaggtacaaaggatttccatgtttttcagaccagaatccatcgaggatatctttactcaggcaacggtatacggcaactcctttgtagattttggaatcgtctccttcataattgaaattaatgactaaaatatggtctttgtaaaatcctgtaccgttttggatgtgatttccaataatccaccgggcaataatacggttgttttcatcaacggataatgttaatatgccgcggtaagtagcttcggaagtgtcttcctgattgcttccctcaatagaaaaggttccggccagatcatgtattgtcattggtttattgtatggagaagcaaaattaaaaaattcctgctcatagtaacatgcaatcgtgtcaatatctgaaacatctctgagggaacttttcattaaaaactttatttttgctgcaaattaattgtagatgattccttttctgctgatcgctaactttattacattcggggtttttggatttgacaaatggcaagccaggaaacaccagtggagagtttctgaaaatgcccttttaggactttcattcatcggactgttaggggcagcttcgggaatgattatttttaaccataaagtttccaaaaaatcatttcttgtgaaatttgttctcgttgccgtcattgatgttgtactgctttacaggctgataagacattaatgagtactggctagagccttttttgatgtatcttaactttttttagcaatctataacaggcaggcggcattattttttctgtgttattaagataacaccttaaatcataatatcatgtcaaaaaagattgcaattctggccacgaatggctttgaggaaagtgaacttcaatcaccaaaagagtatctggaacaacaggggtggactgcgcacattgtaagtccaacttccgggacaataaaatcctgggctgaaaaagattggggaaaagaatataacgtagacaaaaccctggatgaagcatctgcttctgactatgatgcactggtacttccgggaggagtaattaatccggatcaattgagaaccaatgatcaggctttatcatttgtgaaagatttctttatacagaataaacctgttgcagcgatttgtcacggacctcaagttttaatcaatgcagaagttgtcaacggcagaaatatgacttcagtaaagtcaatcagcaaagaccttatcaatgccggagcccattgggaagataaggaagttgttgttgacaatggattggtaacaagcagaacgcccaaagaccttccggccttcaacgccaaaatggtagaggagttcaaagaaggaaaacatgcggaacaaggcgtatagcccacgctgaaataataaagcccggatatcagatccgggctttttatattaatttttatccattgtctggacaggcccttgaaaatgaaccgtactacatttttatttttaataatgaatgtgatatattggtgcaggaattatattgaaacaaagtacaattgaacattctgcagaaccagatgtagctcgtttttttcaatatcccaaagtagccgtatctaaaattctcattatgaaattgttaaatattgcataaactttttaattaattcatttaaaatcactatttttgcacccgtaaaaatcctatatgcaaaacattagaaatattgcgattatcgcacacgttgaccacgggaagacgactttggttgacaaaatcatccacgctaccaacattttcagagaaaatcaggagagtggagaattaattatggataataatgatcttgaaagagaaagagggatcaccatcttatccaaaaatatttctgttacctataaagacactaaaattaacgtaattgatactcctggtcacgccgattttggtggggaagtagaaagagtattaaaaatggcggatggagttattttgttggtggacgcgttcgaagggccaatgccacaaacaagattcgtacttcagaaagctttggaactgggactaagaccacttgtggttatcaataaagtagataaaccaaactgccgtccgaacgaagttcacgatcaggtatttgatttgttctttaaccttgaagctaccgaagaacaactggatttcccaactttctacggttcttccaaacaaggctggttcaatacttcattagaacagactgaagatattttgccgttattagatggtatcttacaatatgtacctgccccaactgtaactgaagggaatcttcagatgcagattacttcccttgattactcttctttcttaggaagaattgcaatcggaaaagtaaccagaggggagcttaaagaatcccaatggatcggtcttgcccaggcagatggtaaaatcataaaaggaaaagtaaaagaactttacgtttttgaaggattaggaaagaaaaaagtaaccgaggtacaggcaggagatatctgtgctgtagtaggtttcgatgcattccagatcggtgattctttcgtagatcttgaaaaccctgaaccattggaaagaacggctattgatgagcctaccctgaacatgacgttctctatcaacaattcacctttctttggtaaagacggtaaatatgtaacttctaaccacctgaaagaaagattaacaaaagaattggagaaaaaccttgcattaagagtccagcagactgatgatgccaatactttcctggtattcggtagaggtattcttcacttatccgttttgattgaaacaatgagaagagaagggtacgaaatgaccatcggacaaccgcaggttatcttaagagaaatcgacggggtaagctgtgagccttacgaatctttagtagtagacgttcctgaagaatatgcatcaagagttatcgatctggcaacacagagaaaaggtgaccttcatattatggaaaccaaaggagaaatgcagcacatggaattcgaaattccttcaagaggtctgatcggattacgttcccagatgctgactgctactgcaggggaagctattatggcgcaccgtttcacggaatataagcctttcaaaggagctattccgggaagaaacaacggggtattgatcagcaaaaccacaggtcctgctacagaatattctattaataaactacaggatagaggtaaattctttgttgatccgggtgaggaaatttacacaggaatgatcgttggagaacaaaataaaccaggagatcttgtggtaaacattgttgaagcaaaacagctgaacaacatgcgtgcagccggaaaagataaagacaccggtgttgcaccaaaaatccttttctctcttgaagaatgtatggaatatatccaggctgatgaagctattgaggttactccgaatttcatcaggatgagaaagaaaatcctttccgaagaagaaagaaaaagagt

SEQ ID NO: 2182 - DNA, 24206 bp, synthetic construct
  misc_feature 1..24206: note = Synthetic
  source 1..24206: mol_type = other DNA
tctcactcttgtctatattatttttattgtttgaaatgattattgttttttatttatgtaatttaaagagcatgcaattcctccctttcggggaggttaagagggtttcttttttacggagtcgtagaggaaacctctaaaactttaccgttataaaatttatttcctgttaaagaaaaatcatagatataagcggccatctctaaggcagaaagtggcgctttataatcaggaaaagcttctgctaacatttctgtttgcacagccccaagtgctaaaacattaaatgcaatttgttgtgctttatattcttctgctaataattctgataacgtaattaccgcgcctttggcggatgaataggctgctaaacccggaaacttcatgcttccttgaacaccgcctatagaactaatagttactacatgacttcctttttgtaaaaacggaattaaattttttgttaattctgcaacgccaaaaacatttactttatagacctctaaaaaatcatccgaagttaaatctgtaaaaggtttgttgatcagtttaccagcattattgattaaaatatcaacttgtttccaattttttttaacaaaatcggatactttttttatatcagaatgattagaaagatctacagaaagcacagaaatatttgggtgatttacagtcgttaagggggcagtgtttctagaaactgctaaaacttggtgccctgcatttgcaaataattgtgctagttcaaagccaattcctctacttgttcctgtaataacaatgtttttcatttaaattaagaattttgaagaagcaatctacttaaattttcatacatttaaaaattaaaacccaacaaatgaaaaaaacaatattactttttttagcactttttctttttcagaatttagcagcgcaaactacctatattttatgcggaaaattgattgatacaaaatcaggaaacattgatgtagagaaaacaattttagtaaaagaaaacaaaatcattgatgttatggatggctacatcatgccaaaaggagcaactttaattgatttacgagacaaagttgtgatggcaggtttaattgacatgcatgtgcatattgagcaagaatttgatagaaacacaagattaaatgaatatattttaaacgaggcagatgttgcttttaactccgttggttttgcaaaaaccacgcttttaaatggctttacaacggtaagagatttaggcggaacgggtgtgaatatttcgattagaaatgctattgaccaagggaaaattcctggaccaagagtttttaccgcggggcaatctctggctacaactggggggcatgcagatcctacaaatggaagtagcagaaagttaattggggatccggggccaaaagaaggggttgtgaattctgttgaagatgcaaaaaaagcagtaagacaacggtataaaaatggagcggattgtattaaaattacggctactggtggtgttttaagtgttgccaagtctggtgataatccgcaatttacactagaggaaatcaaagcaatttgtgataccgcaaaagattacggaatgcatgttgccgcacacgcgcatggagatgaaggaatgcaaagagctattattggtggtgtaaaaacaatagagcatggtacgtatatgagtgatgtaaccatggagttgatgaaaaagtacgatgcgtatttagtacctacaattactgcaggaaaagaagtggaagagaaggcgaaaatagccggtttttatcctgctattgtagttcctaaagcgttggctgttggcccacaaattcaaggaacctttgccaaggcgtataaaaaaggagtcggaattgcatttggcaccgatgctggtgtttttagacatggcgataatggaaaagaatttggctttatggtggaggcaggaatgccagtgatggaaaccattcaatcagcaaccattacgaatgccatgttgctaaaaatggaaaacgaaatcggacaagttaaaaaaggtttttttgcagatattattgccgtaaatgacgatcctaccaaaaatatttctaccatggaaaacgttgtctttgtgatgaaaaatggggttgtttataagaagtaagtttgcttcgtatatgtacgattgcgcatgcagaaattcaagttgggttgtttgatagttaaaagtatttttgacctcacaggctccatgtctgaacttgtttcagtatctaacctgcgaggtctttctaaagttgtattcaaaagtaatactttggtacactctaatatcaagatttgtatttctaactatttaatacacatcaaatataaaacactaaaatgcccaaggctagtgctcgtttttaacgagtaccggtatagttttgatgttcttgctggcagactggtgtaaaaataatccgctaggaaataaagtcttgttttaaaccttataaaaatttctagacctcacgggttccatgtctgaacttgtttcagtatctaacctatgaggtctttttaggtattattcaaaagtaatatgttggtatgcaccaatatcaggatttgtagttctatcaattcctaaaagatcaaaagaaaaagaagtaggcgttgctttgttgatggcatctgaagtttcaccaataataaaatcttcatttctagagtttctaaaagctaaaaatccgtttaaaatattgtttttataattagtattgttttcaaaatctaactcaacattaccttcaaatgaattatttgagtcggtaaacgaaatcatacaattgctaattttatacttgaataggccgccatcaactttatctaaaataaattcaatgttgttgttgccatcaaaaatacaattggtaaaattagctgcttttaaatctctagtttctataatttcttgtccgttttcatcgttatacacaaagaaattgtttactaaaactgcaggtaattgtcgaatgccacgattccaataattagcaaaagtactatgtgtaaaattataagtgccgccaattgttgctgccaaagaggcctgacccgcagaaccaatcactacattatggccttcaatattggtttctcttgctaaaattccgaaattagaatgattgtaaatttctgtattttgcagttttaaagtaggcgtagaggtagacccaatactgtcaataagaattcctataattccgtttttaatttgtgcgtgatgcacttcattatttttacttcctgcacgcatccagatggttccccattgtcctggaacattcctaaaaccattttctagtcgatcaccttcaaaagtaactttttcggttaaagttccgttcacttttaaggtagcttctttgtcgataattaagccagagttgctatgaaaataaactttagatcctgcttcaatcgttaaagtcttattggcagctaccgctgcatacccataaattacagttggttttgtgttggtaatagttaattctgcatccgttaaaaatcgacctttaattgtggttgcctgtccgttaatcgttaaactatcaatcttcatggttattgggtctttgcccggaaaaataaaattagcatcttgtaccaaagttaccaaatctacattttgctgattgctacctgtatcaaacaaaatgcgatctgtgtataaaggatctgcaatattattagcatcaatggtggtttcaacaaaaacaaaaatactgtctttaccaagaatattaatgtcgttaaaatccttacccggaatgccatcaacatttaatctatatttagaaagagagcctttttctagcgcaattttaggaattgtaatggctttagtacctctattgtacacttttaaattataagtagcagagccaatattggtaaaaacggtgtctaaaaaaacggtgtctttagagaactctaaactcccaaaattagggatggtagaaaaatcttttctgcaagaacttaccgaaattagagcaatacaaataagaaaagtaaggaggtaacgcataattttgttttctttctatgagtgcgcagttcagaaattaatgagtctcgattgcgccctgctagatattttatttaactagaactttaaaattagaggtttattatttcttaaccaattcaatttcaaaaagtttcccccagtttttaccagtaacaaacaatctgttattttctttgtcaaaagcaatgccgtttaaaacttcatcatcggtaactagtttttgagttttttccatttctttttttaaacctgataaatttacaatcccttctacaactccagtttcaggatttataatcgaaatgagaggctttaagtaataattagcatagatttttccgttgatatattctaattcattcagtttcggaatgctttgcttgtgggtgtaggcttgaatgtattttatttctttttttgaattagaatctaaaaaccaaatttttgtagttccgtcagacttaattagcaagctaccattgttggttaaaccccaaccttgttcgcttttatcataatcaaaactactttcttgctcaaaagtttctaaattatacacaaaaccttttttgttttcccaggttaaccagtaaattttattgtttaaaatggtcattccttccccaaaatattttttatctaaatctacagattttaaaactttaccagtcttataatcaacctttcttaaggtagattggcctcttctgccggtagtttcataaagaaacccgttataatattctaaaccctgtgtgtacgcttttgtatcatgcgggtaggtattgataattttatacgtgtaggcttggtaaggaacatctgcaaagacttcaaaaaaattattgattttttttgtttttccggggtaaaaagctagtgcagaaacttgatgtttaccaacgccataatcagctgttttaatagttacagtattgccatcagcggtaatttcttgtccgtttataaaaaactgaattttatctaaaggtttgttatttttttcggttaaactaatggtgatgcttgtgtttaaagtcgttttttttgcaacctctaacgtaaatttataattttcattacaaccaaaacagacacataaggttaaaatggttataaaaaaggcaattttcttcattattttttaatttaaatagatatcaatagtgcaataaacctatcatttaaagcaaatgtaaaccgttttttaaagaatatttttagaatatcaaataaaagtaaaataattatttttaaattaaaaaatatcgctagatttgcatcctcaaaatagtaatatttagctatttagaagattaagtaaaatcttaccaactttacttattgcaaacataacattaaagatttaaaatattataaaatgaaaaaaggaattcatccagaaaattacagaatggtagcatttaaagacatgtctaacgaagatgtttttttaacacgttctactgtagacactaaagaagttttagatgtagacggtgtagagtatcctttagtaaaattagagatttcaagaacatctcacccgttttacactggtaaatctaaattaattgatgctgcaggacgtatcgataaatttaaaacgaaatacgcaaaattcaaaaaagactaactcttttagaattttcaatatatttaaaactccaacatgtatttgttggagttttttttgtgctgaatttgtttcatcatctttcctttttgacatccaatttttctataagaatcatactttctatgcaacaatgctttctacaaaatattttgggcgttcccttgcaggtcaggctttttgttacaatctttttgttcatacttcacaaaaaggattttcactgcaatccttaacgcagctataaacaaaggtaattgcaaaacctcaagcgataagattacttttaaccttttaaaatcaagcttaaaaaatgagaaagacgatacttctatctttataattgcagcacttttaataggtgcattcgtttatttttttccagaaacggatgctattattttacgctctatttcaggattgttaaccattataacaattcatgatagcatacaaaccagacatcctttatcaagaaattttcctttaattgcccatttgctaagtttgcttgaaggtaatcgagaaaaaatttagcaatattttattgaagataatttaaacgtaagccctatcaaaagagaaaaaagaagtatggtataccaacgttcaaaattagagaaagatacagttccttttgctacgcaacataatgtgtataaaaaaggatatgagtttgtaaaacacgcgttgttctctaaagatcatcatttggttggttggtgagcgcattatttttggttctgataaatggcccaaaaatagaatggttctatgagtaatatttctgcaatgttttttggttctttgagtaaaaacgcgattatggcattaaataaaggtgcaaaaatgagcggttttgcgcaaaatacaggtgagggcagaatttctccatactatttgcaaggatgagatgtcattttttaagtaggtataggttcttttggatcaagaaaatctgtaaaccgaaaacgtgtttttgatgatgaggtttttagacaaaatgccatttttccatcggtaaaaatgattgagattaagttttttcaagacgcaaaacctgggtacagaggtattttacctgccgtaaaatacactagaaattgcaaaaatgagcgctgttgaacctgaatacaagtagattctccgccaagtcacgcagcattttctaattatgaagaaacggttatttttattcaaaaagtcagagatgcatccgaaggaaaacttgaaggaattaaattttgtctcggtaataatgaataaatagaagatatgtttaaagcttttaaagcggcaaataattattcttattttatttctatagatggttgcgcagaagtaattggcgttgcaccaatagaattagcaaattatataggaacgcctttaatttaaggcttggtttttgtgaatatggtattcctaaagtacaagttaaaaaatgaaattagatggatagtttctggtaaagcagttgctgcttttaatagtgtaaaactcttggctttagcagcaatgctatcggaatggtaagaagttttatggtaagtttaagttgtatacaagccagagaatgccatttagacagctgtaaggttgggttgccacataagatggcgatttagtaaaggtgctagttttagcgaataaaaacatacgtgttaaaaattaccatcataaaacaatggcatctgtaaaagaaacggttgctgctatgagcattagttctatggcagatagtaagccaaatcatatttacagacgtaaaaagaatgagatggcgagttatcaagaaatttataaatattaaagttttacatgcaaaaattagatatcgtaattattgggggtggtcctattggcattgcttgcggattagaagctaaaaagaaagggcttacgtatgtaattttagaaaaaggccctattgtcaattcactctttaaatatcctgtaaacatgcagtttttctcttcttcagaaaaattagagattgatgaaattccgtttattagcagagaagcaaaaccaagtagaggagaggctctagaatattatagaagaataataacgtctaaccaattgaatattcacttgttcgaaaaagtaatttcggttgaaaataacgagggtatattcgatgtaaaaactagtaaaaataactaccaagcaaaaaatattgtggtggcaacggggttttatgacattccgaataccctaaaagttactggagaagatttagagaaagtttctcattattacaacgatccacatttttatgcaggtcaaaaagttgccattattggcgcaagtaattctgcgattgatgctgctttagaatgctacagaaaaggagcagaagtttctttaatcattagaggagacgaagttgggcagcgtgtaaaatattgggtaagaccagatattatcaaccgaattaaagaaggaagtatcaaggctttttacaaaagtgaagtggtagaaattacggaagataaaatcgaaattaaaactccagaaggacatattcgtattaaaaacgactttgtattggcgttaacaggatacaaacctaattttttgtttttagaaaatatgggagttcacttgtctaaagacgataaaaaaagacctgtttacaatgaagaaactatggaaaccaatgtgaaaggaatttatttagcgggcgttatctgtggcggaatggaaacgcataaatggtttatagaaaactctagagtgcacgcaaaaatgattgttgagaatattacagaaagatgaattttttaaagaatactaaaaaaaaatgctcgatagtgctgctgaacttgattcagtgtaaaatttctaaaaaagaaatttcattcgaagtgaccgtgtatttatgaatgctaggagcacgttttgtcagttcgagtgatttcgatttttttatcgaaattgtatcgagaacatttcgaaattaacaagttgcataacttatattctaaaactttttcatgtttaaatagttcatatcgcataagtaatcaaacagaaattttacactagcaattgatgaaaaataaacctaaaaaaagcaaaataccttggccaacaaaaaaagccatggaacaggtgtatgagttaaacttgtgggggaataatactgctgatttttattcaggttttggttctcacaatccagaaattgtaaaaccttatgtagccattgttaaagagtttttaacttcttttaaaaaccctttaatagtttgcgatttaggttgcggagattttaatacaggaaaagaacttgtaaaatatgctgaaaagtatattggagtagatattgtaccagaacttatagcgcatcacaaaaaagcatttattgcagaaaatttagaatttagatgtttagatattgcagtagatgatttacccgtgggagattgtgctttaatacggcaagttttgcaacatctatctaatgcagaggttgaaagtattgcaaataaattagctgcttttaaatatgttattttaacagaacacgtgcctaatgagaattttacacccaataaagacattatttctgggcaaggaattcggcttaaaaaacaaagcggactccatttaacaaaacctccttttaactttaaagtaaaagaagaaaaagagttgttgtcttttaatttagatctaggtaaaggtgttattgtgactactttatatgaggtgttttagtgatgtttattaagtttattagatatcatgaattgtagccgtcttgttctcaatgtaaaaaaaagcatttacttttagttgatgacaagaatttagcacagactaattgtattttttactgattttaaaacttgtatttcctgtattttaagtctaaaagtagcctactctttagcttcttacttttttatgatttgctattttaaataaaaaaagcgacattttcatgccgctttaaatgttttcacaacggaataatccttattgtgaattgatttcaataattgtactgcaaatatagcataaaaaaagatagcgtatttactggtttccgttggtttgtgttcttttttttgttttatttttaaaaaatggaaaggaaataatatatacaataaaaaaagcgacattttcatgccgctttaaatgttttcacaacggaataatccttattgtgaattgatttcaataattgtactgcaaatataatataaaaaaagatagcctttttacggattcccgcaagtatgtgttgtttttttgttttatttttatagttgtgaataaaaaaataaattatgaagaatattttagggttagatttagggactacttcaattggttgggctttagtaaatgaagcagaaactaaaattgaaaaatcagaaattataaaattgggagtaagaattatacaatacgataattttagtaaggtagataaaagcggaaaggtttcagaatctaaaaatccggaaagtgattttttagctggaaagggtttatccccaaatgccggcagaactttaaaaagaggtgcaagaagaaatttacagcgatttaaattacgtagaacaaacctaattgaaatcttaataaaaaataaaattatttcaaaaagtacagctttaacagaagttggagaatctacaacgcatcaaactttaaatttaagggcaaaaagtgcaaaagaaaaaattgagttaacagagtttgctcgtgtattacttgctatcaataaaaaaagaggatacaaaagtagcagaaaagcaaatagtgaagaggaggggaattcaattgatggaatgaaaattgccaaagaattgtatgataataatttaactgtaggacaatatgtaagcaatttacttgaaagtggtaaaaagtttattccagatttttatcgatctgatttacaacaagagtttaatttagtttggaattttcaaaagcaattttatattgatgttttagatgatgaattttacaaaataattgaaggacaaggacaacagacaagtagaaaagtttttttaaaatataaaggaatatatacagctgaaaataaaggaaaaagagaagaagttaaaaaacaacattatttatggagaagtgaggctatttctaaacaattaaaaattgaagaggttgcctatgttttggttgaaataaataacaatctaaatcaatctagtggttatttaggggcaattagtgatagaagtaaagagttgtattttaataaagaaactgttggggagaatttatacaatcaaattaaagagaataaacatacttcgttaagaaatcaggttttttatagacaagattatttagacgaatttgagcaaatttgggaaacacaagtaaaatttcattccgaattaacattagaattgaaaaaagagattcgcgatattgtgattttctatcagcgaaaactaaaatcccaaaagcatttaatttcagactgccagtttgagagatatcataaagcaattccaaaatcgtctcctttatttcaggagtttaaaatatggtctattctaaacaaccttgaatttgagaatatagaaactaaagaaaagaagattttaggggaagaaattaaacaagacttatttgagaaattaaacggctctaaaaaattaaccgaaaaagaaattctaaaatttgttgatttatcagacaaattatggaaaacgaatttttctgaaggtgttgagggaaataaaaccaacgagaaaatctacgaagtttataaaactattgcagaaaatgaaggttatggttttgactgggataaaaaatcttctaaagaaattgaaaacgaattaaaggctatttttaaaatggtaagaattaaagaatctattttagactttaattcagatttagaaggaaacgactttgataaacaagatagttatcagttttggcatttattgtattccgctcaagatgatgataaaatttctgaagttgataaaattacttacgggaattctaatgttgctttaaagaaaaaactacatcaaaaatatggctttaaaccagactttggtaacttattggcaaacgtgcctttacagcaagattatggtaagttaagtgcaaaagccattaagaaaatattaccttatttaaaaagtggtcaagaatattctgaagcaagcagattggcagggtataatcattctaattcgctaactaaagaagagttagagaatagagttttaaaagataatttagagctgctaccaaaaaatagtttgagaaaccctgttgtagagaaaattcttaatcagatggtaaatgttatcaatgggattattgcagaatatggcaagcctaaagaaatacgaattgagttggcaagagatttaaaaaaatctgcaaaagaaagggccgatacaacgcaatatatcaacaaagcgactttagagaacgaagcggtaagaaaggttttgcaagatgaatttcgcattaaaaatcctacaagaaatgatgttataaagtataaattgtatcaagagttgaaaaataatggttaccgaacactatttacaaacacttatattcctacggaaaaattattttcaaaggaaatagatattgaacacattataccaaaagcaaagttattcgatgattctttttcaaataaaacattggcttataggaaagttaatttagaaaaggcagatactttggcctttgattttattgataataaatacaattcagatttagaaaactataaattaagagtagaaagtactttcaaatctggagcaattaccaaaggaaaatataaaaaattattactttcagagaaaaatttaccagacggatttattgatagggatttaagaaatagccaatatattgctaaaaaagcaaagcaaattttagaagaagtttttgaaaaagtaacaccaacaataggtaatattactgacaaattacgtgaagattgggatttgataaacgtaatgaaagaattaaatctctcaaaatatagagagttgggcttaactgaatgggaggagcgtaaatacgaccaaaaagttgaaaaaattattgattggacaaaaagaaacgatcataggcatcatgcaatggacgctttaacggttgcttttacaacccataaccatattcaatatttgaataatctaggtgctattaatagtagttttaaaaataaaagagaccttgataaaagttacttatttggtataaaacaaaaaataacaaaagtatataaagataaacaaggcagaggaaaaagaaagtttattccgccttcagagaactttagaagtgaagcaaaagaccagattggagacattttaatttcttttaaagcaaagaataaagtagttacaaataataaaaataagataaaagtagcaggaaaagacaattatattattaaaacgcaacttacgccaagaggtcaactccataaagaaactgtttacggtagaagtaaagatgaaattattaaaattgagaaaattaatgcaaattttgatctccaaaaaattaatgaagttacaaaaccaaaatataaagaagcacttttaaaacgttttcaagaatttgaaaatgatgggaaaaaagcatttgcgggtaaaaatgcgctctctaaaaaccctctttatacaatagaaggtaaattagtgccaatcgagataaagacgagaacttttgaagatagctataccattagaaaagaggtaaatccagataattttaaaaatttaaaatctttacaaaaagtaattgatgttggtattcgtagaattttagaagaaagattagcgcagtataacggcaagcctaaagaagctttttcagatttaattaaaaatcctatttggttacataaacaaaaagggatttcaattaaaagagtagcaataagtggcgttaaaaatgctgaaaatctccacgtgaagaaaaatcattttggtgacgatcatttagatgaaacaaataaaaaggttaaaaatgattttgtaagcacaggtaataatcatcacatggcgatctatattgatgaaaaaggaaagttacatgataatgttgtttccttttataaagctgttgcaagaatgaattcaggtttacctgcaatagataaggaattaaatgctaataatggttgggagtttttatttacaatgaagcaaaatgagatgtttcttattccatcggaaggttttaatcctttagaatctgatttatctgataaatcgaatttaaagataattagtaaaaatttatttagagttcaaaagttttcaaaagtagattatggtaattcctctataagagattatgtatttagacatcatctagaaacagagctaattgataaaaaagaaacaaaaaatataacctataaagtttttaaaagtattggggattttgatcaaatattaaaagtaagaataaatcatattggaaaaatagttcatgttggtgaatattaaggtgtaaacttatgataaaaagtactatttacatcggaaatccatcttatctaaaattaaagcaaaaacaattagtagtacaagagccagaaacgaaagaaattaaaggaactgtgcctattgaagatatcgctttgttaatgctagaccattatcaaataacaatctctaatcaattattgttaaaattgcagggcaataatgttgcggtcataacttgtgatgagcatcatttgccttttggattgatgttgcctttgtatggacattctgaatattctgaaagaattaaacaccaattagcagcatcagaacctctaagaaaacaattatggaaacaaaccgttgagcaaaaaatagaaaatcaaaaagcattgttaactttaaacaataaagtttcagaacctttagccgagtataaattaaacgtaaaaagtggcgataccacgaatagagaaggaatggcggctcaattttattggaaacatttatttgacaatttctctagagaacgatttggagacgaacccaataatttattgaattttgggtatgcggttttaagaagtattgtggccagagctttggtcagtagcggtttattgcctgttttaggtatttttcatagaaataaatacaatccgtattgtttggcagatgatattatggagccttacagaccttttgtggacaagcttgtttacaattatgttacaaacagcaataacaatgaactaacgaaagaggcaaaagcccatgttttaacaattgcaacgcaagatgtttttatagatggtgttgtaagacctctattcgtggcggtaaccaccacaacggcaagtttgtataaatgttttactggcgaattacgtcagataaaatatcctgaattagattaatgtctgctaacagatatagcgcttataaaattatgtggattttagtgttttttgatttgccaacagaaaccaagagagaacgaaaggccgcaagccagtttcgtaaaaaattaattgatgatggttttacaatgtttcaattttctatttatttaaggcactgcccaagtagagaaaatgcaaaagtacataccaaaagagtaaaaaggagtttgccaaaacatggtaaagtttgtattttagaaattacagacaagcagtttggaaatatggaattatttcacggagtaaaagaagtagatgtaccgaaaccaacacaacaactacaattattttagagttgatcaattaggaatagaaaaataagtgtttcgatctccgaaaaataaaattaagtggctttttagtatttaaaaaaggaatcccaaagtattgatattactcaatattttgggattgaccttgtgaattctcactaaaaatacaattttgaaatcaattcacaactcctgttgcttcaataattcctgttcagctcttgtgaattctcactaaaaatacaattttgaaatcaattcacaaccaagtaatggcactagaaaaatcgtttgttcttgtgaattctcactaaaaatacaattttgaaatcaattcacaacttacattaactccttctttattggtcctaacttgtgaattctcactaaaaatacaattttgaaatcaattcacaacaagtaattgattcagtaaaagaaactaaaacttgtgaattctcactaaaaatacaattttgaaatcaattcacaacacagtagcaaaaagttacaacgaaacactacttgtgaattctcactaaaaatacaattttgaaatcaattcacaacatgtccgacgcaagtaatgttcagctttcgcttgtgaattctcactaaaaatacaattttgaaatcaattcacaacaaagaactaccgtttaattgtattgaacttcttgtgaattctcactaaaaatacaattttgaaatcaattcacaacactaaagtcattaacccaaaaaatatataacttgtgaattctcactaaaaatacaattttgaaatcaattcacaaccgaaactttcgaccaaaacaatcaggagaacttgtgaattctcactaaaaatacaattttgaaatcaattcacaacaaagaactaccgtttaattgtattgaacttcttgtgaattctcactaaaaatacaattttgaaatcaattcacaacactaaagtcattaacccaaaaaatatataacttgtgaattctcactaaaaatacaattttgaaatcaattcacaacagatagtgttgctggtggttttagactactcttgtgaattctcactaaaaatacaattttgaaatcaattcacaactccccactaacagcgaatgcatctttaaagcttgtgaattctcactaaaaatacaattttgaaatcaattcacaacacaaaagacattttcttgaaaatgacgaaacttgtgaattctcactaaaaatacaattttgaaatcaattcacaacatgcagttttaaacagattttggactaaatcttgtgaattctcactaaaaatacaattttgaaatcaattcacaactcacacaatgtacttaaaattaagttagaacttgtgaattctcactaaaaatacaattttgaaatcaattcacaactcgcccgtgtcttcataattgtatttaaatcttgtgaattctcactaaaaatacaattttgaaatcaattcacaacctggcgtaaaaacaccctctgcaaaaacaccttgtgaattctcactaaaaatacaattttgaaatcaattcacaacttttcgctcatttataaaagtatgttctgtcttgtgaattctcactaaaaatacaattttgaaatcaattcacaacccttatctagtaaagcacttacattattgtcttgtgaattctcactaaaaatacaattttgaaatcaattcacaactcggctgatattgcaaagaattgcgatacgcttgtgaattctcactaaaaatacaattttgaaatcaattcacaactttgcacgccaagcgtttggcagtagatttcttgtgaattctcactaaaaatacaattttgaaatcaattcacaactaaagacagtagacggaattgattataattcttgtgaattctcactaaaaatacaattttgaaatcaattcacaactaaagattcataagtaatttcttttttaaacttgtgaattctcactaaaaatacaattttgaaatcaattcacaacaggttgcgattatgtcaaagaatttttgttcttgtgaattctcactaaaaatacaattttgaaatcaattcacaaccaataacaaacatgaaaatacttaatctatcttgtgaattctcactaaaaatacaattttgaaatcaattcacaacataaaaaaagaagtaaaaaagcaattgagtcttgtgaattctcactaaaaatacaattttgaaatcaattcacaacaatgacgacaaaacaataaatggtcttaagcttgtgaattctcactaaaaatacaattttgaaatcaattcacaacttttgttggaaactcgtatttttctatgacttgtgaattctcactaaaaatacaattttgaaatcaattcacaacttcagacaaagacttgtaatcgttgttatacttgtgaattctcactaaaaatacaattttgaaatcaattcacaacataccttgtacaatagagtgttttttttcacttgtgaattctcactaaaaatacaattttgaaatcaattcacaacagccaaggcaacataaacttgacaggatttcttgtgaattctcactaaaaatacaattttgaaatcaattcacaacttaactggacttgatgtctttgtgtattctcttgtgaattctcactaaaaatacaattttgaaatcaattcacaacttacgaatagatgaatataataaaatagtacttgtgaattctcactaaaaatacaattttgaaatcaattcacaacaggctaacgggtttaaatgacagtgtaaatcttgtgaattctcactaaaaatacaattttgaaatcaattcacaactacctaatgcgttaaaattttcagaagattcttgtgaattctcactaaaaatacaattttgaaatcaattcacaactcctgtttgtggagctttgcaagaggagatcttgtgaattctcactaaaaatacaattttgaaatcaattcacaactagatcgtttcgaggtttcaaatggtgcaacttgtgaattctcactaaaaatacaattttgaaatcaattcacaacgactacaaagtttactatgaacgatttgtacttgtgaattctcactaaaaatacaattttgaaatcaattcacaacaagacagaaaaacaggcgtctaccaactagcttgtgaattctcactaaaaatacaattttgaaatcaattcacaacagctgtttgtactttgctaccaaatcaactcttgtgaattctcactaaaaatacaattttgaaatcaattcacaacattgacatcggtattatatactattttttccttgtgaattctcactaaaaatacaattttgaaatcaattcacaacagatgctttggcattagataattctagtcacttgtgaattctcactaaaaatacaattttgaaatcaattcacaacattgttgttgtttttccttgttttgccattcttgtgaattctcactaaaaatacaattttgaaatcaattcacaacgcatcatttcatcataattataaccagcctcttgtgaattctcactaaaaatacaattttgaaatcaattcacaaccccactctcaaaaatgtatgcgttaaagtacttgtgaattctcactaaaaatacaattttgaaatcaattcacaaccatctagcgggttagtcgcatcaattgcttcttgtgaattctcactaaaaatacaattttgaaatcaattcacaactataataatcttaccaaaatcatttgctaacttgtgaattctcactaaaaatacaattttgaaatcaattcacaacacaatttcactaaattcttgggcaatagttcttgtgaattctcactaaaaatacaattttgaaatcaattcacaacccctccacttcccaacctatttgattgaatcttgtgaattctcactaaaaatacaattttgaaatcaattcacaacctatccacgcttttaaaacattaaacatctcttgtgaattctcactaaaaatacaattttgaaatcaattcacaacaagcattgcatgaatggaaatacaggcgaacttatgctgtcattaaataatcctccatttacgtaagggaactttgctaaataatcttgatatttatctgtttttttatcgtttaatctgtcgaataaattatctaaaaaagtatgagtgtcttttccgttttctgctgtatgttgagctaacgtatttgtgaaaatattctctttaaaaattcctgtatcttctgaaaaatagcagaataataaacgagatagaaaaatattaagatgatgaatactagcttttgatttgtaaatctgtggattttcttcaattagcaaatcatataaatctgccattttgtatgaagcgtttctatcagcttcatcgtcatttttggcagtataaatttcacttccagctaatggcaaaaagaaatcgaaatagttgggtaattcttttagtttaatatctaaagacagtttatttacttttaaatcttttgctactatttgtttgtagtctgtaagaattacaaatcttggtttgtgctttaaaatttgttcatctttggaaatttcttcaatgctactcaatagtttatcagtcgcttctactttaaagaatattttctttttgtataagatttcgccatctgctttggcaaaattgtaatcgccttttttaagtcgagttacagaggtttttgaaattccgtaagcgattaacaaatcatagataaattcttcttttgagaaggtatctattaagttctgaacattagtttttatttcggttgatttcattagagttctaatttctttaaatgacgcattaatgcacgtaaaacggtttcaaagtctggtaaatcttggatttggtccgccatagatttttgccaacgtcctttgtattgtggcaacctttgttctagtttagcgtgaaactctgttgggtcaatttctttgctttcacatttctgtctaaattctactatgtaaaaatcaatatccatattgtgtatttccaataaataccaaatgtcataaaaatctctagcttgcattcgttgcattacacaacgtagcttttcaaccaacacctcttctagagaatagcagagtagttggtgttcttcttggtctgaatagccaataaatacattattcaaaacaggctctaacactaatttttcacttcttgaaatatcaactttcacttttttatttgcacctaaaccaccaagcggaccaacataactgatatagaaattaattccgccatcttgatgttcgttatcgtcaatgatttcaagcggaatatttgcttcttcttttatatattcaaagacttctgtaaaccattcaaaaatttgttcattggttattgaatcatccaataacgtaaagtcaaggtcttctgaaaatcggtaatcttcaaaatagattttctttaaaactgttccacctttaaaaactattttttttgaaaccgtagaatgttgtgctattccttgaagaatccaagaaagtatataatccttttcaatttgttggtctcgtacaccaactgcacgagctttgttttgtatttctcctggttttatcacgtgtaaatggcagatttaatagtttctgtttctaaattttgttgaatactccaacgactaatcattttacctgattttggtaattcggtatctaaaagcacgtaagatgttgtttttagcttgttaagtttaggaataatatatgtctctatttctaatatttctaataaaaaccctaaacgtttaataactgcttgcgatttgaaacgttctgtatattcaagaagtctgtcaaacttaattttgtcttttgaggtataaattgctctagctatttcaacaattcctcctgcataatcaggtttgaataagcagtcaataaatgttttttctaaatcagaacaaaggactttgtgaaagctatcaacccatatttttttagctccaaaaaaatggtttttgttatggtaaacgaattgaaaatcaacattctttattttaattattgaaggtcgaacttgttttgaaacaacaatttgttcttttagtgatggttgagtaatcaaattgtgtatttgcaaggccgagtaataaccaatatagtggttttctccttttgtaagatgtccagcaatgagatgccaatcaggcataaaagattctgcatctttttcatagggaatgatatagtataaccctttttttaaacgcatcaaaagtcctctttttaccatatcgctcaataattcctttaaggcactattgctagaatttggtaaagcgtctattgcttctgcataagcaaaacaatcttggtctaacttattaaagtaagtcagaatgttatttgattgtgttgatatgttttttgttctcatagtttatgcgtcagcttaaaactgactacaaggatacaaataattatttaaataatttacttttcaatgtagttaagtcagcttgttactgactaaatagatataaaagataagtttcggtatgtggtagcgttggaaaaaggcaagctctttttattttttgaggtacgaaaaaaatgaaatgtgcttgactgtgcaactggctttagcttgtgtacaagtctggttatagcaaactaatcttgtgaattatcactaaaaatacaattttgaaatcaattcccaacaaattttataaaacacactttacttttttgacaaacataggtaagttttttgtttcggatacgtttgttttttctaaaaatactagtatattttacagaaagtactagtatttatgaataaatatactagtataaattataaaaagaagtagtgtttttataaaatgtaagtagaggtacctggttgttaaccagatttctatacgtataaagataagaaaaagaggaacaaacagataaatttttacgttaattaattttttagcaacaaaaaattgttctctatctgccaaataatattcagtaaatgaaaaccaagcattgataacacttttaaaacagttttgtcattttttatgagtgaaactcaattttgaaaaatagcgcaactatgaattcaaaattgttactagaactaatcctgttccatatgctgcacttgttttagtatctagcggaatcttgggcttaatacctaccatgttatgcgtctaaatagtataagaggattcctttttgatacctcgaaggcgctcttcgaagctgttcctttaaattaggaattcagaaaaacctttctaacagattttctattgatctgtagtttaaaataagtgaataaattgcaactactttttagctactattgtagtttttttgacgtacaaacaaaaaaaaccgtttctaatttactaaatcaagtttagtaaaaaaaaacggttttaaaatcttaaaaaatattgtgtgtgttacatatatgcctccataggagcacaagaacaaattaagtttcgatctccgtatgcatcatcaactcttctaacagaaggccagaatttattatcagaaacaaaatctaaaggaaaagcggcttgctctcttgtgtatggaaaatcccattcatctgccgttagcatttctagtgtatgcggtgcatttttgagcaaattattagtttcgtcttgcgtagcctctacaatttctttgcgaatagaaatcatcgcatcacaaaaacggtctaattctgcaatagattcagattctgtaggctcaatcatcatggtgccatttacaggaaaagaaactgttggcgcatgaaaaccataatccattaaacgttttgcaatatctacaacttcaataccacgttctttaaaatctctacaatcgataatcatttcgtgtgcagcacggcctttttcgcctgtatataaagtaggataatgcccatctaaacgctctttaatatagttggcgtttaaaattgcaatttttgtagcatctgttaatcctttagaacctaacatggtaatatagccgtaagaaattaagcaagccaaagcagaaccccaaggtgcgccagaaattgctgtaattgcttgttctccgccagtaggaatgatagggtttgatggtaaaaatggtaccaattgtggcgctacgcaaataggacccacgcctgggccaccaccaccatgcggaattgcaaatgttttgtgcaagtttaagtgacaaacatctgcaccaatcgttgccggatttgttaacccaacttgcgcattcatatttgcgccatccatatatacttgacctccgtgatcatgaataatttgagtaatttcttgaatttcactttcaaaaactccgtgtgttgatgggtaggttaccatcaatgccgctaaattatcagaatgaagcaatactttttcgcgcaaatcattcaaatcgatgttaccgttttccgcagcttttgttacaattactttcatacctgccattaccgcagaagcaggatttgtaccatgtgccgaagccggaataatacaaatatttctgtgcccatcatttcttgataaatgatatgctcttatggtcattaacccagcaaattctccttgtgcgccagagtttggttgcaaagaagtacctgcaaaaccagttacaatgtttaattgatgttctaattttcttaaaacttcgtgatacccatctgcctgatttaaaggtacaaagggatgaatgtttc

SEQ ID NO: 2183 - DNA, 24206 bp, synthetic construct
  misc_feature 1..24206: note = Synthetic
  source 1..24206: mol_type = other DNA
agtttttttagtgtctgtattatttaaaacaatgacaactattttgccatctggtgttttaaaagctacgttaggcaggttggaagcataattagattcaattcttttcgatcctggtctcacaaattttgaagcatgagcaatgatgtaatacgctacgtttttcttaaccgtattgccatcaatggttaaggcgcctaaacattctgtgcaaccaccatcggtgtgtggttctaaattagaatctgctgcaaggttccattccaaaacagttttgcaccaatttcttgttgcaccaattatgagttctctggcgtgccattttaagttgttgtcaaaggtttcattaacccctacccactgctcggtaaaatataagtttttgtcagggtgcgcattgtgtactaagctcaatttatcgatacttccaccatataaatgaaaggcagaaccgtcaatatattttttggcatccggatcatttagaatagaaattgggtaatcggttctatcggcattatgatcataaataatgatttttgtagggattcctgctgtttcaaatgcaggtcctaaatggtttttaacaaaaacggcctgatcggcagcttccattaataaactcgggttgttgccagggtgtaaaggttcattttgcacagtaacggcatcaatagtaataccttcggcagccatagcttcaacatatttcacaaaatataaggcataggcatcgtagtattcaggttttaaactgccccccttaaagctttggttggttttcatccaagttggaggtgaccacggtgagcccattattttaatgtttgggttgatggctaaaatcgctttaagaacagggattaaattttctttgtcttttgctattgaaaatttggtcatagcaacatctgtttcgcctgctggcaaatcgttgtatgaaaatggtgcggcatctaaatctgatgcacctatgcttattcttaaatagctaacaccaatattttcgccatcccatttaaaaagatcgtttaataggttgcttttattggctgaagataagttgttaatgtgtaacgcacttccgccagttaatgaatagccaaaaccatcgatttcttgatacgttttactgctagaaacgttaatggtgaaatttgaattttccttataagctgaaactccagcatcctgttttttgaataaaaccgattggtctgcttttgtaagataaaaatctacatctacagtttctggtgttgttggtggggtaatttggccggaaacgtcgtcgtctttttgacaactttgacaaccaaaaaatgatgctattaatgctgctgaaatgaagcttttttttaagatttttaaattcattttttttagtgtattgaatctacgaacccctaacccgtaggggttcgtagattttgttgtttagggttgagtgaattcgtaggttcctgtggtgtagttgtttgtaacttcaacgttaactaggtaattgccgtctgttacaatgtttctaatgttagagccgccgccgttagtcatgcctccagataaagctgaagggtcgtcgcctccaaaatcgttatcccaaggtgagaaaaacttcatatcgaaatttgcttttaaagcaacggtactcgtaaatttaaatgggtgttcataagttaataaatactcgtttctgccatcccaatcttgattgatttcatcccagtgaaataagaaaagattgtagtagctccattgaaatttagcattagcaaaatcgatagcaaaggcataggcttggtctctttcaactgaaatatcgcctgattcttcacttaaatctgaactcatcataactttggcatcatcggtagcatcggtagcaccaatattggcaaacatggtatagcttgttcctgagccatcggctgaggtatttaaagcaaccatatccccgttttgtagggcgaaatgcgcgtcggttttaaatacatcgccatctttggttaactcggtagccatattgccgtttacgaataaaaataagctgtcgggcgtatcaattggttctgatgcattaggatctttttcaatgttgtaggtataggagctggctgataaatctagagtaactataacactgcctttaatttctccaggcacatcttcataagttacgccttgacttgcggcatcagattccataataacttggttggtagtccctgtaacacgtttcattaggtaatcccagtagccaccgtcgttaacatcggcacggaataaaaatccgcctgtgtctacaaagtccatggtcgcttgccatacgccgcctccaatgtattccagaggttcatcgctaccccatccaccaacaattgggctacctttcacattccaacgttctattttaagtatggagtaggtgttgttgtctaaatctattcgaattcggtatgcaccatcttcgcttaccgagattgctgttccagattttaccagttcaccatcgttagcgccgcctccgtaaacatgagcaggtaaagattgttcgctgtataatttaaaagttttaccggctgttaaactggtataaatttcatggatatttgaagggtccccatcagcattatttagtctttttagaggaatagcttcagcgatattattattgttttctacagcattacccgataaaaataattgatcaggaataatttcattctcaaaccttttaacggttattttttgaatgtctgtagattgtttattaatgctacttgcttgaaccgcccaagatagttcggcattactattcgcagggtagccggctatagataaagcttcgtctaaagtttcatgagaaacggaggcagataaatctttacctccatttcctgaaacaaaaattaacaaagggttatcaaacgcagttgttcctaaggtgtcaataaggaccttgtaagtaacaatgtatcctgctgatgattcggcagcatcccaattaaatgttatcaactcatcaggtgtattttggtttaaaatgattgtagcatcattttcgggtgaagttatggcagggttacttaactcccatagtccttcaggttgtaagttgtcttctgtttcgcaggctactaaagtaacaactgctaaaaaaaagcaaataatgtttttatatagtgttttcataatggttgttttatagtggaggaagcgttaatgatgggtttctatctaattcttgttgtggaataggtaaaaatattttgtcttcggtcatattataattcacggtgctaccatctcttaaatcaatttctactagattattcatggttgaaaccaattgattataacgtgctaaatcgtcccatcgctggccttcttggaccaactctaaacggcgctcattaagtatggtttgttttaatacgtcttttgaacttttttgcgcgtctgtaagatctggtaggtttactctatttcgaattctgttcacctctgttgcagcggcttccaattgatttaattcatttagtgcttcagcctttaaaagcacaatatcaccgtatcttagtatgtactgtctgttagagcttgcccatccgctagcttgtttccatttgtaactaaaaggaatagagctacctgaggcattgccccaatactcatcaacccactgtacttcttcaaataaaacagaggcgttttttctaatatcatcaccttgtgcatcaaaggcgtttattaaatcgtgtgaaggggtcacaaattttctccaagaatcaccagaaattgatggtggtaaaagaagttgtggcccaaaattaccttcgtttcctcctaaatattgaatttcaataatagattcggcattgttgtaattattgccatcaaataaattttcaaagggaataagcgtgtagtttgctgcgctagattctactttttgaatatggcttaataccttgtcataatctgggttaggttgttgtgcataagcttttgcggctaatgcatacgcagctccagcggttgctcttgctttgtttatgctagaatcatcgccataaacgtctggtaaaagtgtagccgctagctctagatctgaagtgatttgctgataaattttttctatggatgttctaggaatttgaacactttctggcgaagtcgattttatagtactcgtaattaatggtactgcaccccatgatttaacaagggtaaaataatggtatgaccttaagaaataggcttccccctttatttctctttttctagcttctgttaatagagggtctgtaacatcatcaacacgttctaaaacaatattagctttagaaatggcattgtaaatattagaccaatttttatatagcctagaatgtgtaggcgtgatttctaaaaaatcgatagcgaaaatttcaggattatcacctcccgcataattattatctgaacgaacgtcttggaaaagaatattatcccaaacatagtattcagccgattgaaaagattcgtaagcaccaataagcgctgattcaatttgacttgcggtttcgtaagcgttttcactagtttcttccgaaatgggggttaaatctaaatagtcctcacaagatgctaatactaataggcttagtaatagtgttattattttatttgttttcatgattgtgttttttgattaaaaagtaacgtttaaaccaaaaatggctgttcgtgtttgtgggtaggtgccaaagtctatacctcttacggtattacttcctccaaaagcattcacttctggatcgaaaccagaataatctgtgaaggttaaaaggttttctccggttacatatagttttaaagcactcatttttaatttgtttaaaatgctgcttggaaacgcataacttaatgtaacagccttaactcttaaatacgaagcatcttcaataaagcgtgttgaaattctagagttatcagcattaccaaaactagaagctgggatatctgtaaaatctccaggttggcgccatctatctaataccgctaacgattgatttttaggatctgtcatgccctcaatttcaatccttgtggcatttaacatgtcgttaccttgagaaccttgtaagaaaaccaataaacttaaatttttataggtgaaggtgtttgtaaatccgtaagtaaagtcgggattagcatcaccaataatggtacggtcgtctgcagatggtgtaaatgtagaatcaccattattatctaaatagaatgcagcaccggtttgcggatctactccgccatatctgtaaccataaagaattcctaaaggctcaccttctctaattaaactagcttcgcctcgtcctccagaaatggtgccctgaaaaacatcggcatctacgagttttgtaattttatttctattgaaggccatattgaaaccagattcccatgaaaagttttcatgatctatatttatggtgtttatgctaaattcaacacctttattttctaactctccaatattttgtatagcgctttcaaaacctgtagctgtaggtagtggtgcgttatacagtaagtcttttgtttttttaatgtaggcatcggcagtaatatttacgcggtgctgaaataaagaaagatcaataccaatattggtttggttagattcctcccattttaagtttaaattttcaatagatgaagggaaagtacctggttgggtaacgcctccaatagggtagttggcaccactaccagctcgtcctaaataggagtaaggggcaatttgatcattaccaacaataccccatccagctctaagctttaaatcacttaaagcgttagcgttgtttagaaatccttcttctgaaactctccaacctgcagagaaagaagggaaatagccccatcgttgttctgggccaaaaacactagaaccatctgctctaaagttagctgtaatcaagtatttatcggcatagctataatttaatcggctaatgaacgatgcatttgatttttcatcttttctagcagtaccctttattacttccgagcctccgtttggtgtggtaaccgaagcacttgcaaaatttctagtttcaatttcactagtttcccaagtgcttttttgattaacagaaccaataagcgcttctattttgtgattgttgattagcttgtcgtatcttaaagtattctcaataatgtaataagaatctttattggtattgtttatagcttgtccttttaatgatctaccataacctgttctaaaaggatctaaaaacgaatcgtatacaccatggctattatctatacccagatttgttttgaaagtaaaatcgtttaagaatttaaactcaaagtataagtttcctaataatctttggtttttgtattctcgatctaagccatcggttgaggcaagaggattttcccagttttgaaaagggttgctggtaaaagagccatcaggattataaatatcaataattgaaggggtggataatgccccaagtaaaacacctccagagtttacattcgtgttgtctttaacgtctacatcgcggtattgcgtgtaggctattctagagccaatagttagccagtcacttactttttggtctaggtttattttgaagttatagcgttctatttcagaacttctaacagccccttcttgtgttaagtaccccgctgaaacgtagtagttggtgccttcagttttaccagataaggctaattgatagttgtttgtataaccattttggaaaatttcctgttgccaatctgtagtacttgtgtataaatcccaattggtattttggcccatttcggtcattaaatcgcggtattgttcgccatttaaaacaggtaaagtattccaaacttgagatacacctgtgtacgtgtcaaaagatatttttggtttttcggaagtacctcttttagttgttataataacaacaccattggcaccttgtgcaccatagatggctgcagaagaggcatcctttaataccgaaatggcatcaatatctgaagggtttatagagcgtgtatcggtggtaggtacgccgtcaacaatataaagtggctcgctaccagaagtaatcgagtttgttcctctaattcgtatacgcataccttcagatggttttccagagtttgctaatacctctacacccgcggcctgaccttgtagtaaggaccctaattgtgcattcgatctttcttcgaaagattcagaatttacaagggcaaccgcaccagttacatctttcttttcttgtgcgccatatccaataacaatcacctcgtcaagcgattgtgtgttctcttgcagggttacgttaatggttgttctattattaacagcttcttcaatgcttgtcataccaacataactgaatacgagtatggattcaggactaatattggcgtgtagttcataaataccatcaaaatctgatgaggttccgctggttgttccttttaaaattattgtggctccaggaatcgggtgaccattaatgtcggatatttttcctttaatagtcttttcctgggaaaatgcacaaaatgataataataagagtaacagggaaattgttcttctgtgtttagtttttacattcattattgtttagttttttggtaaaatttgaaacatgtttagtttttagtgttatagaaacaaattaacccctataggtctgaaaaagcaacacgaagtatttcaaatgtagatttgttgtaactaaataataatataagtatctaaaaattaaaggattataattttagtgcttggtgtattaagtggatttaatgtagaagtgatatagtaatttttactgtatttgtgctaaatacataaaaaaacacgggcaatattgctatattttaggttttaagagatttttttaaccatattctcgaactcatctctgttaatggcgctattttttacttttacacgataattataaatggtgtttacagagtatctaagaattttggagattttcgagctgttggttatgcctaatcttattaaagcaaatattcgtagctctgtgtttaaactttcgccttttttaagaacaatttgtttgtcttcatgcaggagtttgtttaattcctcgacaaagttaggatagatgtgtaaaaaagatttatcgaagttttcatagaaaagatttagctcgttttctataacttgttttgattttgttaattcaagtaatgaatttgttctgtttgaaacaatataggttcttaccattttacggtaagtatctagcttgtttatgtaatcagaatataaatttaaaaatgtgcctatatattgctcttttattctgtcggaatccgatagttcgttgtaaagtctattaaggtcttcattagaaaaacttaattgttcatttaagtcttttaattgattgttggcattttttaagcttttccgagctgccgaaagttttttaatttgtttgtagatgtaaaaaatcgttatcagtaaaaacaagaccaaaacactaatgaacaaaagcatctttttgagttcttctttttgttctatactgcgagcttcgtatgcttttgaaatgactgataatttattagatatgttaatataacgaagtcgggagttgtataactcagcatcttcaacagaaaaatcgatatacttatgtgcgcgatctatatcaccttctttaaaaaacaccatagctaattcggttagagaagcgttgtctttaactgaagactgaatatctgaaatggccgataagattaagtattttttttgctgatcccggtggttgtttaagtcgtatagcaacgctctttcaaaagtaattaacgaatatagtggggtgcccagttttacctgagacaggcgtttagagtttgtttgaagagcgtcattaatttttctttgatctcgtaagtttttttcttttaaagctaacgattcatccgagttaggtcctaatcgctgcattaatgaatcttgataggcttggtataatgaggagtaattttttttacttttttgaacgctggtatagaagctgagccccgagtaaccttctttatagttataataatatttattgcgtagtttttcgggtagttttttcctgtttaactcatttagagcgtcgatagattctttatatctaccagactgaacaagcaacttggctagttttaatatggattctttttcgaggtaaatattatttatagctttagctgtggcaatatttttctcgatgtaatataaggtgctatcaaaactgtatttttcatattcttcaatgattttggtggtaagaaaatatttgttttctagcgttgtagatgtttcacccaggagtttttttaactctttaatgcgtgtttctttagcggcgtcataagttttacgcatggccatgcttttctctaagcgcgttaaaagagagtcaatctcattaacagaaaaagtagaattagaaaagataaaaaacaaaagaagagtgaaaatgtatttcaaggctcaagaatttatgatagatctgaataacaaatttaatggtttttatgctaataccatttatttgtcgactatgcccgttgtgatgccaatctggcgtatgctaatagttgctattaaacaaaaaaaactgccctcacatgagcaaggacagttatgcgtttttaaggcttggggcttatttgaaaatgattaataatgccttttaattatttgtgattataaatgaaaacgacaaccgaagttgccgttttaaatgttttcacaacggaataatccttattgtgaattgatttcaaattgtactgctaatataaaaagatttgggaagttttaatagaaaagcctatttttaattccgtctttaaaaaaataacacaagactttactgctaaaaaaaatcaattttctgttgctgtttgggtaatggatttatagaataatatgaaaaaaatactaggactagatttagggacaacttctattggttgggctttagtaaatgaagccgaaaatataaatgaaacttctgaaataattaaactcggtgttcgagtaaaccctttaagttctgatgaaattactgattttgaaaaagggaatccattatctgtaaatgcagatagaacattaaaaagaggggcgcgtaggaacttgcaacgatttaaattaagaagaaaaaacttaatagaaacgttgttaaaaaacaaggtcatccaatcggaatcaatattaacagaaataggaagtaattctactttcgaaaccctttccttaagagctaaggcagctaaagaacgtgttgaaaaggaagagtttgcaagaatacttttaagcatcaataaaaaaagagggtacaagagtagtagaaaagctaaaagcgaagaggaaggtactttaattgatggcatgtcggttgctaaacatttgtatgagaacaattttacgccaggacaatatgtttatcagcttttattagaaaataaaaagtatatccctgatttttatcaatctgatttaaaaagtgaatttttaaaaatatggaattttcaaaaagaattttataccgaaattttaaccgatgagcttttccaaaatttagaaggtaaaagcaaaaaccaaacatgggcaatttgcaaagaaccttttaaaattactggaattacccaaaaaggtagtgcctcccaaaagaaactagaaaaatataaatggaggagcgaagctttagaaagcaaagtcgatttagagattttagctattgtatttcaggaaataaacaatgacttaaacaaatcgagtgggtatttaggtgctattggagatagaagtaaaaaactatattttaacaaaattacagttgggcaatatttgtatcgacaaatagaactaaataggcatacaagcttaaaaaatcaagtcttttaccgtcaagattatttagatgaatttgaacaaatctgggaaacacaagctaagtatcatacagaactaacgccttcattaaaagaagagctaagagatataattattttttatcaacgaaaattaaagtctcaaaaagggttaattagcatttgtgagttcgagcaaaaaacaattgaagtaacagttgaagataaagttaaaaagaaaactatagggccaagagttgtccctaaatcatctcctgtatttcaagaatttaaaatatggcaggttttaaacaatcttagttttacacctataaaagaaactccaacggatctttttaaaaaggaatttccagaagaagtattaactctagatcaaaaaaaattaatttttgaagaactaaatacaagggggaaattaaaaaatacagatattttaaaactactgaaattaaagacaaaagattggaaatgtaattttgaatctattgaaggaaataataccaatcaagcaatttacaatgtattacagcaaatttctgaaaacgaaggacatggttttgattggaacaaaaaaaatgcctctgaaataaaggaagagttaaaagcaacattaccagaaataggtgtcaatccaaatattttagactttgatattaatgctgataattttgaacagcaagccagttatcaattatggcatttgttatactctgccgaagacgacactaaaataagcaagcaagacgaggccatttacgggaaaacctctgtaagcctaaaaaagaaattgcatttaaaatttggcattcctgtaaaatacaccgctctatttgctaatattagtcttcaaccagattacggaaatttaagtgctagagctattcgtaaaattatgccacacttacaagatggtatagaatattcgcaagcatgtgtactagcgggctataatcattcaaacagcattactaaagaagaaaatttaaaaagagcattaaaagaaaaactggaacttttaccaaaaaacagtttaagaaatcctgttgtagaaaaaatattaaaccaattagttaatgttgttaatcaaataattgatagctatggtaaacctgatgaaattagaattgaattagccagagaattaaaaaaatcggctaagcagcgtaaagaaatgactgttggtattgctgcagcaactaagcgcaatgaaggggtaaagaaaacacttcaaaaagccccatttaatattttaaatcctactaaaaatgatgtcactagatataggttgtatcaagaactggaaacaaatggatacaaaacactatacaccaatcaatatatagcaccaaacaaactattttctaaagaaatagatatagaacacatcattcctaaagctaaattatttgatgattctttttctaataaaaccctagcgtttagaacagtgaatcttaccaaatctaatatgacatcctatgattttattgcagagaaatataatgatgatttagaaaactatgttttaagagtaaaaaacttatatgataatggtgtgatttccaaaggaaaatatagtaagttactcatgaaagagagtaacctggctgatggctttattgaaagagatttaaaaaacacacaatacatcgctaaaaaagcgaaaaacatgttgcaagaagttgttagaaacgtcgtgcctacaaccggaagtattacagacaaactacgagaggattgggatttaattaatgtaatgaaagagttaaaccttcctaaatacagacaacttggtttaactgttctggaggaacgaaaaaatggaaataaagtagaacaaattatagactggagcaaaagaaacgaccataggcatcatgctatggatgcattggctgttgcttttacaacccataatcacattcaatatattaataatttaaattcttccagagatgaggaaagcagttcggagtatgctaaaaagtctaaaaaagaaattaatttatttagtataagaaataaaatcactaaaaattatgaccaaaaaaatggtggtaaaaaaagaaaattcattcctccattaacaaattttagagcagaagctaaaaaacatattgagggtattttaatttcttttaaaactaaaaataaagtagctacaaaaaatataaacaaaactaaaaaacaaggaggctatcatgttcaaaaagccaaaacgcctagaggccaactgcataaagaaacggtttatgggcgctcaaaaaaagaaatagtaaaacaagaaaaaattggaacttcctttacaattgataaaataaatacggttacgcagccagaatacagaacactacttttaaagaagattacccaatttaacaacgatcctaaaaaagcttttgggggtaaaaatgcacctagtaaaacgcctatatacttagctaatggtaaacaaatgcccttaacagtaactactaaaacttaccaagacgtatacaccatacgtaaagaaataacacctgatttaaaaatagaaaaaatagtagatgctaaaattaaagcgcttttgtaccaaagagtagaagcttttaatggcgataaaaaagcggctttctctaacttagataacaatcctatttggttgaataaggaaaaaggcattgctataaagcgtgttaccattagtggagtatcaaacgtagaggctttacatgataaaagagactattttggaaaccttattttggatgccgaaggccatacgcaacctgtagattttgtaagtaccggaaataatcatcatgtcgctatttataaagacgagaaaggaaaattacaagaacaagttgtttctttgtttgatgctatagctagagtaaatcaagacctacctatagtgaacaaagattacaacaaagacaaaggttgggaattcttatttacactcaaacaaaacgaacttttcatttttcctacggatacttttaatccagaaggaatagacttgttaaatgaaaataattatgccttgattagccctcatttgtttagggtacagaaaataagttcattattatcgggattatggtttaggcaccatcttgaaactactgtatctgtaaacaagtctttgaaggacacaacttataaagtaatacaatcattaagtaaaattgaaaacattattaaagtccgaactaatcacctgggtaacattgttcaaattggagagtattaatcaataatatgttatgataaaacgcactgtctatataggaaacccagcccacctcaaattaaagaaccaacaattgttagtgcaagaacctttgggagatgtaaaaggttctgtacctattgaagatatggccttgttggttttggaccattatcaaattactatcagtacgcaggttattaatagtttacaagggaacggcgtgtgcattgtaacctgcgatgcacaccacctgccttttgggattaccttaccattgtatggtcatacagaacattcagaacgtgttaagtatcaattagaggttagtgatcctttaaaaaaacagttatggaaacaaactgtgattcaaaaaattaaaaatcaagaagccttactgaaactcaacaaccgtgtgcatgagcctatggagatgtatcgtaccaccaccaaaagtggtgatacaactaatactgaagggaaagcagcacaacattattggaaacatttgtttcctgattttcagcgtaatcgatttggcgacgctccaaatgcgcttctaaattttggatatgcaattttgcgtagtattgtagctagggctttggtgagttctggattattacctgttttgggattgtttcataaaaataaatacaacccctattgtttagcagatgatattatggagccttatcgcccatttgtggataaaatggtggtaaattatgtaaataataatggcgaaaccgatgcgcttactaaagaagtaaaagcatatttgttaggtattgctacacaagatgtttggatagatgggcaacaaaggcctttaatgatagcagtaacaactactacggcttctttgtataaatgttacacaggagaattaagacagataaaatatcctgaattagattaaccatgtctcaagacagatttaatgcgtatagaattatgtgggttttggtgttttttgatttaccaaccgaaactaaagtagagcgaaaagcagctagcttgtttcggaaaaatctattaaaagatggttttgatatgtttcaattttccatatacctccgtaattgcccaagccgcgaaaatgcaaatgtgcatattaaaagagtgaaaaaggctttgcctaaacacggaaaaataggagttttgtgtattaccgataaacagtttggtaatatggagctgtttcacggtaaaaagcctaccgatttaccgggtgttacccagcaattagaattattttaaaattacctttttaaaggtgcttcaagcggagtcgttatgttatgcgtgtaattagattggctaacacggttcgatttgtgccagtgatttcggagttactgtgccgttgatttcggtttaaattgtgccacacggaaattgagttagctaaaaacggtttgatttgtgccaatgtttccgtttcgatttgtgccactttaagagatcaagtaattaccttattgctctaaaaagcgatatggccaacacacttgatccaaaggacctaaaacaaattatcaacttaaaacaagatggttatagtaaccgtcaaattggagccacacttggcatttgccgcaacactataaatagctatatacacctatttaaaggtagtggttatagttttaaggagttattaaagctagacaaccacaccctagaaaagctctttacatctcatacaaccataaataacaaacgctatgatgaattgatgttttattttgaaagtattaataaggctcggaaccacccaggatttacttttttgtaccactacacagaatatagtcaaaaggttaaagacccttatagttacactcaattcatggagcattaccatcgtaaatatgccaagatcaagggatctatgaaacttgaacacgaggcagggaaagagatattcgtggactttgctggaaaaaaacttcagatagtagacaaaatcacaggcgagatacttccagtagaggtctttgttgccatgctccctaacagtcagtatacctatgttgaggcttgtatgagccaaaagcgtgaagattttataagttgttgcgaaaacgcccttcatttctacgggggagtacccaaggccatcgtatcagacaatctaaaatcagccgttaccagatctagtagatacgaagctcaggttaaccgtagttttaaagactttgcccgccattacaactgcgtggtcaatccaacgcgtagttactcccctcaagataaagcgctggtggaaaacgcggtgcatctagcttatcaacggatttattatccccttcgggaaatgacctttttttctttagcagatctaaacaaagagataaaacttctgctagagtgctacaacaacctattattccaacgcaaagaagctagtcgtctggagctcttccaaagcgtcgaacgagagtatctaaaacccttaagcagtacacgctacgagataaaagaatatagaagagctaaggttcagaaaataggctatatctatttttcaccagataagacttactacagcgttccatatcgttacattggcaaggaaaccacgctacactataccaaaggcatggtagaggtgtattataatcaacagcgcatagctatacaccaacgtagcggttccaaaggcgcatacataaccaacaaggatcaccttagtagttctcataaacaatacagccagtggagtccgcaatactttaagaacaaggcagctgtccatggtagttatgttgcagcatgtgtcgagcggattattgctgcgttggattatcctgaaacagggtataaaagagctatgggcgttatacaactccataagtcttatggctcccaaaggttagataatgcttgcaaaagagccatacaggctgatgctgtaagctacaacaggataaccaacatactgaagaataatctagatcaaagctccttattcctacaagaagaaacagaccgaggttctcatatccccaagcatgcgaacatccgtggggcatccaattataagtaaaaacaacacgaaaaaatcacttaaattttatacatatatgaatacaaatcacaccatcgaaaaactcagaaaaatgagattaacagctatagctgaactccatcacaaccaccttagtgataaccgaatagagtgtcttacgccagatcaatatctagcattgcttaccgatcaccaatgggaagaccttcagaatagaaagataaaaaggcttacaacgcaagcagcctttaagcagggagctacacttacagatattaattacctgcacaacagaagcttggacagaaatatgttcgagcgtttggctactctagattttgtacaaaaaaaggaaaacttgattatcacaggatcctctggagtgggtaaaagttatatagctcaggcattgggacatcaagcttgtatgatgaataaaagaaccctatacacaaatactgctagactgatgaaacgattaaaactaagtaaagtagatggcacttaccttaaagaacttgcaaaactattaaaagtagatctgcttatccttgatgattttggtttacagagcttcgacaatcaggacagagaggcgcttatggacataatcgatgaaagacatgataaaaaagcaacgattgtagcttcacaaatacctgtatccgcttggtacgatattatcggcgaaagcactatcgctgatgcgatactagatcgtattgtaaattcatcgcataggataaaccttactggagaatccttgagaaaaggtaagttgaaagaacagtattaattaaatttaactattattgtatgatctcttaaagtggcacggtttgaccgaaatacgtggcatggtcactccgaaatagccaggttcgccatttaaagccaatttgctaatgtaaaccacattgccttcaatacgcgtaggaggcttgtaaatgatctcttctttttcctttttaaataaaaccaatccagattttacagaaaatggaattgaacttattataaggcctttgtctatttcaaacttatatgcgccattgggcaataaggtaaggtcgaaattggaagataaaattcctgtggtctgtattacttctttatgtacaatcacgccatgactatctttaatcgataataaattccctgctttaacacgttttaaaactagagaggtgcttgatgtttcatttttaatgttaaaaaatggaacttcatttgcaaaacttagcatggcagtgcacatcattaccatcaagattcctttttttgaatgtttaagtacgtttttcataataaagtgtttttaacgttcaacatatcaaacttaacaattaaaatcctgacgtaaaacactgaaatggacgcaattatgtgttaaattctccttttaggtgtgattaagaaaccatgtttattcaggtctctttttaaaattaatggaaataaaaaaggtgcaccttacagaaggtgcacctttttatcaactaaactaaactaaaatttcttagatctttttttcaaatcttcttccagcagtgtgaagaatcacttggtattcaccaggtctagcactgcttaattggtaagctctttcaattttatctttattttttattttttctgaaactacaaccgtagaattcatgctgttttttggagtgaaaagaatttcaatatctaatggttctccgtcaatggctaatttgctaacaaataccatgtctgcagacacacgaatgaaaggtttgtaaattactttttcttcattcttattaaataaagcttcaccagattttattgaaaaaggaatttcattaatctctaaacctttatctacttcaaacatgtaatttccatttgataagaaagataaatcaaattctctagtatattttccagtagttttaatcgtttccgaagcgattacttgtcctaaagcatttttaagtgaaagcaagttaccttctttaacatggttaatagttaaagttgttttgtttgctacaacagaaacgttgtaaaatgaattttcatttgcgaaacttactatagttaccgttaatgctaatagtaagattcctttttttgcgtttttaattatatttttcatagtaaataattttatcttttgtataccacaaagatatggcgcaagcagatcctgcaaaacatgggaattgatgaatttgtatgctagattatctgttatattaatgttgattttgtgttaagttaatttagcatataaaaaggttaatttatcggaattattttaaggtgttattatagctgaagccagaaaggctataagcctctttctcagtgagagtacagcctaagtgatgaaatgtttattatttaagacgtattttctaatcacttttgcattattaataaagtgtgttgttttttaagttatcatgatattgaaaaggagaataaaacccatagtgaatattagggtgtatcttaataatgtttttaaaacttatacacctaacaagtcaaaatttgtgctaattagttaaattcctgcctttgttcatttaactcctttttcagttttaaacttgcaatcgccataaagaccctgttgcaagcttacagttaaatgaatgaaatacaagtattgcattcatgactctttaataaaataaaaaaggcgaccctatttgaggtcaccttttttcaactaaactaaactaaaatttcttagatctttttttcaaatcttcttccagcagtgcgaagaatcacttggtattcaccaggtctagcactgcttaattggtaagctctttcaattttatctttattttttattttttctgaaactacaaccgtagaattcatgctgttttttggagtgaaaagaatttcaatatctaatggttctccgtcaatggctaatttgctaacaaataccatgtctgcagacacacgaatgaaaggtttgtaaattactttttcttcattcttattaaataaagcttcaccagattttattgaaaaaggaatttcattaatctctaaacctttatctacttcaaacatgtaatttccatttgataagaaagataaatcaaattctctagtatattttccagtagttttaatcgtttctgaagcgattacttgtcctaaagcatttttaagtgaaagcaagttaccttctttaacatggttaatagttaaagttgttttgtttgcaacaacagaaacgttgtaaattgaattttcatttgcgaaacttaccatagttaccgttaatgctaatagtaagattcctttttttgcgtttttaattatatttttcatagtaaataattttatcttttgtataccacaaagatatggcgcaagcagatcctgaaaaacatgggaattgacgaatttgtatgctagattatctgttatattaatgttgattttgtgttaagttaatttagcatataagctaggtaattgtgttttgttttgtggtttttacgtgtttttatgatgttatattatcgcgttattgtaagtattcctttaagttcgaataaaaaaaaagggcaacctttaaaaagattacccttgtgatataaaactaaaattagtttaaatatttttttcaaagcttctatttccagagtgtaatataatttggaattcacctttgttcataccttctaatttatatactttttcgattttatcggtcgatttaagtttttctgaaaccaaaagtgtcgaattgtgtttgtttttttcagtaaaataaatttttacgtctaaaggttcaccatctactgctaatttagtaatgtataataaatcgttttctactctaataaacggtttataaaccactttttccttattgaattttgcaactccagcatttaaagtaaatggaatttctttaatctctaaatctttgtttatttcaaaaaaatagtttccatttggtaaaaagtttagatcaaaatctcttttgtatctcccagtggctttaatagtttcagaatataaaacggatccattggcatctttaatagctaaggcagtaccttctttcgcgtaatttaatgttaaggttgttctgttaccttcagcatttatgctatagaaagcattttcgtttgcgaaacttaaggtagaaattaataacgctaccattaaaaaacctttttttgtgtttgtcaatatgttattcataatatataaattttctattttgatactgcaaaggtacgggagatggtttaggtgtaaaacactgaaattgaccaacttgtgtgttaaattaaccgttggatagagttggggaagtttgaaggggaataggttaaattagaggtaattttggtaatttctccaatgctgctaaaaaaggaggtcatttgagaaagcggctaaagtttgatttgtgtggtggcgcttatgaaaccgatgtttattgctaaggttaaaaatatttttacgggtgccatataatatgataatagcatactatataaacgatcccttttaacatcatctcattttaggggggttagaatgagtttagtaaatggtttttgtatttttttcgctcatcataaagtctgatttgtgatctgtgatcataaatatttttaatatggcaaaaactttgaaattgtttaagatttataagtgtttctttgttgtttatgaataccatacctgatgaaataattataggtattctcataacttccgccgagtttattattttaatggtataatgcccatctttaatatggtccaggtctaacgccgaaatatttcgatggtgtttatttaataaaatctggtttttgtcatttagtaataataatgaacttcctttggaaatatcgttcaatcttaataaggattgttttttagaatttttaacattgtaataagcggctttctttgcatggccttgtaaactgcataacaagactgttaaaagcagtaaattttgtgagagacgagttatgtttttcaaaatgaggtatttatgtgtaaatttataagaatagtcttcattttaaaacatcgtaattgattataatgtgtgctatattgattctgtgtgattatgctacgcaacaataagaggtttcaaagttgtgttttcatgtcttataaaggtaaaaacaaatcctatggaagtttaagtcgcataacctaaaaaataaaacaaaaaaaagtgggccaccacagcccactttaccaactaaactaaactaaataagacattaaactaattattaatgaattttgtgtactccttattattagagtgtattgtaattttataatttcctttattcaatttataaacctttttgatagctaaggtattctcgatcaattccgaatgaaccattttgtaggtaccttgttcaacttcattaaaaatattaatgatggttgcttcattgttagaacaaagtttggttacataaagtaaatcggcttccttctttgtatgtggtttaaaatatgttgattcttcagattcatcaaattcaatttcattagcacgaactttaaatggaatcgtgtttacttctaaatctttatcaatttcgaaaacataatcgccattggctaattctgttaaatcaaatccttttttataagtaccagtagtttctaccgattctttaaaaatgatgataccctggttgtcttttatagaaactaaatcgcccggtttgacatcctctaatgttatagtcgttttttttgcgtctctctttacgataaccttagcatctccttcagcgaaacctaaaacggttgcaagcatagcaactatcaagatcccttttttcgttagtgtaagtatgtttttcatagtgagtcgtttataacgttcaacggtacaaagatatgtgagatgcagaggttacaaaacatcaattttggcttatttatatgctattttatctattaagtaattgttaactgtgagtgaagttaatttaacatatatttgagttaaataaatatacaacgtatgcataatatgtattaattttgctaataaaaaccctcgattatgattgctaagaaacccacattaaagaagctaagtccaagttttggtagctcgatcttggttaaacagcatgtagaacaggtagataagaatggcgccttctggcatttccatccagaattagaacttatatatataaataaaggacaagggaagactcatattggtacacacttgtcctattttaacaacagtcagttaatattaataggttctaatttacctcataatggttttacagaccgtttaaccgctaatggtacagaaacgactatacagtttaaatctaattttttaggagacgattttttaaatgttcccgaaatggccaatatcgcggctttatttgaaagggctaaaaagggtattcgctttaaagtagaaaccaagcaaaaaataggtccgaaaattgaaaaattatatgaatataaaggcttaaagcgtgttattaaatttttggagattctacgttatttatccaaaaccgacgattatagtttattgaatgccgacggtttggctttcgaagccgaagcacaagacagtgctaaaattggtgtgatttttaaatatgtgaataaaaactttacgcaccatatagccttagatgaaattgcagacaaggttagtatgacggttccggccttctgtaggtactttaaaaaggccactggtaaaacctttacacaaattgttaatgaataccgtgtggtacatgcgaccaaattactttctgaagagttagaaatgagtatcgccgatgtttgttttgagtgtggatttaataacttttcgcactttaataaaacttttaatgatattaccggtaaaagtgcctcaaattatagaaaggaaattaaaaagatgattagttaggggtgatgtccccattgtgttataaccta

SEQ ID NO: 2184 - DNA, 24203 bp, synthetic construct
  misc_feature 1..24203: note = Synthetic
  source 1..24203: mol_type = other DNA
aaaattaccttaacaaatgcaagaaatagaacatatcctgaaaataagagtgttgtttctattaaagaagtgagtctttgggatagttctaataattttctagataaattggctgcacaaggaaataataaaaggaaatcgaaccaaaaagcagaggctggcaaaagttatattttaaagtttaaatatgacaatgaagaaataacagcaaagacaacaataccttcttctttcacagctaacattcataggaagacacagctttctaatgattctttattagttgagttatccataaaaaataatgcatcaagcactgatgattcattttatgtaatagagtgttgggcatctattaataaaaaacaaactaaattaccctttgcaaataatgactcttttatacataataataagtacggaatgctttcttctccttttaaacgtttgtttttcagtagtacatcaccacaacaattaagtataaaatttttaagcaatatctacctttattttaaagatggtgattctttgattattaagataaaaagcgtcaatcctgattattataaatacttatataatacagaaattcaacttcaaaacgaagagttttatctccctaataacgccaatggttatttaggcgtttggggaggagcttacgaggaaacccttacaatcttttagtttttattttctaatccttgaacataatcacacatttccgcctgtgctcgaatagctggagtattaggttctctttcgattctcacattttccaatttctcattgacaagacaagcagaaagattatcagccaattgtatatctaagaagtcttttatttgtttttttaatggttcatcaactattgggaatgcactctctatacgtctgtgcatatttctgttcatcaaatcagctgaagaaagataaaattcctcgtcaccatcattataaaaataaaaaactcttgcatgttcgagaaagcgatcgacaatacgaataattttgatgtttttgctgtatttctgattagggactaaacagcaaatacctctgacaattaaatcgacctttacccctgccaaactggcttcatagagcttttcaattacattcttctcttgcaaaccattcattttcaaaatcatatgggcttttttgccatcttttttatttttgatttctcgctctattaattttatgatattcttataaagattgaattgtcctatgaaaagatgcttgaaacgaggtgaggtattttgattttcaaggtaatcaaacaaattaactaaatcagtaatgatttctggcttcttggtaaaataaccgatatcagaatacaaggttgccgtcttttcattaaaattaccagtacttaaaaatgcataatttgtgctgtctcctttgcgtaaaactaaggcgactttagcatgaacttttatacccgggatactgtagataattttgatacctgcatgttgcatttcttttgcaaaatgcaggtttgcagtttcgtcaaagcgggctttcacttctacaaaaacagtgacctctttaccatttcgtgcggcaccaatcaatgcttcaacaactgctgagtttttggctacacggtattgtgttaccattattttttcaactttagggtctattgctgcttcattaagcattctaatcacataatgataagagtgatatgggaaatgcaataaatattcctttttctttagtgcttttaaaattgtatttgcttcatctaactctttcacattgagatggtgaaatttctctctctccatttcaggataaaacgggttggggaatgaaaataaatcattcaatttaagatacttgccagcttccaacatgtctgtatagatcaatttgaaattgtcctttaagacttccaccattcgtgcaggcatattatgatcataagaaaaacgagaatattctcctacttctcttctcaatacgtttttctcaatattgtcgataatatctccatctaattcatcttctacctcaaaatctgcatcgcgcgtaaccataaatgtatgggctttgtcaattgtatagcctggaaatagcgagcttaaattataacgaacgatgtcgtccaaaaacatgataaaatgacgtccatctctttggggtatttcaataaatctatcaaaatgatgactcggaatgcgaacaatagcgtaccgtggctgtggtttggatgcttttgactttttcttataaagtctaagcagataatatggcacattattctgcaagaatgggttcactctatccttgagcaaaagcatagggtgagtatgaggaattaatgcatcatgaaaaagctcggtgatatacgacttctgattctcatccagttttttgaaatcacggactaaatatatgttatttgatttcaacttttcaattacatcatcaaaaatctgattaaattcttggaggtgactatttaccgtttttctaatttcattgaggatcttaccaggtttagtatcaccgttgcctatatcttcagaaagtcgttgcaactttttgtatgaggcaacccttacactaaaaaattcctcaaggttgtttgaataaatagctaagaaattgatacgttcatacaacggcaactcttcagactttgcttcatccaaaactcgtttattgaaagacaaccaacttaattctctattaaagaaacgataggtattcgtaggcataattccgtatttaaaattttgaacattaaagatataaattattttcgcacactcagcaatacccactcatttagcacagtcttttcacaatttgttaacgctgatttttcgatagcttcttctaattttggaacatcttgctcaagaaaaccgctcaatagcaagacaccatcatcatgtagtctgcttgcgtatttatgcatatcttgtaataaaacattcctattgatattggctaaaataatatcaaatggtttttcatcaacattgtctattgttcccttcagaatggaaaatcgaccttctactttattcagtttctgattctcgaaggcattttcatatgcattggagtctatatctacaccgactacattagcaccctgttttgcaacaaataaagacaaaatcccagtgccatatcccacatctaacacttttttagcagtcaaatccatttttaacaatgcctctagcataaggctggttgtttcatggtgacctgtcccaaacgacatttgaggattaataataatctcatatggaatattaggtatagactcgtgaaatgtgctccttaccaatagtttatcagcgataatcacaggtttataattttcctcccaaagctgattccaatttttatcttccaattttctccacttataatcaaaactcaaagtaggcaccgattgcttcaactcatctagcgcttctttattaaaatcactagctgtgatataggcatctactccactgaggtgttcttcaaaaccctcatagcccatttcgttaagataagcgataaggatctcatttgtttcctttttaatcttgtgattggtaaagctgacaacaatatattccattttctatcctataagtttcggtatttgacaaaaatacaagataaaactcatttttcgttggcatttccgctaaagttcataactttgtttttcatataataaaaatcacaacctaatggaaaaagtaataaaagtcctagaaaaggatcatattgtcatacgattttctggagactcaggagatgggatgcagctaacagggacacaatttgcagctacttctgccctctttggaaatgatatttcaactttcccagattatcctgcggaaatacgtgcaccacaaggcactattggtggtgtttccggatttcaattacatattggacaaaaaactgtttatactcctggagattttgctgatgtgctcgttgctatgaacccagcggcattacgtgcaaatttgaaaacagtcgcaaaaaatgctgttatcattgtcaataaagatgcatttactgctaaaaatattgagaaggcaggctatacagaaaatcctctagagaacggttcattagaacaatataaagttatttcggtgccaatctcgagtttgactaaagaggcgctttctgagtttgacatagatgcaaaaacaatagaccgctctaagaacatgtttgctttaggtcttacctattggctttttgagaaagaactcactcatactgatagttttttagacaagaagtttaaaaagaaaggtaacattgcagcaatcaacaaaaaagtactaagagctggttataactatggagaagcaacccatgtaactgctaatcattacgttatagctccggcaaaaataaagaaaggtacgtaccgaacgattactggaaatgaagcgacagcatggggactaatggcggccactgaaaaagctaacttacctttattctgcggttcttaccctataacaccagctacggatattttgcaatatttagcagcttacaaagaattaggcatcaagactttccaagcagaagacgaaattgctggaatatgtacggctattggtgcttcctttgccggaaatctggctgtcaccacaacatcaggccccggcttggctttgaaaaccgaagctgcaggtctggcagtgatgaccgaactaccactggttattattgatgtacagcgtggaggtccatctacaggtttacctaccaagacagaacaatcggacttgcttcaagctattcatggaagaaacggtgaaagtcctttaatagtgatggcagcaagtactcctacaaattgttttgattatgcttattatgctgcaaaacttacgcttgagcatatgacacctgttatattactcactgacggttttattgccaatggtgcagaaccttggcgtatcccgtctatggacgttataccagaaatcaaaccacgaattgcttcattggataaagaatatcaaccttatcagcgagacgaaaaaaccttagcaagagaatgggcgttcccaggaatgaaaggacttgagcaccgtattggtggtttggaaaaggaaaatataaccggacatgtatcgcactctcctttgaatcatcaaataatgagtgacttaagaaaagagaaggtagaacgagtagccgatagcattcctgatcaaaaaatatacggaaaagacaatgctgagacccttattgtaggctggggaggtacttttggtcatttgctaacagccgttgaacaattggttgatgaaggacatgatgtggctttagctcaatttaactatatccatcctcttccaaaaaacacaaaagagctatttaaagacagaaagaatatcctagtttgtgagcttaaccaaggacaatttcttgagtacctaagaggacaattccctcatgttgattttaaacagtacaataagttgcaaggtttaccatttactgtaaaagaaattaaagaagctatccttaacttgaaataaagaaaacattatgacacagcaatataaatatacgccaaaagattttaaaagtgaccaagaagtaagatggtgtcctggttgcggagattatggcatcctgaattctgtacaaaaagcactggcatctttaccttacccaaaagaaaactatgctgttatttccggtattggttgttcttcacgctttccttattatatgaatacctatggttttcattctatacatggacgtgcagcagcaattgcttcaggagttaaaacagctaatccggagttgaaagtaatacagatttccggtgatggagatgccttagcgattggaggtaatcactttatccacactattcgcaggaatatagatatcacgatgattgtttttaataatgagatctacgggcttacaaaagggcaatactctcctacttcaaaattaggtaaacaaacaaaaacttcacctgaaggaaccattgaaaaacctttccgagttgccgaattggcacttggtgctagggctcgtttcttcgctcgcagtttagacattaacatcaaactatcatcaagcatcataacagaagctatagaacataagagcacagccgttatcgaaattttacaaaattgtgtaattttcaatgataaaacacatagagccttttatgacaaagagaataagttgaacaactttattattttagaagatggtaaacgaatgattttcggaaagaatcatgacaggggacttagacttgatgataatggattcatagaggttgttgaaatcggcaagaatggcattactgaagaagatatattaattcatgatgtggctaatccaaatcctatgattcattggcaattagcagatatggcatatccagaatatccggtagctttaggtatcattcgtaaagtagaagacaaaacttattcagaggagttggaaaaactgataaatgctaagaaagagaaatcttccttcaaatcagtagaagatgttcttactagcggtgaaacttgggaagtagaatagtcttgctaatagaaatataaaacatctttatgtctttggatataaaaagaatacccatacagccaaacagctctgattttgaagagatatgggatatttatatcaattcttttcctgaagaggaacgaaggcatagagatgcacaagaaaatcttatcaaggaaatcccttactatcattgtgagggattattcgattcaaaaaaaataattggtttatttttctggtgggattttccaatgacccgttttatcgaacactttgctacccatacagaatatagaaataaagggataggcaaagtggtgatgaatgattttatgcctgaaaaagacacacctattattttagaggttgaactgcctgaagatgagcttcaacagaggagaattaaattttaccagcgcttagggtttcatattaatgcaatagaatatcttcaagccccctatcgtgtcggggaaccatttagctctctattattagcgtcttatccaacaccgcttacccctagcctttcttcctatttcgcttcagattgtctgcctattatctatcttgaacattatcattcaataaggcaaagaaatcgtgaataatcagtttgtgacttggcataagtcataaaaatgtaactttgcaacttcaattaacccaatagaataggccagctcatgaaagaatcatggaataaagtccgcaataagatagaggttctttggataaatgttttttggcaatatccacaaaggcttcttgctctaaagatagctattgccgttgctttgctcattattccatttgaaattataggaaaacctttctttggaatgacactggcactgggtgctgtggctacggctttgtctgaaacggatgactatccgagagggcgtatcaaagcgctggcaattatgttattgagtttttttgtgtcaagtgcctctgtagaattattgcgtccacatccgctcttatttggaataggactcattggctctactttcttttttattattctaggtggtatgggcgagcgctacaggggaatcacctttggggctttattgatagctatttacaccatgttaggaacgtattttggcaatccttggtactatcaaccgatattactccctctgggtggattaggatatggagttgtctcattggtgttgctttatatccgtccttggaggcttctaaaagaacaacttgcacaaggttatcgaaaattaggagattataccgcacacaaggcaaaattctttccaagtgacccgaagctacaagacacgctaagaaatcagttagctcaaaaaaacattgcggtggttcaatcaattggacaatctagaacggcacttatcagctatgccaaagaagttaaggatcatccggttatgccgatatactacaataaatggttgctcttacaacaaatgcatgagcgtgtagcatctagccatgagcgctatgacttattaagtcaagacaccaaaaatcctcaactcatagaaggctttgggcaattacttaaagaaatctctaaagcaatacagcaagttggcacttcgttacttactgatattccttacaagcaccctatttccttatcttggacaattacagccctgcatgagatgatgcaaagaagtgagagtgatccacagtatccatcacttagtttattgctaaagaatcttactgaattagaacaaacgcttcgcactatagacgaccagcgagtgattacttctatgccagatattgaatatcaatcgcaaccaatagtaacacgcctcaaaaagttaatgaggcatacacatccaaggtttcgttatgcagttcgccttagtatttgttttgccattggttatgcactcatgtacttcttaaagatagaaaagggagactggatattactgacctcgctgttcgtttgtcagcaaacctatagtgaaactcgccagcgactattcgaaagagttatgggaacaatagcgggcgtaatactagggattttattagctcaactgcttcctacgcccacaggacaaattatcttactagtaggctctatatatctctttatgatatggttacgaaagaaatatgcagttgctgttattttcattaccacctatgtacttgcagcttttaatatccaagcagatcaaggaatagcagtaatgggaccacgcattgttgataccttgataggtgcattcttagcttattttgtggttcgtttcatttggcctgattggcaatacaaacatctgccggaattattgagaaatgcattggctaaaaatgaagcctatttacaagctatttatacacccaattatcctccgatgcagtaccgtgaaagcagacaacaaacgcatgaagccgatacggcattaacacttgcttggcgagggataaaggttgagccaaagcgcaaatcattttatgagaaaaaagcatttacattgacttatctaaatcatgccctattgtcttatttatcagccttaggagcccatgcacagaatcaacaatttaatgaagaagaactatctatatgtaaaaatgtgactgaggttttgcaacaggcacaaatattgttagctgataaagacattttacccaatacccctttagtactcagagaaataaaagaatgggaagacgtattgtatgagcgaaagaaggaatccaacaacagacgaatcacgttactatataatctagcccatacggctaaggaactactaaaagaggcacagttattacagcaaaataaagtaacagcatagtttaatgctttggcagtatatggacacaattaactatcattattcttttttagactaatattaaattagaagacaacttagtatttagacttgttctaccatacccccccattacttttgtagtagtgtttaagtaaccaaataataactgaaaaaaaatagaatattatggcacatgttattgatgataattgtattgcgtgtggttcttgcgagccagaatgtccagtagaagcaattagccctggtgatatttatgtaatagatcctgaaatttgcacagattgtggtgcttgcgtggaagtatgcccatcagatgcaatttcagaagcataaacgaagacaaaaaacatcttgaaagactatcctaaatttggatggtcttttttttattccatattttaatttaatcactttacaaacacaaaaagcgacaagtctaagttgccgctttaaatgttttcacaacggaataatccttattgtgaattggttcaatttttatcactacaaatatacaaattcttttcaataaatgaaataacgttttggcatatttttattaaattagtctccataattaattaataattgcaatgaaaagaatattaggacttgatttagggacaaactctatcggttgggcattagtacaccaatcagaagctaaagaagaattatcagaaattataaagttaggtgtaagagtaaatcctctaacagttgatgaaaagagagattttgaagctggacgtcctttgtcaaccaatgcagaaagaacatcaaaacgtggagcaagacgtaatcttcaacgctttaagttaagacgtaaaaaactaattgaaattttaataaaaaaccattttattactgaggagacacctttgacggagattggaaaaggaactactcatcaaaacttagaattacgtgcgaaatcagccagagaaaaagtagaattagaagatttagcaaaaatatttttagccataaataaaaagagaggctataaaagtagtcgtaaggttcagaacgaagaagatgaccaacctattgatgcaatgtcaatagctaaagaaatatatgaaaaagaaattacagtaggacaatacgttcttaatctcttagaagaagataaaaaatatattcctgacttttaccgttcggatttacagcaggaatttgataaagtttggaattttcaaaaacgattttatcctgaaatcttaacagatgagttatacaaagagttgcagaataaaaataaaacacgtacttgggcaatctgcaaagagccttttcaacttgttggtattagcctaacagaaaaaggtgcagatctaaaaaagaaaaagtaccaacttcgttcgcaaatgatagctgagaagttagatttagaattattggctattgtacttcaggaaataaataacgatttgaataaatcaagcggctacttaggtgctatttcagacagaagtaaagagctttattttaataatgaaacggtaggtgaaaatctttggaagcaaattaaagataatcctcatacttctcttaagaatcaagtcttctataggcaagattatttggatgaatttgagcaaatttgggaaactcaagcgaagtatcataaggaactgacacctaaattaaaagaagaaattcgagatgtaattattttttatcaacgcaaattgaaatcacaaaagagtttacttagtttctgtcaatttgagagctggaaaattgataagaaagatgaaaaaggcaatattatacaaaataaattaagtggtttgccaaagcaacaaagaatcggcaggcgtgtaatttcaaagtcgtctcccctattccaggagttcaagatttggcaaaatattaataatcttgtttttcgaagaatgtatggcgccactaaagatttatttaaccaagaaattcagactgactatatacttaaagacgaagacaggaatttactttttgaacaattaaatataagaggaaaacttaaagagaaagatgttttaaagacgcttggattgaatgcaaagctttggaaaacaaatttccctgaaggtcttgaaggaaatcggacaaatgaagcattatataaggtttataaactgattgcagaaaatgaaggctatggatttaactgggacagaaaaaatgcaactgagataaaagaagaattgagtgcgatatttacggaaataggcataaattcaaatatattagatttcgatgcaaatattgaaggtgaagagtttgaaaaacaagcttcatatcaattatggcacttgctatattccgcagaagatgataacaatacaaaaatatcagaagaggatattgaaaaatatggaaatacatctgtaaatctaaaaaagaaactttgtgagaaatttggttttatccccaagtatgcaaaattattggtaaatattccactgcaaccagattatggcaatctttcaagcaaagctatacgtaagattatgccttatttacaagaaggacatatctattctgaggcttgcagtttggctggctataatcactcaaatagcttaacaaaagaagataatgaaaatagagaattagctgattatttagagttattgccaaaaaacagcttaaggaatccagtagtagagaagattttgaatcaaatggtcaatgtagttaatcaaatcattgacgaatacggaaaactcgatgcaatacatatagaattggcccgtgagttgaaaaagaatgctaaagaacgtgagttagcaactaaaaggataaatgaagcaacaaaacgaaatgaagaaattaaaaagaaaatttctgaagattttaatattcccaatcctacacgaaatgatgtcataagataccgactttgggaggaattaaagacaaatggttataaaactgtctttactaatcaatatataccttatgaaaagcttttttctaaagaaattgagattgagcatattatgcctaaagctttaatttttgatgattctttttcaaacaaaacattagcttatcactcagagaaccaagctaaaggaaatagaacggcaatcgattttatcagtaacgataatagccttgacgttgaaaactatcaaacaagagtagatttattatatgataatggaaaaggaactatcaccaaagctaaacgaaacaagttgttgctatcgcaaaaggatttgccagatggatttattgaaagggatttacgcaatagtcaatatattgctaagcaagcaaaaaatatgttgcaaacagtagtaagagagcctgtcgtttctacttcaggaaatattacgaataaattacgtgaagattgggacttgattaatataatgaaagagttaaatcttcctaaatatcgagcattgggtttaacagagtttgaagagagactaaataaacagacaggtaaatgcgtcaagcatgaagttattaaggactggacgaaacgtaatgatcatcgtcatcatgctatggatgctctaacagttgcttttacaacacacaatcatatccaatatttaaataatttgaatgctcggaaagatgaaaatcacgataagcatctaagtattcttaaaattcaaaacaagataacaaagtatgaagatagcaaaagaaaattcatagcaccgatgcctaatttccgttctgaagccaaaaggcatatagagtccattttagtttctataaagaataaaaataaagttgttactataaataaaaattacacaaaaggaggcactgcaaaacctcaacaaacctttaccccaagagggcaactacataaagaaaccgtgtacggtaagtcgaagcgtttaatgacaaaaccaacaaaactaaacaagaattttacccaggagtattgtcgtcttattgcaaacccatacttgaaaggtattgttgctgaacatttagcaaaatataataataaaccagagattgcgtttagtgcaaagatattgaaaaaagagcctattttatataaagataatgctataaaagaagtattgtgttacgaagatatttttactattcgtaaaactatagcaccggacttgaaattggataaagtgattgacttgagggtgcaagatgtattgcaaaatcgcttaaatgaatataatggtaattctaaaaaggcattttctgacattgaaaaaaatcctatatggttaaataaagaaaaaggaattgctattaagcgtgtaaccataaccggcgtgagtaatgtcgaagctttgcatactaaaaaagaccatttaggacaaaacatattagacgagcaaggtaatacacagcctattaactatgttagtacaggaaataatcatcatgtagcaatatatcgggatagtgaaggagatttacaagaaaaagttgtctctttatttgaggcagtagagagagttaatcaaagacttgcaattattgataaggaatataagaaagatttaggctgggagtttttatttacaatgaagcaaaatgaaatgtttgtttttccgacagaagattttaaacctcatgagattgatttattagatattgaaaatgcagacagaataagtccacatttatttagggtacagaaaatcggctctaaagattattggttcagacatcatttagaaactacaataacaaataatctaaacttcacctattgcagagtaacaagtacaaaaccattagaaggaattgtaaaagttaggattaaccacattggcgaaatagttcaagctggagaatattaaaataaaacaacaatgctcaaacaaacgctctatattggaaatccttcctacttaaagttgaaaaacaatcaactggtagtcatctatcctgaactcaatgaggaaaaaggtcgtgcatctatagaggatatcgctttgttagtgttagaccataatcggattacgatctcctctcctcttttggaaaaattgatggagcatactgttgccgttgtggtttgtaacaaggagcatttacccaatggactgatgcttccattagatggacattctgaaatgacagagcactggcgtcatcaactgactgcatccgttcccttacaaaaacaattatggaaacaaactgttatagctaaaataagaaatcagaaaaaattattagataaataccagcttccttcatctgtaatggacaactatagcaatgaagtacagtcgggagatatcggcaatatggaaggcaaagcggctaatcattattggaagtatctttttgatgactttcgtagagagcgttatggcgaataccctaataatttactcaattttggttatgctattctacgcagtatagtcgcacgagcattagtttccagcggattgcttccagccataggtatattccacagcaataaatacaacagctattgtcttgcagatgatattatggaaccttatcgtcctttggttgatgctttagtggtagaatggtatcaatcttatcctacatttaaagaactttcaaaagaagcaaaatttcatcttttacaattaccaaaactagatactattatcgaagggaaaaagcgccccttattggttgctataacaacaactacggcaagtttgtataaatgctttacaggagaacgacgactgattagctatccggaattatgagaaaagaacgatttaatgcatacagaattatgtgggtacttgtattatttgaccttccaacagaaacaaaaaaggaacgacgtgctgccagccaatttcgaaaaaaattattagatgatggttttagcatgttccagttttctatttatttgcggcattgtccgagtcgggaaaatgcacaagttcacataaaacgtgtgaaaaattttctacctaaattgggtaatgtatgcatttttcatattacagacaagcaatttgaaatgatggaaatatttcatggcagaaaagaaatagagaaaccacagccagttcaacaactacaacttttctaaaatatgattcctaataacaaataaaaaccactgaatatcagtggtttttatttaggttgtgattcctcacaaagttaatgataaaattgaaaccaattcacaacggatgttaagaaacatatggaaacggatgagttgtgattcctcacaaagttaatgataaaattgaaaccaattcacaactaattgagcttgtgcctaacaccagttatggttgtgattcctcacaaagttaatgataaaattgaaaccaattcacaacaagcagcggtaatgcctaaaacagcaagtcgttgtgattcctcacaaagttaatgataaaattgaaaccaattcacaactatttgattttgaagtgcctaatgaacgtagttgtgattcctcacaaagttaatgataaaattgaaaccaattcacaactatcaagtggaacatgattgaatggttactgttgtgattcctcacaaagttaatgataaaattgaaaccaattcacaacatcgtttcctcgataattcgtatgtgttttgttgtgattcctcacaaagttaatgataaaattgaaaccaattcacaaccctttgctatttaaggcttacagagcataagttgtgattcctcacaaagttaatgataaaattgaaaccaattcacaacatgattcattaaagcaaaccccattaggagttgtgattcctcacaaagttaatgataaaattgaaaccaattcacaactaaggagtctgcctattttgaaagcttaaagttgtgattcctcacaaagttaatgataaaattgaaaccaattcacaacaaaattcaaagaagggattaaatgtattgtgttgtgattcctcacaaagttaatgataaaattgaaaccaattcacaacgactaatggagatattacaaatcctaaagagttgtgattcctcacaaagttaatgataaaattgaaaccaattcacaacattaagcacccaaacaaaaaatttccctacgttgtgattcctcacaaagttaatgataaaattgaaaccaattcacaacgcattttgttccattgtatgtcattccaatgttgtgattcctcacaaagttaatgataaaattgaaaccaattcacaactagcaacacttgaaagcacaggtataggcagttgtgattcctcacaaagttaatgataaaattgaaaccaattcacaacattttcttttagaatgtcaaaaatgcttttgttgtgattcctcacaaagttaatgataaaattgaaaccaattcacaactaccaacacttgaaagcacaggtataggcagttgtgattcctcacaaagttaatgataaaattgaaaccaattcacaacacttccttatcaactctgccacccaacggcgttgtgattcctcacaaagttaatgataaaattgaaaccaattcacaacagaagattcaaaatgttgaaagtttaaccggttgtgattcctcacaaagttaatgataaaattgaaaccaattcacaacgtaaacgttgtgatggtgtagtctcttcttgttgtgattcctcacaaagttaatgataaaattgaaaccaattcacaacggattttttatgacaattttccatttgaagttgtgattcctcacaaagttaatgataaaattgaaaccaattcacaacaaattccctatttgcccaacaatccaaaggttgtgattcctcacaaagttaatgataaaattgaaaccaattcacaacagtggaacgataatgcctgagcaaagaagtgttgtgattcctctcaaatattaccgcattattattagtgtttgaagaaaaaaagctcaaattttggtttgctatttatcattaaacaaaaagagcctcaccgaagtgaagctctcttgcaatgattaaaattcagttgataattatttattatccagctctcgtaacatttctttaacggcagcttccaattgttggtctcttccgttggtcacttcttctatttcattacgaacttttaaatctggttccaattgttgattctcaagatattttccgtccataccttttgcacctacttgtggaattccgaaaacaattgaattatcaatctgtgtttcccaccatactgctgtaaacgttccaggaacaggcattcctaccaatttacctatacctaattctttgtaagcataaggaaatccgtgagcatcagagtagttcccctcgcccatcaacaatatactcggtttgctccatttaaataaaggttctgttccgataacttgtcctcttggagttagtgtccaataaggtttaccacttaaaagagttactaaatcatcgtgcaaccatcctccaccattgaaacgagtatcaacaactacagcttctttgtcagcatatctacctaacaaatctgaatagacttcacggaagcttggactgttcatgccctttacatggacataacctaaacgaccgtttgaaagacgttctgtttctgctcgcattatttttacccagcgattataaagcaaagtattttcttctcctctgctaattggctttattacttcatcccatttttttcctcctctggctaatgaaataacaacattttcatcttttttgcgattaaggagtttaaagtaatcattattcggattaatttcttccttgttaatatgagttatcacatcaccaactttgatgtcaagctttgctttatctaaaggtccattctcaagaatttctgcaatcttaattccttttttattataatcgtaatcaactaatattcctaaagatgctgtattgtctccgttggaatcacgatgacgataacgtgcacctgtatgcgaaccatttaattcacctaaaagttctccgagcatttcagagaaatcataattattattaatatgaggcagaaattttgcataatttttcttcaatccttcccaatctaaaccatgaatatcaggatcatagaatttacgcttcacttgacgccaagcatgttcaaaaatatactcacgttctcctgctttgtctaattcaaattctgcagagtagctaatgttcttcttcttttctgagcttattggcattttataaatactacctccagaaacgaagaataagttttctgcatctttatccatagcaaatccgccaccgcctcctttgagtttaaaaaccaattcagttttattttccaataaattcttacgccataaatcgaatcctccttcgaacctgctcatataatatagcttcttgccatcaggagttactatagcatcagagagttgagaagagttaatggttaaacgctccactctatcctcaataccatcaagttctattttgattggctcgaaagttttatcatctttctccttgcttttgtctttctcttcgtctttgtcattgtctttactctcctcatccttgtcatcatccttttctaactctttttcaagttcaaattcttctttggacaattgaaatttatcataagcctcttgagttaaaaacattgcataaacatcatcttcagctccccagctaccatggctacgatatccggctttgtcagatgtccaaataatcatctccccatccatcatccactttggaatattgtcttcatatccgctttgtgtaaggttaataacttcctcgcctccttttgcacttaccaaaccaacttcacctatccaaagattcttatcaagatatcttaccacaaaccatttaccatcaggagaccaatcataccattggtcaccatcactatacgagaagttcagtttacttggaacaatagttcgtgtttttttactatccaaattaatcacacgtagtgctgctctattttcaataaaagcaacttctttcccatcaggagagtagctgggctggaatgtttcctctggagattctaaaataacttcttctttcaataatgttgaatttgcaaaatatttttcttcatctcgcacttttttcgtttgatatagattccaacttccgttacgctcgcctgcatataagatagcatcaccatcaggactaaaacttactgagcgttcctgctctggtgtgtcagtaatacgttttgtagttttatagtctgttgaagttacaaacacctcacctcttatgataaaagcaacctctttaccatttggagaaactgccatttctgaaatgcctgaacctttacgtaaatgaacaatctcattagcaacatcgtctacaaataatgaaacgcttaacttttgaggtttctcatttggcagttgcgtatagatttcaccattatatgaatagcatagctttccttggtctgagattgttaaaaagcgtactggatgtgtttgaaattttgaaacctgagtaattgctgacggattgtcaataggcatttttgccacattaaacgttccaaactgctcagttaaataatatatattgccattgttatcagatacaggatttctatcttctccaggaaatgtagtgagtttagtatgcttctctgttttagcatcatatttccacacatcacgagtcactgatgattgatggtgtttgcgccaaggatcctcatatcccttcttatcatgatataataatgttttttgatcttttgtccacactgcattctctgctggtgaggttaaaacctgagttaattgtcctccttttaatggcacttgatatagctctggaagaactccagttggaaacatatagttgtcaggatcatcttgaatcaatgctgtaaataagacatatttcccatctggtgttatactctctggtttttcacttcctgaatggaaagttaggcgagttgcgctaccaccgatagcattcattcggaataggtcaaaatttccatatctatctgaagcaaaaacaatctgtttgctgtctggtgtccatacgggttgtgtatcatgcccttcgtgccttgttaattgtaaagctctcccaccccttgttggtacaacaaaaatatctccttgataagaaaaagcgatttgctgaccatcaggcgatattgctggatatcgcatccacaagggtgtttctccccatgcaatccatgaggttaccatcataaaaaagattaaaaatactttcttcatatttgttttaatttaaggttatactattaaattagacgtaaagtttaagtttatgttacaatgctattacggtattgtcttttcattaaattaaggttaaaaatacattcaatattctaaaattgagatatgttataagacattttcctattttttatcaaaatataattagctttgcaatcgattattaggtgacagagtttctaataatagaaattttgtaaaagggaatacggtgaaaatccgtagcagtacccgctactgtaagtcctacaaaaacgtttttatatctaaatgccactgttattgtaatgggaaggctataaaaacaggacgagccaggaaacctgcctaagtatcataatattacgtaaaaatgcttccgggaatagaagtaagattacaaggattgttatgtatctacaatacatcatctttttagtccattcttgccaacgcatttttaacattgattaatttataacttaaatatttgactatgttaaaaaaaacaatgcttatcgcaacgatgctcataggattatggacaaatgcacaaaatttagtacttacgggcaaaattactgatcaaaaaacaaagcaacctatagaaggggtaaatgtttttattgaaagtctgcaaaaaggaaatgcgacctccgaagatggaacctatgctatccgtattcctaaagcaggtaaataccgattgcatgtgagctttattggttacaagacagaagaaaaacttattaatatcacacctaatagccatactgcaaatttttcattagtgaaagacgtgagtttattggacaatgttgaaataactgctaaaaagaagaaaagggcatcagtagctaaaatagatattcctctaaaagatattcctataacaactgcacaagtaagtcaagagctttttgaccaagtacaagttaataatgtaaacgatgcattacgttatgttacaggtataaaacccactgtaaattatggaggatttcagaccttcaaaatgcgtggatttggctcccctataatgatgcttgatggtgcgagagatgaacggatgaacctatcaaacagtgcaccagtgacatctttagcagcggttgagagaattgaatacttaaaaggcccaagctctgttctttatggacattctgcggtaggtggaattatcaatatcgtacgcaaacaaccaattgaagaatttacagctaacttttcaggcacctatggcacttggaacaggaaaagaacacaaatgggtgctgggggcaaaatttgtgacaaattaaattatagactggatgcgtcattaagtgatagtgaaaactggagagacaatgctacaaaagctgcaaatgcttacttagggcttgattattcaattaatactaagaataaaatagaattccgctgggcagtaaatgatgacttttatggtactgaaacgggatttccaataattacagactctatctttgacttgaatgataatcttacttatcaaccagcagattttccgaaagaatttagcactgaacaacgctacaacgaccctcaagatttcttaaaacataagaattacaacctatcattgaagtatattcataatttctctaatgattctaaactatccatatatgcagcctatgctgatgacttaatagattatttctcgacagagtcattatcttatcctactgatgattctcctgtttatgataactatttcttcaagaaaggaaagaagaaatatattgatttgacaaaattgcaacgaacttttcctctacgtttttcacacgaaacgagatcctttcaaaactatctagaatatactatgaagtttcttacaggaaatataaagcacaattttcttggaggatattatattatgcatttagatagagttagttttaagggctataatttaggcacagatgtatttggtgacggattgtacgccaaagttgatattaaaaaccctatactaaaccaagggaatttagaagaacaattttctgcagcaagtatatatgatgaactcgttaacagtctatatatacaagatttaatggatatttcagaaaaactcaaagtaatgcttagtacccgatacgacaattatgatatggattatcaatcggcatcggtaagctcaggcagagaacttactgataaaagtgagaagaaaactcttatcaacaatgcttttagttatagacttggtttagtatataagcctagtaaggacttgtctctctactcttctatttcaaattatttcaaaccaaacagaagcacttataatccaaactacatttatattgacaaagatggtaaggaatttttccctaaagatggtaaggagatattcaagccagaaagcggttttcaagttgaagggggatttaaatacaactatgaagaaattcttgatgtgaactttgttgcctattacatcaaaaaggaaaacattaaaacatatcttggaaaaacagatgatgacaaacgaatttatggacaaatcggtattatagattctaaaggttttgagttcgatgcaacaatcagaccaatcaagggtttaagtttgactactggttatacttattccgatgctaaatatcaagatttttctgctaacccgtataatacagaaagtaatgaaggaaatgtactaaataaaaatccagaacatcaattttttatgtggaattactacacaattcctgaaggctttttacaaaatctaagcttaggtttcggtgtaaactatactggtagtatgtttactaatactgacaatacttatgagttgccagaatattggcttgctgaagctagtataggatattctttcgaaaatgtctatttaagattgaaagcaaacaatatctttaatgaaaaatatttttcgaattctgttttttcaacacagtttattcctggagaagaacgcaactttctttttactgttggttataagttataaggatgaagaaacttaaaaaaatcattataaaatcacataggatactaggctctattctgagtctagtatttcttgtatggtttatctccggttttgtgatgatatactcaggttttcctaaaccagataaggaaaaagcctttgtagcacaagaaagtctaagtaaatatgctgacaaaatcaaaagcttgtctatagattcaattgcaccacaaaatgcgaccttagcagtcttgcatcaaaaacccgtatatctgcatagatacaaggcgattgatgcaactaccttatcccctgtttcttcatttaaaacagaggctctagacaatcttatcaaaaaaaattataaagccaatattaagaaaaagaagattatcaatgattacgatagttggattccttgggcacgatatagcaactactttcctattcacaaatattatttagatgacaaagaaaagacggttgtttatttatcagaaaaaacgggaacagttgttcaagaaactactgaaaaaaaacgttggctcgcgaggtttggtgccattcctcattggctatattttaaagatttgagagtta

SEQ ID NO: 2185 - DNA, 24203 bp, synthetic construct
  misc_feature 1..24203: note = Synthetic
  variation 17645..17676: note = n is a, c, g, or t
  source 1..24203: mol_type = other DNA
tggtgtctcatgcgtcattcaagaagctttcaagcagtaccaatcagtcttcttatatcaggaagatgaaaaagtatgtaggttggaatgagatggttgaaaataaacccaaccaattaggcgatttaatcgcacattcttatcagatccttgaacaaaattataggcacgaatatatctacaagaataagttgctcaatgagtatgtcttgaaaaactattccttagatgacaccattctactcaatgagtttcgtgttggtcagtccattgcagatacggtgcttgtcaacggaacgaataaggtttttgaaataaagaccgagctggattcccccgaacgcttagaaagtcagttgaacgattattaccgagcttttaccgaggtttatctatttacgcacgtttccttgctaaacaaatatcttcgggtacttcctgcttacgtaggcgtattgatctatacagaagagggagaggtttctgaatatcgtgctgctgtcaaatacacagcttgtcttgatgccagctatatgatgtcgtccttgcgaaaacctgaatatagccggcttataaaagaactggtagggtttttacctgacgtaacaccagtattttattatcgagcatgtctggaaatattaacggagttgccagtagaagaagtccaagcaatgtattgtcatatcttaaaaagtcgtattgatccacaaaccaatttatacatgactcttggcgatgtaccttcattcgttaacttctctttttatcaggcgaaatacaataaaaagtcgtatcttactttgattaataatctaagtaagaacctattattataatgcgcttatgtatttcccgtatctccgaggtaagcaatttgagttaattgcattacgtgaacctgtagggcttccattaaacccagagaagatcattcctattattgaaccggtaaagaagaatacctcatcgctaaggacagcacttaaagctttaagcgggctaatatccgtgtacagttggtggtaaatactgagcatggagaattaaaaggtgacagtgaatccatttctacttaacacgggtttctttgcacgagtccattagtatcggacgatttacgttaaaggctcaatttgcaggtcatttccttaaaaaatattgaagattacggaccatttgaaattcaggatcgtggatttgatattgaggagtttatgttggtccgatcttatttgttaaaactcgaagaagagttgtcaaaacccgttcggaagcaagatgtaaaccttgattacttgcctacccaatatctttttgagtatattaaatcattaggatttcatgcggtagaatatcgaagcgcaatgaagaccagaggctataacttggcagtttttaatgatactgacttagtttgtacggaagtgaaacattatcatgtgaaaggcttgaaatataattggtaacatgcttatgtttaattttttaaactagatttttatgtgtacggtttcccgtaaatagtccttctttcaaaccaatactttagacttacagtttgtaatcatagctataatatcccatccatgttaaattgaataaaaaacgataaagatgaaaaaagcagcaattttatttatgatggttttaatcacaggatgtgttttctcccaatctaaggataatagaaatgaatcaggtagacaccttaagccagctgggttaaataaattttatggtacctggaagtatgaggggcaggatgaagtgtttactatagttttagtaaaagaagagtattttaataaaattaatggtgataagttagatttcgcagttggttaccattcttataaaaaggatggtgcgttgatcgatggttatgacgttggtggtaagaataccataactaccggatcttttgataaaaaaatagataatgaaaatgtattatcttttcgatttagggaaactaaaaatcatgttaatgcccgaggaacattgacttatgtcaaaggaaatcctgatagactagttttgaaacttatattagcggaaggtgggggaatgataagtatagatggtaaaggtggtcaatataaacttcacgttccgaataatattgagttgaaaagagttaaatagaaaaaattggtttataatgcattcgattgatatttagataagtacaagttagtgctaatttaattgcttatctatgtaatttatagagaagcaattttttaatctaaagtaagcttaaagaaaccgtttaaagtggttggccaactttgatatttgccttagccctaggatttgtaaaaatcttgaaagttaatagcagtaaacgtattaattcggcataccacgaccaatttcagccttccagttgcaccattttgctccctgctccgagaaaaccaataatgaaacttcgcctctttgatcccccttgaaccacagtactgcttcttcctcatagcgctctgctgccaatctgccatcatcgacaggatctgatctctttttccctttgaactcattaaacaaaactcggaattataaaacgttcataaaatatgcacttggttgggcggatacttatatacttgggaaaattgagtataatatattgaaaggatcaaaatataagacttattattccctcaaatatgctggcgatctgttgtttttgaaaaagaaatttccgatgatagacaaatttgtcctaagtaatagattcgctaataatattgaagtccctaagaaggaaagaaattttgttttagtcgtagaaccattgtccacttcgatcaaaccgttttcgcatacaggaccagtttttagcggtttccgacactcatttttactaaaatttgtcaaacgtttaaatacgcagtataaggaaataatagttccttcaggagattcaatttaattattcaggccatagtcaataaagacggtactcttggaaaaaaaatgcttttgcatggaaatgaagatgatcaattgtagcgatacctatgtgaaaattatgaagcatattaagccgaggatagtgttgaccattaacgtcgcttgtttcttccatacaaatcctggggcaatcctttcacgagtgttattgagatttttgtacgcttaaatcctgataaaaacatttacttttgatggtagtggtagagaaagggagttgcgtattaaagattatatagaagatccaaatgatccgttacaagtattttaatgttattacagggtattatgaagtataataagcaatttttgagtaaacagagtcaataaacttaaaatttaaattaatatgagaagagaacttaaaatagcttttgacgagctcgaaaaagaattactggtgatacctccggatgatttattccgttttataggcggttttattaccggatctagtttaattggaagttctggactttcagcccatgcgtcgcttgatgaagtggtagactacttgaaggataaaggaatgaaatttttagtagacattgcctctacattggacaaagtgaaaaagcacctgtccttttagaagtcgaacaaaagagcttattatagacataaaaaaaaatcacaatatgcgcacactagccattgcactattttcagtggtatttattttctcttttaactcttgcacttccatatcgcccagatatttagcacagaatgctgcggtacatagcgtttcgaaggtaggcttaaaagagacatacatttttgataattatccccagaagataattggccataatcatagcagtcagcagaagagtgcagcctataatgaatactgtctatcgaactatattgaaccaaattattataaaacggatagtctgcactatctttacagaacttcattggagctcacccaaagaaataaaatccatttcaaactaattgatactttatgaatgtcgtgcgtgaaagaacgaggaaagttaagcccgaaccgcaagactttgtttcttccagaaataccgatcttgaaatctatgtattagtcaataggttcttcaccaaaactatttgctttgcactagataaacatggtgatttagtagtgcccagtgagtcgacagcagccggctttcttattctctttccgctcgccggcacccttaaccatgatgcatatacttatcgtcgtatggatacaattgccaattaaggcttatggtcgagcatatcctatttagaagaaggacggtgatcatcgtttgctagagcttcctaggcttggaattggtgagggtgtaagtgatggtgtaaatgagggagtaaatgatgacgttatacctagcggaagtgagggtgtaaacgatttgctaaaaatacctgttaccccaatacatacccgccatcccttggttgttatatgtttgttataaagtacttaacaatgtatacttgaaaataaccacccattaattgagttatctctataacctttggttcacgatagagcgcaaaattatcgaatatcatcttttatccacttcaattccccacgttggatcatagcgatgtacttttgcgcgtgatcattggtgagcaggctattgtcttcaatgtggtaattgaattgcttcgtaaaggtgaaatactgaatacttcctacataggcattattgagataaatgtgccaaaagccctcttttttcgcgcgtacctctactatctcgattttacctttatgatagaatagctcgggcacgtcatcatcaaaacgaagtataagcgcatcaatgcttgctccttgatgtcgtccgctagttgtccatatgcaagctcccaaacaccttaagatttcctgaaaacatacaaggtaaggccatttttgctgtaaagatgatagcctttcatgcccattctcttatcgtgtacagtcattttagtatatttggcggcgtcatcttcggttttcacagaaaaggagataagcttccatcgtgcagcaacgatgctgtcctgactcacgttgacggatcataaggtatattgggtaaaagcctagattttggtctaggcttttactacaaattaattaacctgtgttggttttggatttattactactattggaaattcgatagttgcatatccacatcccggaatgttcgcggttacctgaattgtggtatttctttctgtttctcctggtgcaaaagcataattactgagtacagtatatttaactttcgttggcgatattatctgcacattcataccgctagtaccagtgaatgttagattttgataattcgaaatattatcgtttaaagtcaaattgtattcgtaactttttccagggaaaacagtcgtagaacctgaaatacctccgttaatccttgctccgatcattatttctctttcaaaaattttaccgttttttattgatctcaaactaacaacgccattcgctgtacctatcctagttactttccactgattatttcctaatgctgttaacgttgcaatccctgacgcattttctaaactaacagtataaggattagaaattgtataaataccctcatcgcaaatagaagctggtccagtgaatgttgatcctggaatttgattaggatttaattttacaggggtatacattttatttacccaatcagtccatccattgatattatatggacttggatatccctctttgtaaaatctccattgtgccaaaatacttgtacttggattcgccagggtgactgcacctgctggaatgactatttctttttcaatgactttagaagccgcatactgtggcccataccagtcagaatttgaaatgtttataacactaatctgtgtatttggaccggaagagtttaaaaggtacaaaccaatttcagctttgattggtaagtctggccaaagattcgttgtagctgatagtgcccttgatacagtaaaagttgcgtaaatcgttgtaggttggttataatttagtagaatttccccattttcttttggtgcaaatggatacatcacagtttctaaattgataagttgggcagtagcgaatttacttagaattagtagagcaatgacacttaaaattttaactaatttcataacttttctgctctagccgttctcaaatcttgcgcaaatactttcaaatcaatttttaattcaagataatctatattcaaggtaaatgtcgcagcactgtagtaaatactgtcttttggtacattcagtatttttgatgttgccctataaacgaattctttttcgaactcttctccgtcaattaggatgatatcatctttaggtttggtcgattcttccttcttacacgcgccaaggcctagccctagcagcgcaacaaatactaaatatcttttcacgtggtaatataatttagccattaagataaataaatttgagatggaaagtgtcattaatagagaattactacccaaaagtgtagagtgaggaatagtaaaaacagtggatatacacctttcgcactcgcgccattgtaccctgtataacctttggcgataaaactatccattttgatcctttgataggtgcggcctattaattaaatcttcgtgatgcttgttggagaaaaattaacttaaaactatatctgctaaaaattaattcaggtaagatttcccgtaacccaacattctttcagactaataacttgatcccaaaattcataataatcttgaaagttaatatatgaaaacatcttaattcagaataaataatgtatattggtgtgatttaaattaatgatgaaaagaattactttattatttatgatagtgggactaggtttcacttcatgtaaaaaaacatccgagaattttgagtctcccttagacctaaatctgaaagcaggaataacacaccctcccacggatcctttggatcctaatgatgatcctggttacgaactttctttaggcggtttaggggattgtatacaaaataactacactgatggtgatgctttaagagcatgtatcgcaaatattccagtgaatacaagtaagtttgtatttccatcaaaaacaaaaggtcaaaaaccgctaggacctcctttatctacaaatagcgcaaatactgtgcattttatgactgaaggtacctttcaagatttaatggcggatgctgtaggagttactgtatcacaaaatctgtcttcaccaataactttatctactcaagacagtattgatctttttctaacactctatgaagatgcggataaagcaatcaaaaaacttcatgatccgttacttggaactacaatacaagagcaaaatggaaaagcgatttttaatctcgctttaagcaatgcatttacctttaatttatttaatagtggaggaggagtattatatccaagttatggttacaggtatgttgtatcctatgctaaggggacattgaaattaccattaagatggaaacaatatggtttcgatttccaaggcacttataccaatttactttagtacattataattaaaaaaataaacatgccactacccagtagcatgtttatttttaagttactgaatgttttactcagataatggttggttgcaatttttacagtaaaatattcccgctgcgataattgccacaagcaaaataagactcatagtttattcttctatgtataaggagatggaaatattgcccgtatgtgcttcatacataatcttattgaaatggaattgcagcaataaaatggacacctagttaagctgcaatattttgtttatttatttttctggcaaactgctctggttataagtatcctaaagcagaatgttgcctttttcggttgtaccaagtctcaatatattcaaagacaataagcgcagcttgctccctgtgagcgaatttatgctgatatacacattccgccttgagtgtcttgaaaaaactttcagcgacagcattatcccagcaatttccttttctactcatgcttcttatgatgagtggatttttttccagcatagagctgaactcatgacatgcatattgtaggccacgatcagaatgaaatattagtttctgggtgattggccttgctttttgtgccatgttaaaagtagaaatcaccgtatctaccgcattcatcgtcccacttaaagcccatccaattacttttcgatctcctaggtcgattacagttgtcagatacaaccatccctgctgcgttttgatgtaggtaatgtcagatacccatactgcaccaagtgtgcccggcttaaaatcacggtccaatatattctctggtattgaaaacttatgggtggagtctgtagttaccttaaactttttcttgacaatacttcttaaccctagctttctcattagtttggctaccctcactccggatattttaatattctttttttgtagttctctggtaatacgcggactgccgtaagtctttttactccttataaatgcatcctgtatttctatggtaatctgttggttatcaatacttctctttgaagagataccctttgaaaaattatagtagcccgctctgctcaccttgaatacttgacacatcttctcgactgaaaatatttccttattgtcccttatgaacctgaatatttggtgtcgctcttggagaagatgcttacagccttctttaatatatcccgttctatctgtgtctcccgaagttcttttcttaagcgtgctaactcctgttcactctcactcaggataacttttccattgccagggaaactacttccttgttttacagaatattcctttcgccacctatacaataatgctggggtaatatccaattctctagccagcgcactaaggtcacttcgtgtgttgctcagttcaacgctcatcagtttgaactctttagtataaacttttctttctcttgacataagtccgttaagttattaaattctcttaacttaatgtctagtcaaatgtagcaacttcagaaggggggcaaagctaagtttgaagacggttattatgacagattgaatcattgggttgggaaagatgaaaaacgaaaagctcaagtagatttattgttatcctatgcgaatgaacatggatttattccattgtatatgttatataactatgtcaattctaaagagattaagagtaatgtagataatgaattatttggatgcacagtcgttaatgcaaattatcttaaaatcaatcatactataaatggaaacttagataataagctcactttctcttttttgcatccaaagaatggttttccctggcacgaattaatctgtggaaaaccaaatattttgtctcaactaaacaataacaaccctacaccattgaatcagccgagttcaagcttggttaactattttcaggcattgagcctatcagatcaatggaaagaaatagatttatcatatcctaaaatttatgatgataaaaaggatcaggatgtactttaccgtcaagaatatacaaacgatgaattgcagcaagcagacaaagaagatgtacctatagtcttcctccctaagtttaaaatagttattcaccaaacaaaaagttaaatggtcgcaataaaatcttggaaattaactcaaattgtatgtttaagatgtggtataactagacctacactatttaggagcttgctaagtagatttctgaatttttagcatactaaatgcaagatctttgattaaaaattgacttaaactattagtcgttatcactcgcaaaaaacagctagtgggttatttcgaaaataaaaatgccccgtagatagacgaggcgctaaatgtttacacaacggaaataatccttattgtgaattgctttcatagcaaatatagaaaagattttcgtatagcaattatggtttgccgtaaaataagagaatatttttatttagtattgaataatattgtaccaaattgatcatatgatgaaaagaatacttggacttgatttaggaaccagttctattggttgggcatatgtattggaagctcaggatgacaatgaaatttccaaaattgaaaaattaggcgtacgtgtcaatccattaacgacagatgagcaacttaattttgaaaaaggcaagcctataacaaccaatgccggccgaacgttagcaagatctgcaaggcgcaacttacaacgcttcaaattaagaagagacaatctcatcgaagtcttaaaaagagaaaaatggattgacgataaaagtatattaactgaaaacggaaataaatctactttcgaaacctatgcacttcgtgcaacagcagcatccaaagaaataggactggaagagctagcccgggtattgttaatgatcaataaaaaaagaggatataaaagtagtcgtaaagttaataaagaagatgaaggacagttggtggacggaattgaagtagctaaaaagctttaccatgaaaaccttccaccaggagcatttgtatatcaattactaaaagaaggaaagaaaaagctacctgatttttatcggtcagatctgcagcgcgagctagacttgatctgggatttccaagctaactattatcctgatctattgacaccggattttaaagaagagctcaaaggaaaaggattgcgggctacatctgctatcatttggtcaaagtacaaattcaacacagcggagaataagggaacgagagaagagaaaaagattcaagcctaccaatggcgaaaagatggactgacaaagcaattggaaaaagaagaggtcgcctatatcattgcagaaattaatggacagctcacaaactcatccggatatctgggtgccatcagcgaccgtagtaaagagctatattttaacaaacagactgttgggcaatatttatttaatcaactgcaacaaaatacacatgcgagattaaaaaatcaggtattctatcgtcaggattatttggatgagtttgaaaaaatctggagtgtacagagccagttccaccactgtctcaccgaacagcttaaagaggagatccgtgatatcattatcttttatcaacgcaaattaaaatctcaaaaaggattgataagcttctgtgagtttgagcaacgcgaagttgttgtcaacggaaaaaataaagttataggcttacgtgttgcccccaaatcgtctcctatgttccaggaatttaagatatggcagcagctcaataatgtaaagctcaggaataagacgaacaaagaggtttacaatctcgcagaggagcagaaaaaatacttgtttgaaacgttgaatctcaagggaaaacttagcgctcaccaggtcttaagtttaatcgaaggaaaacccaaagaatgggaattgaattatactgaacttgaaggaaatagtacgaatgctgcgctatacaacgcctatctggatattttggatatggagggatacgatgttcgtaatgaattaaagattaagctcaacaaggacgaaattacattatccgatctagataaacctgtatccgagattaaggatatgattcggagaatatttcagcatttgggcataaatactttcattttagattttgatgcacaactgcaaggcgatgattttgaaaaacaattgtcttatcaattgtggcatttgctctattcatatgaggaagatgactctaaaacaggtatggatcgactctataatcagttgaaccttaaatttggttttagccttgatcaagccaagattattggtaaaatcgccctacaggatgattatggaaatttgagcacaaaagctatgcgtcagatttatccctacattcaagatgctgaatacagtgctgcatgcaaactggctggctacaatcattccaaatcatctttgactaaagaacaacttaccaatagagtgctcaaagaccacttggatattctacctaaaaatagtttaagaaaccctgttgttgaaaaaatattaaaccaaatggtcaacgttgtcaacacgttgatcgatactgaaaatgataagcttgtacaagaaggtaaagaagctgattttaggtttgatgaaattcggatagaactggctagagaattaaagaagaacgcaaaagagcgtgaggaactgacaaaagcaattaatacatcaaaggcagaacacgaaaagatcattaatatcttgcaaactgaagatggaataaaaaatccaacgcgtaatgacattattcgtttcaagctttaccaagagctgaaaaataatgggtataaaaatctttataccaatgaatatattcaacgaaaagatctatttaccaatgtatatgatatcgaccatatcattccgcaatcccgattatttgatgatagtttttctaataaagttttagttccccgaaatgtcaatattgaaaaaggaaatcaaacggcatttgattacatccatacgaaatttggcgaagatgggattgaggcctatgaggcaagagttgaaagattgtttaatttgagagaagagggcgtatcccgatccaagtatagaaagctgcttatgcgcggatccgatattggcgaaggttttatcgagcgagatttgcgagattcgcagtacattgctaaaaaggcaaaagccatgctttttgaaattacaccatcggtcatttctacttcaggatcagttaccgatcgattgcgtgaggattggggattggtcagtgtgatgaaagaattaaacctgcccaaatttaaagcggttggtttgaccgagtacctcgaaaccaaagatggtaatagaaaagaagtaatcaaagattggagcaagcgaaatgatcaccggcatcacgctatggatgcgattactgtcgcttttactaagcatagccatattcaatatctcaatcatttaaatgcgcgaaagaatgagaaaagtgagtttttcagtaccattaaagccattgaaatgaaagagacctacgtggatcgcgacgatttaggaaatcgaaaacgtttctttaaagaaccgattgctcatttcagatcaattgtcaaagcgcatttagagcgtattttagtttcacataaggctaagaataaagttgtcacaaagaatcgcaataaaattgacggcaaaaaagaggcgcaagaagttttaacgcccagaggacagcttcataaagaaaccatctatggaaagattctgcagtatacttcaaaagaagaaaaaatatcagcaaaatttgatgcggcaactattgctatggtttcaaacccaagatatcgctcagctttattagatcgcctcactgcatacggtaatgatcccaaaaaagcatttacaggtaaaaattcaccgattaaaagtccgatttattttgaccagcaaagacagcttgctgtccccgaaaaggtaaaattggtttggttagaagaagactataccattcgcaaagcgattgggcccgatttgaagatcgaaaaagttatagaccgaggagtaaaacgtgttttagaacagcggctatcagcatacggtggagatactaaaaaagcattttcagatttggagaataatccgatatggttaaatgaggagaaaggaatagccattaaaagagttacgatatctggagtcaagaatgcagaagccttgcatacgaagaaagatcattttggacaggtattaaaagataaagatggcaacactatgcctgtagattttgtaagtacaggaaataaccatcatgtggctatatatgcggatgaaaatggcgcattacaagaaaggatagtatcattttatgaagccgtagctcgtgtgaatagcggtttttcaataattgataaagattataatcaacatttgggctggaagtttcttttctcgatgaagcaaaatgaaatgttcctatttccttcggaagactttgatccaaaacaaatcaatttcttcgatcgcaacagttacaaattgattagtgaaaatctttttagggttcagaaatttacgataaaggattactttttccgccatcacttggaaacaaatgttgaagataattcgaaaaccaagggtaaattatggagacgcgagggattgaatggtataaatggtattgttaaggtaagaattaatcacttaggtgagatagttcaagtaggtgaatactaaaatgcaagggcgatgataaaacgtacactagtattttcaaatccgacctatctcagtcattccaataagcaattattggtcacttatcctgacaaagaaaaggacagtaaaactgttccaatcgaagatataggtgtactattaatggaaaatcagcagattaccatttcacacggatgcatttcggcgctattagaaaacaatgtagccatcatttcatgtgacagcagtcacatgcccacaggtttgatactgccactagatggaggacttactcaaagtgaacgatttcgctatcaaattgaagcttctgccccattaaagaaacagttgtggcagcaaaccatacagcagaagatatacaatcaagggcgggttttggaagaattaggttatgatgtcactaatatgtttaggtggtcgcgctcggtaaaatccggcgatccagataactacgaagggagagctgctgcttattattggcaaaccatatttagtgagtttacatcattcaataggggtagaggaggtgagccacccaacaatttattaaattacggatatgccatactgagagcagcagttgccagggcgttggtctcttcaggattactccccacgttgggcatttttcaccgtaataagtataatgcctactgtctggccgatgatattatggaaccttatcgtccctatgtggaccgtattgtttatagtttggtccaagactttggtgttgatgcattaagagaactgactacagatttaaaggttcgactgttacagttgccacaattggatgtaaagtttgacgatatgactagcccattgttggtaggaatatctcgtacaacagcatcattggcgaggtgttatgaaggcgtcagtcggaagattaattatccagaattgtaaatatattggagagactaaatcaatatcgcgttttgtggattttagtattttttgatttacctaccgaaaccaaaaaggacaggaaggcacatgccaaatttcgtaaagaaattatgcaggacggatttgttatgtttcaattttcaatttatctccggcattgcaatagccgcgagaatgcggatgtccatctgcgaaggataaagcggctgcttccggaaaaaggccatatcggtatcttaacaattacggatcggcaatttggagatattgagctttttattggaaaagaaataacaaaaagaccggataccccacagcagctagaactattttaaagaaattaggatattggaaagtgctattaaacaaaaaatccaagtgttcaagcttggattttttgttttgtaattttacgtttaacgaattgatttaaagaattatacagcatggtatgctgttgtaaatatcgttaaatcaaagaatgaaagcaattcacaacttaaggtcatttgaaacagacttaacttcggctgttgtaaatatcgttaaatcaaagaatgaaagcaattcacaacacactaacaacaacactgccagtatctaaggctgttgtaaatatcgttaaatcaaagaatgaaagcaattcacaacttagttctatacagtgacattatatccatggctgttgtaaatatcgttaaatcaaagaatgaaagcaattcacaacatgtctaagtcctcataacctgtccattgagctgttgtaaatatcgttaaatcaaagaatgaaagcaattcacaacttctataggtctaccaagtagttcatctaagctgttgtaaatatcgttaaatcaaagaatgaaagcaattcacaaccttaatgctatattggcttgtatctgcgccgctgttgtaaatatcgttaaatcaaagaatgaaagcaattcacaacggggcgctcaactttcagcagctcgtgtaggctgttgtaaatatcgttaaatcaaagaatgaaagcaattcacaactcacaaagggaatcatcttcacaatagtaagctgttgtaaatatcgttaaatcaaagaatgaaagcaattcacaactagtttccgtaaaaacttgcggcaccgaaagctgttgtaaatatcgttaaatcaaagaatgaaagcaattcacaacatcccgtaaatcttccctccgtattcatctgctgttgtaaatatcgttaaatcaaagaatgaaagcaattcacaacatccttaatgcggttttcttcccggacagtgctgttgtaaatatcgttaaatcaaagaatgaaagcaattcacaacttacagacaccacgaccaaaaggtatttttgctgttgtaaatatcgttaaatcaaagaatgaaagcaattcacaactcaatcttccgattcgtttcggtagcctgcgctgttgtaaatatcgttaaatcaaagaatgaaagcaattcacaacactccctgaagttctggaaattttggttaagctgttgtaaatatcgttaaatcaaagaatgaaagcaattcacaacacacccgtattatcgataagaatcgacttggctgttgtaaatatcgttaaatcaaagaatgaaagcaattcacaactgttgatgatgtatttaaagataatgatgggctgttgtaaatatcgttaaatcaaagaatgaaagcaattcacaaccaatgctgtatgattcgttgtatatctctggctgttgtaaatatcgttaaatcaaagaatgaaagcaattcacaactaaatttgaagtgatccaaaagattacgaagctgttgtaaatatcgttaaatcaaagaatgaaagcaattcacaacacgcaaacgtggtgtaaaaaaatacaacaggctgttgtaaatatcgttaaatcaaagaatgaaagcaattcacaacagtgtaataacggtatataaccgcatcaaagctgttgtaaatatcgttaaatcaaagaatgaaagcaattcacaacttcatgcaatttaacctacttcaatcaatggctgttgtaaatatcgttaaatcaaagaatgaaagcaattcacaacgctcggtatcaacttcagctgtcacctcatgctgttgtaaatatcgttaaatcaaagaatgaaagcaattcacaacctaatgctgaaagtattaaatttgtatctagctgttgtaaatatcgttaaatcaaagaatgaaagcaattcacaactgtaatcccataacatagttagctgactttgctgttgtaaatatcgttaaatcaaagaatgaaagcaattcacaacgcatctttacgcgccttctcagcatctcgagctgttgtaaatatcgttaaatcaaagaatgaaagcaattcacaactggtgatatcgttgatggtacatcaatgggctgttgtaaatatcgttaaatcaaagaatgaaagcaattcacaactaaattgctccaatagcacgaggagtatctgctgttgtaaatatcgttannnnnnnnnnnnnnnnnnnnnnnnnnnnnnnngaatgaaagcaattcacaaccaatttttataataaataattcttttaaggctgcaattcctttatgttgcagatgtgtttgaatagtgtagttttaaacctgtgtattgacttttaaattacgtttaggcttcccctagtctagctatttcacagcaatagcttaaacataagaaaatttgtaagattatcttacttagcaatcgataagcatcttaattcaaaataaataatgtattttcggaaagagtattaacctattttttttaatgccctttaattaacggaaattgaattttatagaagtggaaattaccatgttttttgaataataatttataatctatattggaattatgacagggtattatagaatttaatattagacagcggccttaaacgaaggaatgttacgacaacctttgtttgatatttcgctatcggggagaatatactaatcttttacatctttttttatgagaattatacattatcttgatcctgatcaggtttttaacgcttacaagaagcttaaacattattttttttatgacaatactactctttttgtaagaaagagtatagctaaattcgagaaggagaatttcgatggaataagtgatattgataaaataaaaacaattttatatagaaagattcaacataccttcaataaattgagtaactatcaaaatgtaccgtatactttgattaaaactcatttactacccaagaaaattaaaagaaatgcatcacatattgttactactaatagtaaggagttaaaagagatcgaattagaacgattgaacgtatatgctgacgttcctatagagatccatgttttgtcaactctatgggttatgtacgccggtcgttttctcgctccattattaagcgagtcttgctatgctaataagcttaatttagatataaatgaagagacagaagatccatatgagaatttgaaattgttcaaaccatactttgtacaatatcaacattggagagacgatgcgatcttaaaggctgaaaatttattggatgaaaaacggaatgttactattttaagtcttgatgtaaaggattactaccattcgatcagtttggactttgataaaattaaaaaagatctgaaaaagaatataagagattatgctaagaagaaaaaagaattcgacgtagaaaggtttttagaattatcgatagatctcactgatatgctttttatagtacataagctatactccgtacagttaagggatgtttatccatcaaataaaaaacaggatagaaaattaaaaaataaatatccattgccaataggattactttcatcttgtcttttaggaaattattatttaaaagatttagataaaatgatcgttgaaaatattaatccagcattctatggtcgatatgtggatgatctaatgttcgttttttcggatttaactgaacattttaagccagacctaaattctccaacactttccttcttatatagaaatttctataaaaaaggaattttagatattcatcctgatggaaaagtacaagaagtattatttacaaaagttgatgacagttggcgatataaggagtactgcgatgatctaaaagtcgatgaaattaatatatttaaggattttggaatttataaagatgatataattaagcaattggtcaactcaattaaatttactataagaaatccaataaatattgatccttgtattgacaaaactgaaaatatagacttgggttattctaatttagaaatacaagtttcgaagacggttctacattatttcgattataaggaatctagggccgtattaaatatttttaagaaaaggcttagagaacagagaagcgaatttcgatttttaccagatgaggatgagataagtgaacagttcgatgaagaagctttcaatttaaaatataatgattctgaaaataaattcagaagtatagaggacttttcagaaaataaatatggtgcatcaaaatttttggcaaaaaagatttttgctgttagtttcggtgatagtgagaatgatgatatagcaaatcaacaaatacttaccttctttaaggaatcgactgcattaaatttctactcattatgggaaaaagtagcaacatactttgtaattagcaatcgcccagacaatttgttgatatttaaaagaaacgtggagaatgctattgataagctggaaattagtaaagattcgataggaaatgaaaatatttcgagcgattatgttaagtctaatttgaaaaagtcgcttataaattattttaagatctctgtttctattgcactgtcattgaatcctaagttagaaatccagtatacaaatggtactgagaaagaactatttaaggaattacatcttgatgcattaatgcttagaaagagtaatttatttcgaacttcattaataaaagttcctggtataaattatttaaggtttcaagatccggaatttagtttattaggtagtgactataactcatattttcatcttgaaaacaaagaaatagaaatagatcttttaatcgctaatttggctcctaattatatccctttccatgaaataaatattttgaagattgttagtaggattgccaatattgatatcactgatctgaaaaataataaaaatggtaataatcaaaaaaacaatttaagtgaggggtttaatgtcaatgcaccagaaaatgtagttagtgaaaatagatcaaatgatagtgatctacaatacgacaagataaattcaattccggatgaagcctttgaatggtattataggtgtaattatggatggaaaaagaacttcaattcagatatcaaaaaaagagagctcaagaaaaagtattttactgtttataaagaggatgaaatttcaaacgatcttaaatataatgaaattgaaatacatggggagaacatagatgattttgacgataaagtagataaacgaattgctattgctaatattaaggttgatgaaagaaacgtggaaagaagttatctaaaaatgcctaatttagaccgaaaaagacgaaaaacaatatttaaattattaaatgaggcagatagacatgagtctgacttgattatttttccagaagtttccatcccatattcctggttgcggctgctcgctgaacgctcacataaacgttacatgggtattgtagcaggactcgaacattggattaataacaataatatagcatttaatttcatggtaacaatacttccatttaaagttcatgaaaatgtaacatcgttaataaagatcagactcaaaaaccattattcaccgaaagaaaaatacttattaacaggttacagactgattgttccaaagcaaactctcaaggattataaaatgtcttatgatttatttcattggagaaaaacttatttttccgtgtataattgttttgaactggccgacatttatcatcgatcgctcttcaaatcaaaagttgattttatcgtagcttcagaattgaatcctgatactgaatatttctcagatgttgcaggcgcttgggtaagagatgtacattcatattttattcaagttaattcctcacactatggagattctagacttattcaaccgtctaaatcatataaaaaggatcttattcaagtcaaaggaggtgaaaactcaactattttagtgggaaatatggaaatagaaagattaagaaattttcaattaatggagtatcatttacaaaaggatagtattgaaaaagagaagtatcattttaaacctactccgccagatttcgatagggataacgttacaattagaatgaatgatagaaaaattggaaaaagtattttataatggaaaatatgagctttagaattcaggatttaatgaagattattatacctggcacattatctttgttttttgccactttattagttttatcttatgaaaattatgtttggttagtcaataatattaaagatattgtggggatatttttagtgttattttttataatttgttatggttttggttattttatagatttttttggtagtattttagaaaaaatctattacaaatttaaatttaagccatcctattatttaataaatgatattgggaaatatattagactttcgaaaagagaagaagtactagaagaactttgccttagaatgtcgcggtgcacgactaacttatatagctccaaagaggccgaagatatttttaaatttgctaatattttaaaggataaatctcaaaacagcaataatagagatagattaagagaatattacttctctatggtgtttagtaggaacttatctagcggttttattgtttcattggtgttatatttaatttattttattttcaataatgctactgttatgtttaactgttactcactaatgttatttttgccatttataatttgtgttattagatggaagcagcatgcatcttattatagccgacaagtgttttatgttgcgtgtgaaaatatcttcaaaatttaatacctgaaatacgttgaaaaacaggatattacagattgattacaatgttaattcggggagtggtgaagtcattccgcttttcattttcgcattgaataaatataaaaatgcgcattaagaaacaaaaatggtagggatagcggactatcagtcgttttcaagtcggatcgctactaatctatcattaaaaaatcgttttacttccgttcataatgatttttgtacataaatattaatgaaataataataaaggcaatgaaagaatatctatagtcgaaacctaagttgaattcaagaggaattgaatttataaaatcatttactaagaagtttagcaagaacttgccaaaagttagtagaagaaaaagtcctccaaacataccaaatacataaataaacaaaagagaaaccatccacaagtagaagttgaaatttttttcggatttaaatggttcgtttaaactaagcttatattttctgtatttattctctttatcaaattccttttgggtgtatttcgtcattaagtagaaaagtgtaattaaaattatattaattatcatattaaagttgttttgctttttgaaatttcatagttagtcgtttttatgcttcattatatttcaaaaacgaagaacggacgaatattcatgggacaaatttgtttttttattaaaacgtcccgattttaccaaattattatgtctgactttcaattttacaaaactaaaataccagatttaatgtggcattcgaaatgaccacattcaacttttggattataatgactagacgcccattttatttttatttttaatttaaatacttctgtactaaatatcctagaaaaaagataaatatcccccaagctagattcaatatccaattatttgcaacaatttcccttataccagaaattgttaatccatagatttcttttggttttactttcactttcaaactaccgttttcagttttttcaattatactctcaataatactaaccttgttcaaagttgatttatgaagagcaagataatttctgttttcaaaagcttcagcttcttttttaccacttaatgcatccctaaaagatatttcatttcttgcacacaaactgagtaatttcccactttctccatgattttcataatcataagtatatattttggaaagtatccgcggtagatcatacctattttcaatatcaatctctaagggagaaccaccaagaatacggaatcgaattgaaattgcttcaaatccaaaattagtatctcgcatattccaatgaatccatttaaacttaagcctttctttagcaaattcgtaaaactcatttagcatataatattctaatttatcgtaatcttcatcagataaattattaaaatccattctgttaatttgagcctgaatatgaattgaaaatgatatggtttgtccggtttgtaaattccggattgaaatagaagttattcgcgggcttctaccaaataaatttacaaaagactcgcaagagtaatgtataattagcgtcttctctttattctctaaagatttttctaggtctttcagtccttcacttcgctgttttaaccttttagattgtatgaaattcatgtggttatggctttgttggatacaacagctcacgaatatctgtgtcaagaagtttcgcaattttgtacaactcagtaaggggcggctgccgatgattattaacccaccttgagacagtttcctcagtttttttaattttttcagctagttctctattcgttattttctttatttcaagaacttcagctagtctgttaattttaatcatatatttttcttgtaaaaagtttgactttttacgtcaaactcttatctttgtttatgtaatagcgaattttatataacaacatgtgttgtattaaaacgagtctctctatttgggaataaatccggcttaaaataaataccct

SEQ ID NO: 2186 - DNA, 24202 bp, synthetic construct
  source 1..24202: mol_type = other DNA
  misc_feature 1..24202: note = Synthetic
ggctagccttactgtaatcacagaaagctctaaccttaaccttcgcaaagaaccttctacagaagctgaagttgtaggtaaagctgcaaagggagaagccgtaactttagtagagatgacttccaacgattggtggaaagtaaaaactaaagatggtgaagaaggttatgcttacacaagataccttaaagcttagataaaataatctagataatttgatgcccctttcttagatatttctgagaaagggtttttaatttaagtctccaaaaaagtttatatttgcattccaacctaaaaaatcattatagatgaaaggacaaaataaactttttatagcaatattactagggcttattataggaatcggattaggcggatttgttcatttgcaatatccagatagtgcagaaggcttttccaaaaacataaaattgctagggaccatttttatcagacttgttcagatgattattgctccgcttgtattcaccactttggtagtgggtattgctaaaatgagtgatataaaaatgataggtagagtaggtactaaagcaatgttgtggtttttaacggcttctttagtttctctaatgatagggcttgtatttgtaaattggctagaaccaggtaaagtaactcaactcccagtacaagatgcaagtgcggcggcagaaatcgtaaataacagtaaaggcttctcactagaagattttgtaaagcatattattcctaaaagtttatttgaagcttttgccactaatgaagtattgcaaatcgtagtattttcaataatgtttggggtggctctttctcagttaggagaagctcattctaaaccaattataaaggcttttgatatttgtgctcatgccattcttaaaatggtgggttacattatgtgggtagctccattgggagtactgggtgctattgctgcagttgttgctactaatggttttgagatatttatggtttatgcagtttacctaagagactttttctttgcattgggtatcctttggctagtcctatgtgccgttggttatttaatacttgggaacagattgtttgatttattaaaaagaatcaaagagccattacttattgcattctcaactaccagctctgaagctgtttttccgaaacttgtagaagaactagaaaagttcggggctaataatagaatagtctcctttatactacctttagggtattcgtttaatttggatgggagcatgatgtatatgacctttgcgtctatctttattgctcaaatttacggggtagatatgtctattggacaacaaatcacaatgcttttggttcttatgcttacttccaaagggattgcaggtgtgcctcgagctagtttagtaattattgtagctacctgttctatgtttggaattccaccagaaggcatcgctctcatattaccaatagaccatttttgtgatatgggaagaagtatgaccaatgtactaggcaacgcactagcaacttccgctgtttctaaatgggaaggacaactagacgcacctacagaaaacatataaaaagaaaaacacttacaaaaaataaatccttaaatttgtacttctaaaaagagaataatgataaaaaaagatagagtattagcttttttaaaagaggttgaggtagatgacttggtgaataacgtccaagttatgggtaatgatgtctatattgatatgacggcacattctccagcaatgcatgagaaaaaaaagctagaagcagcaatgaaacaagcttttgcatctgaatttggggaagaagtggttttaaagttgaaaatcgtttctcctgaaccttcggaagcacaacttaatcagattaaaggaaaagaaattccaggcataaaaaacatcatcgctattgcatctgggaaaggtggcgtgggaaaatcaacagtagccgccaaccttgcaatatctttagttaaaatgggctttaaagtaggtttactagatgctgacatctacggtccatctgtacctactatgtttgatactgaagggcaaaaacctatttctgttgaagaaaacggcagaaatctaatgaagccgattgaaaattatggagttaaaatgctatccatcggttatttttctggagctaatcaagcggtagtatggagaggtcctatggctgcaaaagctctcaaccaaatgctaagagacgctgcttggggcgaattagattttttattgatagacctacctccaggaactggtgatattcatctttctatcatacaagaagtacctataacgggagctgttattgtaagtacgccacaacatattgctcttgcagatgttaagaaagggattgcaatgttccaaatggaaagtatcaatattccagttttaggtttaatagagaatatggcttattttacaccagaagaattacctgataataagtattatatctttggtaaacaaggagcacaatatatggcggaagatttaggcatacctgtattgggcgaaattcctctaatccaaagtataagagaagcgggtgatgtgggaagaccagcagctttgcaagatggttctaaaatcgcagaaatctatacagaaaccactcagaaaatggtagagagcttagtggaaagaaataagaatctacctcctacagaagccgttaaaataactacaatggcagggtgttctccaaaaaaataattaccatattatatttaaagaattaaaataaagatggaaaataatagtctagaagtaagagtagaaaatgcactagaaagcattcgcccttttcttaacaaagatggtggagatatagagctcatcaaaatagaagacactgtagtctatgtgaaattactaggtaactgctctgggtgtcctgtaagtttctctacaatgaagctaggcgtagaaaatacagttaaagaaaaggttcctgaaattacacgagtggaaaatgtagaatagtttataaattataaaaaaaggcttatctgtaataaattagataagcctttttgtcttgtaatttaattcttattcttcacatccatataataaaacattggaatgatgagcaataaaattataggttgaataacaaacctacgaacataaaaagctaaaagcaatcctgagtcaaattccgtataaactagatagagatagataggaaaagtaatcaaaaaaactaataacattaaaacacaagctaacattgtctttgttttatctttaaaaagaaaataaacaatgattagcgaaaaaagtagattaagtatcagcctaaaaagatgtcctaaaacaagttttccccactgaaaaacggggaatactttggctccatccatcattttgaaatagattaaaaaaggatcataaaatagagtttcttctaaaaaacgaacccctattaaaccaataataccgagtataacaaatacaagattacctttgaacttcatctttcagtacaaaaaatttaatccaaataatccataataaaaccacacttccgtaaataatcgcagggaatatataatcatgggcagctttaccataagatggatattcaagtagcactacatttattccaacaatcctaagtatgtttatgatatacagaaatataactcctgcaaaaacaaaaataaaagtattaaaacctctataaaatgcaaaaataaatgctataaaaagtattattacagatacagcattacaaccttccaccattctagacatatactccccacctacataataccacaaagtattatgttctggttgaggtatggcttgtgatggataccctatgttattctgtatcaaagtacattggttggctatatgtattgacaagccatctaaaccttcttgagtatttaaataaaactgataaactcccagcaagactaaataaactaataaaaatcttaataggatttttagtgtgggtttaaaatcttcaaacataaagggcaaaggtaatgaaataacttattattaaagaaaaacctctaaaagttggaaaataaaaactttctagaggttttgtgtttctgttatggtaatttttactacgaattttctaacacatattggaacatcagaggtgcacaaatcgtagcatcactctctacaataaatttaggtgtgtctatatccaattttccccaagtgattttctcatttgggactgccccagagtatgaaccgtaagaagtggttgaatctgatatttggcagaaataagaccaaaatggaatatcatgcatttccatatcttgataaagcattggtaccacacagatagggaaatctcccgcaatacctcctccaatttggaagaaaccaactcccttaccaccacagtttttagtgtaccaatcagctagataagtcatatactctatccctgatttcatcgtagaaggttttaattctcctttgatacagtagctagcaaaaatgtttcccattgtagaatcttcccaacctggtacaacgataggtaaatttttctccgctgctgctaacatccatgagttctctttcggtatttcatagtactgctcaagtacaccagataataacattttatacatatactcgtgagggaaatatctttctcctttcgattctgcttctttccaaatttctacaatatgtttctgaagtcttctaaaagcctcctcttctggaatacaagtatccgttacacgattaagacctctctctaataaatcccactcttgctgaggtgttaaatctctataattaggtactctctcgtaatgagaatgagctaccagattcatcaaatcttcctctaaattagctcctgtacaagaaatgatttgaactttatcttgtcttatcatttctgctaaaatcttacccatctctgcagtggacattgctcccgctaaggtaatcatcattttaccaccatcttttaggtgtgctacataacccttagaagcatctactaatgcagcagcattaaagtgtaaatagtatttttctataaattcagtaatcggtttactcataattttttatttatcgcaaatataaggatttttagatttatacctatctaatctcatttacttaaaagtaaaaagtcgaagtttatacttcgactttttttatcttattactacaattattgattggtaaaaatcaaactgttaatatttgttacttactgccaccaaacaatccacctaatagaccgcctagtcctccactttgttgtttgttgtctcctccacctaagacacttcctaaaatatcattcagcggattaccgcctccttgttgtgattgtccaccacctagaacacttcctagtaaatccgtaagaggattacctccaccaccttgttgtgcctcctgagaaccttgtcctaaaatacctcctagcaaatccgaaagtcctcctcctgaagttacattattttctctcttttgttttcctatatatcccataataacaggagctaacatcgccattagaggtcctattttatccatagaaatccctgtattttgagaaagctgattctccacagttgattttttgtctccgaaaatatgacttagaatgctattaccttcctcttgtctattttctacctggcttacatcatctaagatgctaccgtcgtggtctctttctaaagcattattaagagcctcagcttctttttcatctttagatttatttctaaggtaagaaattaccagtggtgttgccactaccaataaagccataatttgacttttgctaattccaaactttgattctgctttttctgctacttgtgttcctgggtttcctgtgataaggtctaataaactcattttaatttaaatttttatattgttttgtaacctatcaaaaaccattcctaatttttaaatataggtacattactgcatgcttccccgaacatcaaagatttaacaattggctttaatttttcaactaactcaatataagcattttctggaatattttcatctgtacaaccttttactaaaactcttttatcttttagattagaaaaatcataatcatttagagcttgatgcataatgagtagctctaactcatctttatcaccataaattaccttcttagcaactccagataattgagatgcaatcaaaaaataagcccacaaagggacaatggcttccgcagagttatagatgtaaacataagcatctttatatgagtctaactctagccccttcactttttctctgaaatctttttctttgagaaccaactcttggaataaaaatggtttcaaatctatccctaaccttttccctttaggcactaaagaagataaatcaaaattaactaatccgctttctgcgactttatttttaatctctgacattgcttttataaatgagtttagcccatcaattatttaaaattgatattatactttacgtttttgtagtcgtctaggcttgcttttaaagaaccgactgcaagctccgcttttagttccacggggatatgattagcatcgtttgttacccacattgttactccttcttggtctttaaatactcttccactcattaccgaagggataattttaagacattctaccttaccaaatttggttcttttggtttctacatctgcaattctcaactggaaaggaaacatctcatcgtcaatccatacattcatttttatgcttgttcctacttttaatgcagaattatctctacttcttaagtagtagaaagcagaaagcatatcttgtatgcccttgacagattttagagttttagaaccattagatggcgttttcttgtcggttaaaataagggtttggttggaatgattaaaaaccgtttctaaatgctgtctataactaccctcttgcacatttcgcacatagaaactaggtaatgcagtgctgatattgatataactttcataaaggtcttctaccttgaaaaaagcccttacagctcctgtggtcttacctgtgcctttgacatagtaatgaggttcgcctttataggttgtctccttaatattaagtgtagcatagcctgcgtttaatattccataatgaattctataagtcaaagtttctccagacttaatattagtaatttgcgaccacaaacttgccgaaattacaagagtcattaaatataatatctttttcatacttttaaaatttacaaatactttgccaactcaccccataacattatggtttatgtaactaaagttacgatgtagtttcaacaaaattagtacttttgcaaagatatataatttaattccaaagttttttacatattatgattactacagatttacttattataggagcaggacctacggggctttttgccgtttttgaagcaggattattaaaacttaaatgccacatcatagatgctttaccgcaacctggtggacagttagctgagctttatcctaaaaagcctatttttgatataccaggttatccgtctgtaaatgcaggagagttagtagataacttaatggaacaaattaaacaatttcaaccagggtttactctagcagaaaccgccgtaagtctagaaaagatagatgatgaatggtttgaggtaatcaccaataaaggaacggtacaccgtgctaaagcagtagcaatagcgggaggactagggacttttgaaccgagaaaacctcttctagaaaacttagaaaaatatgaggaaaatggtgtggagtattttgtaaaagacccagaagtttttagagataaaaaaattgtaattgcagggggcggagattctgctttggattggagtattttcttatctaatgtagctaaagaggttactttggtacacagaagaaatgagtttagaggagcgttagattctgtagaaaaagtacaagaactgaaaaaccaagggaagattaaccttgttacacctgcggaagtggtagagcttaaaggttctaacactttagaaagtattgtgatagagcgtgagggtgagaaaacagaaatagagacagattatttcattcctctttttggacttacaccaaagcttggtcctatcgctgattggggactagaaatagagaaaaactctataaaagtaaacaatgcattggattaccaaaccaatagagaaggaatttatgctattggagatatcaatacttaccctggtaaattaaaactgattttatgtggcttccatgaggcaactttaatgtgccaaagcgtttacaacaggcttaatcctggtaagaaatatgtgctaaaatacactaccgtgagcggtgttgatgggtttgatgggagtagaaaagaggcagagaaagccgttgttaaaaaaatagactaaaaattatggctgatattcaactaaaaattactgatagggagggcgtacagcacgacatagtagctcccacggacatgtctatgaaccttatggaggtgataagagcttacgaattggcagaggaaggtactgtaggcgtgtgtggcggaatggcaatgtgtgcgtcttgccaagtttatattcttaatgatgttccactgcctgaaaaaggtgatgaggaagaagcaatgctttcagaagcttttgatgttaaggataactcgcgtctaggttgccaaatccatataacggaagagatagatggcttggaggtggaaatagcaccttattcctaaaactaaaacaaacgagaggtagctaaagcctctcgttttaatttcctataaaaaaggttctttacattcgctgaactcttttataagccttttaaatacttcatctaccgagataatgtcgtctatgagggcagaaacttgtcctatttcaagttcaccttcgtctaaatcgccttcaaacatacctttcttggctcttgctctacctaaggattgtttcagagtttctatatctctcccattttcataaagtttttctaggtcgtagaagaatttgttttttagcaacctaacgggagcaagttctttcaaagtaagttgagtatctccttctttagcctccactattttctgtttaaatgcctcatgagagcttgcctctgttgtagctgcaaatctagaaccgatttgtacaccatccgctccaagtatcatggcagcttttatctgttgccctgtggcgatacctcctgcagcaataaggggtgtactgatatgttttctcacattaggaataaggcagaaagtggtagtctcgtctctaccgttatgtccaccagcttcaaatccttcagcaacaacagcatctacaccagcttcttcacattttattgcaaattttagagaagaaaccacgtgagctacttttataccttctttttgtaaagtttcggtgtaggttttcgggtttcctgctgaggtaaatacgattttaacttgctcctccataatgatgttaataatttcatctaagttaggataaagcataggaatattaacaccaaaaggcttattagtagcttttttgcatttttgaaggtgttctcttaagacatcagggtacatacttcctgcgcctattagtccgagacctccagcgttagaaacagcagaagctaattgccaaccactatgccataccatacctccttgtatgatagggtattgtatattgaaaagctctgaaattctatttttcatattttttagtttagttgataaagttacaaaaattgaggatatctattaaattgattttttataggtgggtatataacaaaaaacgaggtgctgttatcagcccccgtaataaatgttctcacaacggaatcttccttattgtgaattgctttcagcgacaaatttagatataaatattataatgacaaaatatttattaactttatacacgaaaataaagattattattgtttaaaaatcaatatattaaaaatgaaaaccatacttggattagacttaggaaccaactctatcggttgggcgttggttaaagaaacagagaattcaaatgagaaatctgaaattattaagttaggcgttcgtgtaaatcctctaacggtggatgaaaaaacaaattttgaagcagggagacccttatccaccaatgccgatagaacagctaaaagaagtgcaagaagaaatttacaacgttataaactcagaagaaaaaatttaatagacttgttgattaaacatcggttgattgataaagatacaccactaaccgaaattggtaaaaacaccactcatcaaacattagagttaagagccaaggcagcgagagaacgaatagaattagaagatttagcccgtgtatttttagcgattaacaaaaagagaggttacagaagcagtagaaaagtaaataatgaagaagaaggacaagtggttgatggtatggcagtagccaaaaagttgtatgacgaaaatttaacaccagggcagtacgcctatgaattgctatcaaaaggtaaaaaatatgtgcctgatttctaccgttcggatttgcaagcggaatttgacagcatttgggaatatcaaaagcagttttatgcagatatattagatgacgaattatataatgccttaaaaggacaaggacaacaaaatagccgaaaaagatttcttgccattaaaggggtttatactgccgaaaataaagggaaaagagatgaagtaaagctacaacattacaaatggcgttccgaggctattactcaaaaactaagtatagaagaagtagcgtatgtattagtagaaattaataatgacctcaataaatccagtgggtatttaggggcgatttcagatagaagcaaggaattgtattttaataaagaaaccgtaggtgaaaacctttggaaacaaatacagaaaaatccgcatacttcactaaagaaccaagttttctatcgtcaagattatttagatgaatttgagcaaatttgggaaacacaagctcaatttcacccacaattaacacttgccttaaaggagcaaattcgtgatgtggtcattttttatcaacgaaaattaaaatctcaaaaaggcttattgagtttctgccagtttgaaagttgggaaatagaacgaaaagatgaaaatggcaatgttattctcaataaaactacccaactaccgaaaaggcagacggtaggtaggcgtgtcgctcctaaatcatcacccttgtttcaagagtttaaaatatggcagaatatcaataatttagagatagcaaaaattagcgatgggaattcaaaaaacaaaaaagaaacagaggctttaagtgatgatgaacgaaaattattgtttgaagaattaaaccttagaggaaatctctcacaaaaagaggtgttacaaattttaggtttaaaagataaagaatacaaaacgaattttccagaaggtttggaaggcaaccgaaccaatgccgctttattcaatatctatcagcaaattgcagagaatgagggctatggtgattggactaaaaaatcagctcaagagattaaggaggaattaaaagcagtatttccacaaataggtattcaggctgatattttagactttaatgcagagttagacggaaaagaatttgaaaatcaagcctcttatcaattgtggcatttgttgtattctgccgaggaagatgataaaatcaacgaagaagaccaaatcatttacgggaactctgcagtcagtttaaaaaagaaactttgtgaaaaatttggctttactcccgaatatgccaaatggatagcgaatgtatccttacaagacgattacggaaatttatcaaccaaagcgatgcgtaaaatcattccgtatcttatagacggaaacgattattcagaagcctgtgcattagcagggtataatcattctaatagtttgactaaagaagaaaatgataatagagaacgattgaataaattagaacttttacctaaaaacagtttacgcaatcctgtggtggaaaaaatacttaaccaaatggttaatgtggttaatcaagtgattgaaacctatggcaaacccgatgaagtgcgtattgaattagccagagaactgaaaaaaagtgcagaggaacgagctgaaatgaccaaaggcatcaacgaagccacacgaagaaatgaagatattaaaaaactcattacgaaaaatttcggcattcccaatcctactaaaaacgatgtggttcgttatcgtttatgggaagagttagcacctttagcctataaagatgtttttactggtagacaaattaaaaaggaagatttattttcatcaaaaatagatatagaacacattattccgaaggcattattatttgatgattctttctctaataaaactttagcttttagggaaaccaatcttaaaaaagcagaccgaacggcttatggttttatagaaagtgattataatgcaacacttgacgattatatccaacgggtagaaacgctttataataacgccaaaggaactatttccaaaggtaaaagaaataaactcttgatggctcaaaaaaatctgcccgatggatttattgaaagagatttgcgtaatagccaatatattgctaaaaaagcaaaatcaatgatagagaaagtctttaatgatgtaaatgtgacctctggaagtattaccgatagactgcgtgaagattgggatttaatcaatgtgatgaaagaattgaattttcctaaatacaaagctttaggactgacagagatagaggagcgttatgatattgggcaagaaaaaacaaaaaaagtagaagtaattaccgattggacaaaacgaaacgaccatagacaccacgcaatggatgcactaacggtggcttttaccacaaaaagtcatgtgcagtatcttaataatctaaacacgatacattcattaaagggcgatgaggtagatttggaattgagtaagttatacggacttaaaaataccattacggaagtggtgaataaaaaacgaaaatttattccaccaatgcctaactttagagaggaagccaaaaagcatatagaaaccattttggtttcgattaaaaataaaaataaggtttacaccaaaaacatcaataaaaccaagaaagagtcaggttatcataccaaagaacaactaacgccacgaggacaattgcataaagaaacggtttatggaaaatctaaaagaccgatgaataagcctactaaaatcaataaaaattttagtttagaacaggctcaacttattatcaatgtacaggaaaaagaattggtgcttcgtcatttagctcaatttgacaataatccagcagttgcttttgatacaaaaacactcaaaaaatgccattacttaaaaatggtgaacctttgaaagaagtgttgtgttttgaggaaatttttacgattagaaaagacattactcctgatttaaagattgaaaaggtggtggatgaaaaaataaaagctattttagagcaacgcaaaaaagattttggaggtaatgcaaaagaagccttttcagatttggataaaaatccgatatggctcaacaaagaaaaaggaatttgcatcaagcgagtaaccattacaggagtaagtaacgccgaagctctacaccatcaaaaagaccatttaggcagggaaattttggacgataacggaaaccctatacctgcggattttgtaagtacggggaataatcatcatgtcgctatttatgaggatgaaaaaggtaaactgcaagaaaaagtagtgtcgctttatgaagcagtagcaagagcaaatcaaggcttacctgttgttgataaaggattaaatgaagatttaggatggaagtttttatttacaatgaaacagaatgaaatgtttgttttccctaatgacgattttgatgtaaatgatattgatttattagatgagaataacgctaaaataattagtcagcatttgtttagagttcagaaattagcgacaaaaaattatatgtttcgacatcatttagagaccaatgttcaagaggtaaaagaattaaatgatatagcatataaatctattagaagtacagaacctctgaaaaacatcaaaaaagttcgtattaaccatataggaaaaatagttcaagtgggagaatattaaaaataatggattatgctttaccgttctatctatattggcaatcctgcctacctcaagttaaaagaccagcaaatgaaaatcatttgccctgaaaccaaagtagaaaaagggagtattcctgttgaagatttgggactattgatgctcgaccattttcaaatcacgatttctcatcagctcattcaatggttgatgggaaataatgtggtggttatcagttgtgatgctcatcatttacctcacggcataatgttacctttgtatgggcactccgaatattctgaacgggtaaaatatcagcttgaagctagcgaacctctaaagaaaaatctttggaagcaagttgttgagagtaagataaataatcagtcggaagttctaaagcgtttagggaactactatgaacctatgctagagtacaaagaacaagtaaaaagtggtgataccaccaatatggaaggcattgcagcacagcattattggaaatatttaattgctccagattttctcagagaacgttttggtgactctcctaatcaattttttaattttggttatgccgtattgaggagtattgtggcaagagctatagtagaaacggggctattgcctgtattggggatttttcataagaataaatataatccttactgcttggcagacgatttaatggaaccttaccgtccgtttgtagattttttggtaatggaatggttagaaaatcaccctgaaagtgaagagttaaccaaagattttaaagcatttatgctaaatatagcgactttagatgtgagaattgaaaataagctaagacctttaatcgtagctgtaaaaacgagtgtagtttctgtttataaatgttatactggagaaaaaagacaaatatctgtgcctgagttttatgaagtttaatcgttttaatgcttatagagttatgtgggttatggtgttatatgatttaccaacagaaaccaaagcgatgagaaaagcagctcaactttttagaaaacgcttggaagatgatgggtttagtcttttccaattttccatttatatacggcattgtcctagtcgagaaaatgcggaagtacacatcaaaagagtaaaatcaatacttcccaagcatggcaaggtagctataatgagcattacagataaacagtttggagatattgaaattttctttgcgagagctaaagaggaaccaaaaccaacctatcagcaattagaacttttttaggaatagaaaaagactttacatcaaacaaaaatagagaagaaatagtaaaaaatctaatcctataaaaacgcaaaacccattgaaaaacaatgggtttattttttgaggttgcgaactatcacaaagatagtaaaaattgaaagcaattcacaacttcttaattgtaatgctttagaaagtagttgttgcgaactatcacaaagatagtaaaaattgaaagcaattcacaactatcccatcgcacatctgttttattttgtcgttgcgaactatcacaaagatagtaaaaattgaaagcaattcacaactacttcgtttattagttttattgcaatgttgttgcgaactatcacaaagatagtaaaaattgaaagcaattcacaaccacaggcagctcttgaaagcggatgggggagttgcgaactatcacaaagatagtaaaaattgaaagcaattcacaactacaccgaacaaactataaataaacatttagttgcgaactatcacaaagatagtaaaaattgaaagcaattcacaactagatacatctctttatcttcgtgtaaaatgttgcgaattatcacaaagatagtgaaaattgaaagcaattcacaacgtctttgaggtaaggttttgtcaaatcccagttgcgaattatcacaaagatagtgaaaattgaaagcaattcacaacgatatagtatcagatgaaccgacaacggacgttgcgaattatcacaaagatagtgaaaattgaaagcaattcacaactgattgactctattttctcctgtgcagatagttgcgaattatcacaaagatagtgaaaattgaaagcaattcataatattactgtttgttattggttttattttttaagatataaaacacgcttccaattatgtaaaccgacacaattaaattagatactaaattaaaaatccctatactcccaaaatccattacaatgtagtaggaattataaatgatataaaaaatagaaaatacaataagtataaaatatagcatagagtttttcatttttataaattgcaagctgttacaaagataaaaaaagagctacctccaagaggtagctctacgtttttaaattgagatattcagtctactttaaagtaatattgtctatttgtacagtagtagttacagtagtgttacctgcatattcaaaaaagatataaccttttcctgtagcaggaattgcaaattcgccactatctacccaatcggcagcatagccattagtattttcttttgaaagagtaaacttagaagtaatatctattaggtcggttttatttacaactccgccaggtgtatatttcgtagtgtaatatactttaagagcatctcctgtgtaataaccatcttttgtttggaaagagagcttagaagagcctgtaaactcagcaggaactataaagtaagtgctaacatcagcattggctctaaatgcacttatttggatataattattaccattaaaggttttttgctcccaaaaacgatttccaaatacagaatagttaatgtatttaggatctgcaattcttttgaaattagtaactgtagatacattatcaaaagtttcagctatggtcttgttatattctggagcattgccacctaaaacatttttggaacttacaaatctttcttgttcaaatttaacatcgtttaaatcacgaatgtagagttgccatgttacatttcttccagaaacatatttgtttacaactacggtgatgtctccacttttagtaggtagtgttttccctgcaaaacgagcaaaaccactatttctcaccacagcagtgttgtcttctctgtctactaaagttctatcaacagtttgtctattgactgcatctgcataagtaattttaccatcagcctctgaaaattgtactcctttaatagtaactagagtattgatgtattcatctttagtagcttctgcaatggagtttaccactctaggagtaatggttttaatatccatagtattacctccacaaactccagtgatgaagtctctcatattaccttcaggtatttgtcccgttggatttacatagcctagtttaactacttctctgtctaagccaacagaaagaccgttagctctaacccttacacgagagcccacaggatagtctgtatataagaaagttttgtttatggcaacttggataccagcggtaggattttcggtattgtcttgtatggtaagttgtttgtaaaagttaccaccttcatcagaagaaattacatatccttcaaaaataacaggagcgtctgtttctccgttagggatagtgtagttgcttacgaagtttacaggttctggagccaatgttttaaaatctttaatagtagttgtaggttccgagaattggttgctacattggattgcaggtgtgtcaaacttatcgtcgtgtacgcaagaggttaatgctccaaaactgagggctattaacgaagtttttaaatatgttgttgttttcattttttattgtgttaaatattaaaatttagaatcttacttgtagattgataaaatagtttctaccctgtgtaaagaaatatctaggtgcaaaattaggatactctctgtcgtagtctcttctaaagtctgcaaagttcacatttcttgtttgctcaaagcctccagtagcatatttagtattgtcaagcacattgttcacagttgcactaattaggacataatatttgcctaacatccaggatttacccgcattgatgttaaagaaataagcgacagggagtttaacttgagcggtaactcttttgtattcctcctccgaaattcctgcatacggtgttcctgttactgggttgtttacaaagaagtcagaacgaatgagaggagatggatctaggaaattattgccaagatagttccagttagcacctacccaccagtatttaggagaactatactttactcctagagagtaggcttcttgtggtgtgcctccttgtctaaagtttttgatgtaagaagttccgtagctggtgtaaagtttttcgttcgggaacattcccaccgcatccgaagcgaagtacacctcaggattattggtatagatgtatttaccataattggcaaccccattaacggtaatagtaggcgttacttttacctctacacctagttctgcccccatatttctacggttcacattagacattacttgtgttacaaatgcacttctcgcactagtggtgttgccttcgctatctacaccatctagttttattccatcagcaaagaaacgctgtacattagtatcattttgtgtgtttataaggaatgcggtagctctcactttaacaaatggagaagagaccatatagctaatatcattagccgaaactatggtgtttttaatattaggtgcgatggcactgtttactcttgcattgatgaacaaattattgaggtaaggagcttgggaatagtaggcactattataaactaagaaatttctaccatctaatttatagattacctgaccttttaagccgaaattccagtagtcttggttttcggattttcctaatgcatctttgtaaagatagtggttaaaatgcccttctctattattagtgatgtaagccgctagggcagatacgaaaatatcaaaattacctgtgttaaatttcaaagcagggtttatcttagtttcttgtcttcggaaagtgtagtcataacctattttatcgcctacttttttatgagtgttttcttctccttcgttgaataaacctgaaagcttaggctggttggtagaggcaaaagggtctccattaagagcgtattgtgctcctagtaagtcttttatctctctatattggtttgataaataatttctgtaagaagcgttgatgaatagctgtgtcttgtcagaaaaattatgaacaaaatgagttcctacattccaaactttgtcatcattaacatcatttactaggaaataaaccgcttgttctctatttctattagcgaggtaaagcctatcccaatttatttgggtgtagttttggtcattgctttcccatctgtttttagttatttccagttgagctatatcggagtcgctagggttggctaatccagcaaaatagcttggtaaatttctgtagtatagaggagaggggttctgagcgttataccaatctagtctagaagccttgtctttaccaaattggtaagaaacagtagcccaaagctgagatctgctgcttatcttccagtaatctgtaagttgtagtatcggttggaatccttttcttactctttcacttcttttctcgccatcttgccatccccagaaagcattgtaatgtacaccattataatctattacctcttgggtgttagggctagcagtacttctacggtaaggagagcctattaagtttaaggtaagtgtatgtttgtcacttacttttttctcaattcctaggtaagctccgtaagcatcatagaaagtaccttcttgtatcccttcttgtgcccatcttctagctcccattacagtaaacgcccaaccctttttattcattccagaagagtatcttaaggaagttctgttacgatagtttctgttggtaagagattgggtaaattggaaacctttgcggtattcacttgctttcatatttttgtagaccacagagccaacgcctccgaaagcgtactcagaaggggaatgatttactgcaatttcagggtatcttgtgatttcattaagtcctccccagttgccataatctacattgccattatcggcattttccatagagataccattcatcataacctcgcttcttctaccatctatacctcttggtctgaaccaatagaatcctaaatcaaaggcagcaatattactaaacacatctctagaagactgtaatagtcctaatgttgcttgtgaggaagactcgtccatactgctattgtcatctagcaatactactcctaattccgaatttttaaggttagaaaaaagagtaataatccccaagtcttttcttttttcattttcaaaaacatcaaactctaggactttggtttcgtagttaggttgagttactaccatttggtaatgtccaggttttaaatctacaaattggaaatatccaattttgtctgcctttacatcgtcattggcttctcttaggtcggctactgcattttcaatgggttttccatcggcatctttcacatacgcatagactgtggtttgtgcatagtaataagatgcaggcaataaacagaacatagagactaatgataatttcttaatcataacattctttttttcttaatttatcttttgaataaaacgattattcaatccacaaaattaagtcaattttttgacaagttttgatgaaattaagaatttttaacatctgatatttatcacgagtatgtgagattgctttagggcaaggggtttgtccctaataatgttttatgtattgttaattaaaattaattttaacttagtgttcacttcaaaatcactaattttgctcaaaattagaatctaggtttaaaaacttatttaaaaataaatgaaaatgaaaaagatattttctctcttaacattgggactttttttaaccagtttttctcaaacaggtaagctgagaagaatggcaacggtgggtttctataatgtggaaaacctttgggataccattcagtcggcagattatatagatggaacgctaccgcctaatcaccctcgttttcatagaagtgtgccaatagattcggtaaagtatttggagcgtgaggactataaaggggagtggtcggactctaaactggtaggtaaaaaagtggttcgttttcagggttcttcagaagaatttacacctaagagtgccaaaaattacaacacgagtatttataatcaaaaattaaccaacgctgctagagttatttccgagttaggagcttcggttaccaagacagctccagtagtagtgggacttcttgaggtggagaaccgtcaggtagtggaagatttggtaaaacaacctgcattaaagaagtttgattatggagtaattcattacaactcttatgattatagaggcatagatgtggctcttatttaccagaagagaaggtttagccctacttacagcactaaaaaagaactcaaaatatacaatgaggagggtagaagagagtatactcgtgatttgttggtggtttcaggatatttagatggcgaaaaagttgctttttttgttaatcactggccgtctaggagaggtggtgaagcagtttctcttcctaagagaaatgctgctgctcagctgctaagagcacaaatggatagcgtaagagctttagatgctaatactaaactaatagcaatgggagactttaatgatgaccctattagtagtagttttaaaaatcatttaaaggcagtaggtagtgtcaaagagcttagcccagagtatccttatataaacttaatgtatccgttgtataaaaagggagtagcatctttagcatatcgtgatgctcctaacttgtttgaccaaattattgtttcagaaaatttagttaatccaaaagatacttcttattctgtttttagaacagaagtttatgcccctgcttaccttatcaataaagaaggtagctttaaagggtatccgttccgttcttggaatggggataaatttacaggagggtatagtgaccacttcccagtatttactatattgtccaaggaggttaattagaaagtttataacatactgcgaaggaggttgtcttagtttaaggcaacctcttttttgttttcacaaaaactattatctttaaggactaaaaaaataggaaacctatggatttgcaattcaacaaaaatgaagaccttaaccgattgaaactttcggaaatcaatcagctattagctaaaataaagaaaggagggggagaaaaacgcctagaaaaaattagaagtgaaggtaaaatgacggctagagagcgtatagattacctcttagatgataataaagatagtatagagataggggcgtttgcagggtttgaaatgtatgaagagcatggtggctgccctagtgctggtgtggtggttaagatgggatatgtttctggtaagcaatgtattgtggtagctaatgatgcttcggtaaaggctggggcgtggtttccaattacgggtaagaaaaatcttagagctcaagaaattgcgatggaaaaccgtttgcctattatctatttggtagattcggcaggagtttatctgcctatgcaagacgaaatttttcctgataaagagcatttcggaaggatatttagaaataatgccaaaatgagtgctatggggattattcaaatctctgcagtgatgggaagttgtgttgcaggaggggcgtatttacctattatgagtgatgaagcgatgattgtagataaaacaggttccatatttttagcgggaagttatctagtaaaagcagcgataggagaaagtatagacaacgaaactttgggaggagctactacgcattgttctatttctggagttaccgactataaagctaaagatgataaagatgctttggatagaattaaaaacataatgaaatctatcggagattttgaaaaggcagggtttgaccgaacggaaagctttttgccaaaagaaagtcctgaaaatatatttggtattatacctgcagctagatcagaacaatacgatacttatgaaattataaaatgtctagtagataaatcggagtatgaggagtataagccagattatggtaaatctattatatgtgctacggcaagaatagatggttggagtgtagggattgtagctaaccaaaggaaattggtaaaaagtggtaagggagaaatgcagttcggaggtgttatctattctgattcggcggacaaagcaacccgatttattgccaattgtaaccaaaggaaaattccattggtatttttgcaagatgtaacaggttttatggtagggtctaaatcagagcacggtggtattataaaagatggtgctaaaatggtaaatgcggtatctaattctgtggtgcctaagtttaccattattacaggtaattcttatggagcaggtaactatgcgatgtgcggtaaagcttacgaccctcgtcttatcgtggcttggccttgggcagaccttgcggtaatgggaggtgctcaagcggctaaagtattggcacagatacaagaggctacccttagaaagaaaggtaaggaaattaccgaagaagaccgaaacgaaattttacaagaaatatcaaaaaaatatcaaaaacaaactgaagctacttatgcagcagcaaggttgtggacggacgctatcattagtccattagatactcgaaaatggatttctatggggatagaggcagccaatcattcgcctattacagagaaatttaacttaggcattattcaggtgtaatgaataaggaaaagaaaaagctatttagaaaagtaaatacaactacctatggtgttcgtcatcacttcgggcaagattataatcgaagagacaaaaatcaacaaggtagtaaaggaaaaatgaagagaggtgtagaaagaggattagactatacgccactctttaagtttttgttatcaaaggtaggttcagactgggat

SEQ ID NO: 2187 - DNA, 24200 bp, synthetic construct
  source 1..24200: mol_type = other DNA
  misc_feature 1..24200: note = Synthetic
tacatttagcaactcataaaaaagaatatggaaacaaaagtcatcaaaataacacacgttaccggaacctacattattgaagctcctcatggaaaacttaatgacctgaaaactcagctggacaagtgcctgaacgatgagcagggggctattgtgataaagggagatgatggagatcagtttgtatatccgtctgatcttttaaaaaacagcttcattgcaatcgtagacaaggaatagatgatatgttcgtgaaaaataattcccttgatttctagtctattattaagttttgttaaaatttgtgtggcaaaagttttgcggaaattaaaaatcgttctatatttgcaccactgaaaacaacggtatagccggagtttagggagagttggcagagtggtcgattgcggcagtcttgaaaactgttgactgtaacaggtccgggggttcgaatccctcactctccgcaagatgcacaaacgtaaattttcaaaaagcatcaaaaaatatttaaatcctgcaaaatcaatgatttgcaggattttttatttattgcaattgctgtaattttcaaaaatactccaaaagtttgtggcaattgtgtggcaatttttaaattgattgaaaattgccatagaaagcagattcaaaaagctgtaaaaacgcatttaaataatgtgtaatgaacgcgttgcaaatctaaacatcttgattcgaggaacttttagtttgacatttataaccttaaaaaatgttgaattatgttagtagaacaaagttatgggctcactttctttttaaagagctcaaaaaatgaaaaaatccgccatatttatgtgcgaataactgtagatggtattccaaaagaaacctcaacgaaaagaaaatggtatcccaaccgatgggatcagaaagaaggcaaagctgtgggaacgaaagaagatgcaaagattattaacctcttcctggaatctttgatgactaagattaacagccacagaactgagtttatgaataatggtattcccatcacctcaattgatcttattaacttcgtaaacggaaaatataaacctaaaaataaggtgcttgaagaatttcaggaacataatgatgagatgggtaaattgttagagaccggagaatatgccaaaggaacacatgaccgttatatcaccgcaaggtcccatgttcaagaatttatcaagtatcaatataataaagaagacataaagttcagagcactgaactacgagtttgtaaaggattatgatttgtacttaaaaacagtaaggaaatgttctaacaatacttcattgaagtatattagcaattttaagaaaatagtattaagagctgttgcaaaagagattattcctaaagatccgtttaagctatttattggaaagaaaaccaaggttaaaaagaagccgttgacaaaagctgaactaaaacgaattgaggaaaaagaatttagctcagaaaggttgtcggtagtacgggacatttttgtttttcagtgttacacaggattgtcctacatagatgctttccaactcaaatgggaagatattaaagaagctaatgatggaagtgcctggattatgtccagcaggcaaaaatcaaaatctgacactgatatcccactcttgcctaaagctttggaaattatatcgaaatataaagatactccattatgcataaaaagaggcactgtactgcctggtcgctcaaatcagaaaatgaatgagtatctaaaggagatagcggttttatgtaatgttaatgtaatacttaatactcataaagcacgacgtacctttgctagtacggttaccttaaacaacggtgtatcaatacacgttgttaaagaaatgctgggtcatcattcagtgaaacagacagaggattatgcaatcactgaacaggaatcaattgctagagaaatgaaagatcttgaagccaagctaagtggtaagaataatttcaatagggatctggttaaacttctcgaaaagctcgaaaaagaattccatgatttaaaaaacactcggaacgcttattcagaactttttcttgaagagagatgtattgcttttgaaaatatgctcattagggcgaaggctattatttaataaaaacaatcccctcaatgcataaagttttgagggaattgtttttctgtctcaccttttttgtatagacagaatttctactgtgctacgataatctggatgataagatggaatgtacttaatgtatccaaactgctgaagttgcttaaaatatttatgataactggttattgtagtgatatgcgaaaactccataagttttctcctgctcactctgataatccatttttcattttgtttgcaggcaaggcgggcaattgcaattaacaaagcaatatgccaaacattcaattttggattactttgaatttcatcaaggaaatcaaaccagtgctgtatatcattccttttcataatcaaatagatgttgaaggtcttcataattgtaataatacgagcccaataatttcttaaatcgaattttgccagtgatcctaagattttgtaatgtcgaagcagaaatatttagttttctgcgaattaccttactccgcatccagccaaattcttcatcctctcttgaattagctagcttagattttagtaggttctcaatatccgaaactattaggtttctcaatgctgttaaatcatctttcgttattgtatccatatttataaattttgatttaattcaaaatttaaacttacagatatcctaaaagaggaagtaacaggcacattttttctttgtatttcttactgcctgtgcggaaaatttagaaaagtgagttttaagtagtcaaaagcgaacaaatgtcgaaccaaatagttgaagaccttatagctctatcaaagcttctaactgatttgccattatattcggtcgtgttttgagatttttaaacatgtaaattttataattatttatttctgtcctaaaatctttatcatattgtcgggactagttataaatttccgttcgggaagtaaataattgaattcatcatcttttaattaatttcttctgtttgaatctcaatatcaatttcttcaaaatcatcaggcgtttcctgaattggttcttgaagccttattccatcaagataataagttgttcccaaatagatttcatcgccaaaaacaactccatctatttttcttttaaagcatttcccaggatccgctttaattatattgtctgtctgtgtcatattttattattatgttatcggataaatttttgcggcaaaatagctccagttggttgccgttttataagcagaaatgcttgaggcaggtacatgaatttctactgtatctattattattccgtcagcaacaaagttagttcccaccaaaattggaggtgtcgttgccaatactttaattattactcttgtaacgccaaattggcctgcagctgggtacataggcatgcagtagttttctatgtagttaattgaagccggaagaataatagtaacttcattctctcccctaagaggccttaaagtcaaaccatacgaatccattctttctaagctcgtacacccggataaatcaacaagattggaaacaagttcttcaacaggataattatttacattattagtaagcatattcttgaaaattctcgtgatataaggaagggtatatttccccgctctcggatacatgaactgaaatgaatttgttgtataaatcttaacattcttaaataaattaatatcgaagtatcttccataaaatggaatttcgccaagttcctctagcttatcaaaatttccgactacaacagcattatacttaaagtaaaatgcattagaacctatcttctttatattgggaggaaaaataatgctttccaattcattttcatatgaattgaatgctctctctccaattgtctccacattcgtgaaaaatctaaactcatcaaaactgtaagaaagctttctcgaggtattaacatctgtgttgaaagtgtcagcaggaatattgataacagctcttgcttccgcaaaactgagttctccatcaccgttggtattaaagacatttaataatgtagctttcctggtcgcactcgaaatttgaatgaaagtggcaacatttgaaaatgtaaatttaaagtctggccaattggcttccatgaaatctttatcttcttgatatatggtagtaaagttccaagttccttcaactacagaatgaggcgttgtgttacctgaatcatcaatccccttagcattgataattgggaaaaacatctcactcgaagcactacttccatttagattattaattctcactctgctcaaatttttaagatttgaaacaatgtcactaacattaattaaagggcaatctttgataacaagtgttttaattgaacttgctgtaaaagttaagttagaataagtaataaatttttgattatctaatattaaagtacttgctgtacttggcaaaattaaggaagcaagcaaaccgccttttggcaataagaccgacgatattcctgttcctgcagcagaaactcttttaatacttgtacaagcagtaagatctattgactgttttagatttggacaattcgttacatccaactcctccagaattgtattattaccaataaacaagtttctcaaattttgatttgaataaccggaaatttgacttccaatttgaagtctcgacaaattcgtcgcttttgaaacatctaaagtaccaagatactttcctgacaaatctccaagatctttaattgcagatgcaccatagataatagtttctgtgtcgttaaaagtaatagccggagcttgaactaaagatgcaacattttttctaagcctcgcacggttgatataggaaccaaacttaattttcgtatatccgtctttcagagctgttaataaaaaattagcatttggaggaactacaggcgttcctgaaggtgtataaagtctcatcgtgatataatcagatgagaaagtagaggtgtcgtactttccgtccatatatctgaatctatttaataaccaataattcctgtgtgattttcttgagccttgtgcggtgtataagtaacttccgttcccagcaacaaccaaaggatctatatatttatatttcgcatcttcattaaaaatactttccgcccatttgtcagattctaatgtgttaaaataagtgttgcacttatcataagttagaattcctgaagttctcatttgctggtacaaagccgtaatttcagtatcaaaagccacttcaaccaatttccaaagctcggataaggccccattccagacaaaaccacttcctacttggtcgtgagcctctacccagtaatcatacacattgtggccttcgttattaagacctaaaaccgtatcattatcataaaaaataagataccaacggttgtttccttgcgcatccggatacatcgcaaacatctgatttttagcacgctgatcgaccattgcaaaaaactcagtgaagacataataaaacagtaaaaactgaatattaaaatgatctggagcctcggttttgaattttgcaggattatttttgcaactcacaatccatctatgcaaagcttcaagattcgaagtatcttcattattttccggatatcttccctcaaaatcatttttccataaatgcttaccattttcgtctgcactttgaaaatctgtagcaataaataatgtattatctgaagtattgtttaaaaattcccagcattcctgaccacctgtaaaacctgtcgttgcttcattcgacttatcattattgaaattatattttccgagaaaaatacgctccgagtctggtgtcgctctgtgaaatataagcattggaaacccgtccatcgtagtacggatgttaggatcaattaattgtggtggaactaaataacccaattgatttaaagaatcttgtgcaagcctcgccaaaccaatgttgtgagaacctgaagattccatgaagtcagctttaaaagtaaatgttttttcagctaatgaattatcacgaagcttatacttggaagaaactaattctccatttttaaagcccccattaaattttattttaaagttttttcggggataatattgtgaggatgtaccctgaacatcaatactcgcatttacataagaaaacgattttgtaggatcttgagcattttcatactctccaacaattgtttttttatcgcctttataagttggcaaatctccaacaatggttaagcatggaattgattgtaaacatttatcgtaggacaaatttccgaatgcatcgtacaatttatttctctcgtaaatgttgactttttcaaccaggttatccatgtcagcaataaaattcgacaacatctgatcggcgtttaggttattattataaacccgaatattatatagattaatattacaatcactgcttccaatggtaatattttgaggagcttgttgtaaaaagctgtctaatgaattatactgatataatgaagatataattccattgatatacacaaataccaatcttttatctgaaacctttgtaacgactatacttacacgaatcctttcctcttctttaaaaaatatggacgtaccgtcctgctcagaactgaacgaaaacgaatttgaggtagcaacaaatccaacatttccatttttacaagaaaaaatagtactgtcactgttttttatatctgaagttgaaaattcaaattctaatgttttaccacctgttttaaaatcgtgatcaaatattttaaaaggaatctcaacccttgcatttccactcactttaagtgccacagaaccctttgagtcttgaatccacccattggtgctgaaatcaaaatcagtaagagtacatgacaggtttttgtatttccactcgtttttgttaatctctgaattgcttctgtttcgactgcttaaaaataattccaagcctaacgtttcggcttcaacttgaatatcgaaagcagttacaactactgaagtatttttcgtgacattgccacatttaaaagttacagtgtgcgcacctgagtccgtaaatgtatagatgaacttctgcaaacttctatttacaagtaattcagaaaccttcactccatcgaccaaaatctcaacatcgctgtaatttgatgatggtgaatacaccagatattcaatagaagctggagcatattgattagcaacaacattatttgctgaagaaaccaggggcgctaaattaccggcaacaacactgataatatctgtaaataagtgattgctttcaatgatctctcctgacaaatcagcggtcatatacacctctaaaatatgaactccgtgcgactgtgcaggaatttcataaagaagctctttgttatttattgaagtaattactggcggaagatctgatccatttaatttgaaatgaatcgtcttctcgacattcccggttggaatatatcgaaaaatgatgggtcccgaattaatagtggtcttgtcgtatgtagtacttaaagcaagtgctattgtttgaatatcatattttaatttcctattatttccataactatcagtgatactaagtgttattgtattatctcccgccaaaatatatggcgtgatatctatatcattggctccctgattaatgtttttattaaataggatcgtgtttccttttaaaatacttgcagttcctccgccagtctcactaccatcaacactgtcgatggatgaccatgaaaaaactattctaacttcacttccaaatgattttacgaacgatgcaggtatttcagattttgcgcggaaaacaattccattggctcctccggctccaccaccagttccgtattcactttctgacttttctcctaaagctgaatatgcaatctgtttaatgatttttccatcttcatttttaatgaaaaacatgacgggataaatgaaattatctgcaacttctttatctgatctttcataatttgtaaaataaatttttcctgtatatctcattttaatcttcttgtgttaaatcaataaaaccatctgttccccctccaggtatattaatctccagaacagaccaaacaaaaccgtcaaaagaaattattccgaaattttcaatcgtaactcctgaagcattttcgtaaactccactccctgcccaaaaccattttgctgatcccggcttaacaataatattatcagtaggtcttacaattcctccaaaggaagaatttgctcctgaacctttaagcaattctatctgctccctgttttctttgatgtagtctacgattttctgaagcttatcaaggttatcatcattcgaggttagtatttcgttgatttttgcagtcagctcaagcatttcattatcttttgcctgaagtatatttacaatttcctcgatttgctcctttgtatagacatttccggtctcttcaccattgtctatagtggcggctagtttgatctttaatttttctttccattcttccacatttctagcagtaagattggatgcattaagttttgcgagcactaaatcgtgtgcgccttcatcttgcagatgatttgtaaaagttgtgctgaataccgttttttgaaaagtttcatttaaacccattacctcatccatcttgatattttcatctaaatgacggaatgaagaaaaggtctgctgaaactgctgttctgtggggatatcacccttttcaaaccagctaaatattgtttttaatggtactttcattattattggaaattagtttttataaaattgatgatttgagggaaagtctattcttgatagacttattgtaggtaaatagaattctatttcttttgagcaattattgattttcgccctcttttatcgtactgtcaattagtgaattattaatagggttacaacttagaaaacttatattttcgcaatgtttttttgtaattttattttaaatcaactacattcttttacattttttctatgctgttttcttggtgtattttttttgactccaatgatcattcacattctttagagtgcaaatttcattgttttttggtccctataaaagttttttgacctcgctatcctgtagttgcagtaagacgtatttttaaccgaaataagaaggtgtgaattaataatcaattcatcaatattttatatgagtaccatacatgggatcagtctcaaaagttgtggatgtagtgttaagtttttaaatttggaatatatatatattcctgataaactggtaaaactcttacttcaggatttttagtagagtcctttgatatcataaaagcagaagaagttgatggagtgcttcctatcgattttaaggagaagaatatcattccccaagaattcacccatcgtctgtatcattctaatggttttcactcttcggttcttgttgaagattttcctttgaggggaaaacgggttctgcttcatatcaaaaggaggagaaggattgataaaactactggagaatcattatagagagagcttagccttttatgactaattcagtatctcctttttttatttttcaaaaagggaataaaaaacaaaaaccacccttaaaaaaggatggtttgtagtcatagaaaaacaattctcgaaccattttgttgaggatttaaataagcttaaaggtttgatgtattaaaaaaagatattaattctaataaaagatgccccgaagatagtcgaggcgctaaatgttttcacaacggaataatccttattgtgaattgctttcataaattattgatacaaatataaaagaaaaaaattaactgtatttatgggaatccataatttgaatattttttttattactatttttatgtggtatcaaaaaattaatagcgatgaataaaaatatacttggactggacttgggtgtttcatcaatcggttgggcgtacgttcatgaagattctaaaaattttgaaaataataaaattatcaaattaggtgttcgtgtaaatccattaactgttgatgagcagttaaattttgaaaaagggagacctattacaaccaatgccggaagaactttagctagaagtgcaagaagaaatcttcaaaggttcaagttaagaagatcctgtcttatagatgttttaaagaaaaataatattcttagcgaaactgacctacttgctgaggttggtaaaaactcaacatttcaaacccaggaactaagagctaaggcgacaaaagaaaaagttgaactttcagaatttgctcgggtactacttttaatcaataagaaaagaggatataaaagtagtcgtaaagttaaaaacgatgaggatggacaaattatagatggaatgactgttgctaaaaaactttatcaagaaaatttaacgcccggacaatattcatatagacttttacaggaaggtaaaaagcaactaccagacttttaccgctcagatttgcggtcagaatttgataaagtatggaattttcaaaaacaattccatcctgatatttttaaagaagagctttacacagatttgcagggaaaaaataaaaattccacttgggcaattttgcaagagcctttttctcttgtagggatcaagcaaacaggaacagctcaggaaaaaaagaccgaaaaatatttttggaggaatgaagccgtaaaaaagcaattggattttgaaagcctggcggttgtttttcaggagatcaatagcaatttgaataattccagtggttatttgggggcgattagtgatcgtagtaaggagttgtactttaataatcagactgttggggagtatttgtttcaacaattaaaagcaaatccccacacaaaacttaaaaaccaggttttctacagacaggattatttagatgaatttgaaataatatgggatacgcaatcgaaatatcataaagaattaacaaagggggtaaaggaagaagttcgagatatcattattttttatcaaagaaaacttaaatcacagaaaggattaatcagtatttgtgagtttgaaaacagagaaattgcaataacagaaaacggaagaacaaaaaagaaaacagtagggctaaaagttgctccaaaatcttctcctttatttcaagaatttaagatctggcagatcctgaataatctacagtttcaaaatgtagaaacaaaagaagcttttcctatagatttagattttaaacagtcaatttttaatgaagttaatattaaaggaaagctttcctcaaaagatattttagatattgttggttattctagtaaagagtggaaaaccaatattaaagatgtggaaggaaactataccaatgaaaacttatatgatgctttccttagaattatagtaaatgatgggatagagtttccaaaagaatttaaattaaccattgatgatgatattaaaatttccaagctaaacgtttctgctgaagtcataaaattgtttcttgaagaaaagctgtcagaattaggaattaatacttctattttggacttcaatcctgagttggaaggaaatgattttgaaaagcaggcttcttatcaattgtggcatttgttgtattcttatgaaggtgatgattctgcctcaggaaatgaaaaactatatgaattgttgaataagaaatatggtttcaaagaagaacattctaaaatattagcgcaaattagttttcctcaggattatggaaatttgagttctaaggcgatgcggaagatttatccatatattaaagagcataaatacagtgaagcttgtaactatgctggttacaatcattctaaaaactcattgaccaaagaacagttagaaaaccgggttctgaaggagcaattagatattcttgcaaaaaattctttacgaaatcctgtagttgaaaagattttgaatcaaatggtcaacctggtcaatgaaattattaaagaatatggcagacctgatgaaataagaatcgagcttgctagagaactcaaattaagtgcggaggaacgtgctaatataacttctgaaataaacaagacaactatacaacatcagaaatatgcggaaattttaaaaaaagagtttaatattctggttccatcaagaaacgatataattcgttataaattatacatggaattggctaataatggctttaaagatttatatacagatttgaaaatagaaagagaaaatttattcacagagaaatacgatatagatcatattatcccacaatcccgattttttgatgatagtttttccaataaagttttagttccaagaggagccaatctaaaaaaaggaaattttacagcgttcgactatcttgaaattgaggggaaggaaaaagtagaaaaattccttagtatcataaaagatctgtatgacaaaggagctattactaaagcaaaatatgaaaaactacagaaaaaaagctcagaaataggagacggcttcattgaaagagatttgcgaaacacccaatacattgctaaaaaggctaaagaaatgctttttgagattaccaattctgtggtctctacctcaggaagaataacagataaactgcgcgaagactggaatcttgtgaacacaatgaaagaactaaatttagaaaaatatagaaaattaggtcttacagaaacggttataaattccaaaggtgaggagaagcaaagaattatagactggactaaaagaaatgaccatcgtcatcatgcaatggatgctttaacagttgcttttacgacacataaccatattcagtacttaaattatttaaatgctagaaaagacgaaaaacataaacagcatcaaaatatttttgctattgaaaagttaattactaaagtatttgaaaagaaaaatggatcaaaagaaagaagattcatagaaccgattaagaattttaggattgctgcaaaaaagcatttagatgaaatcttggtttcttataaggccaaaaacaaggtggttaccaaaaacatcaataaaattaagaaaaagggaagtctaattgtcaaaacagaactgactcccagagggcaacttcacaaagaaacgatttatggaagttcaaaatttcttaaaacaaaagaagaaaaggtatcaggaaagtttgatgtacaaactattagtaaagttcagaatgaaaaatttagaaatgctctactggacagattacaagagtttaatggagatcctaaaaaggcatttacaggtaaaaatataatctccaaaattcccatctatcttaatgatgaaagaacagaacaattacctgaaaccgtaactttagcttggtatgagacgggttacactattaggaaagccgttaatcccgataattttaaagattataaaaatcttgaaaagattattgataaaagaattcgtaatattctgatagaaagattaaaagaatttaaaggaaattctaaagaggcctttactgatttagagaagaatccgatctggcttaataaaactaaaggtataccaataaaaacggttactatttctggaattaataatgccgaagctttacactataaaaaggatcaattaggaaatcatattttagatgaacacggaaaaaagattgcctctgatttcgtaagtacagggaataatcatcacgttgctatttatgaagatgaaaaaggaaatctacaggaaagagttgttagtttttatgaagcagtggaaagagtgaatcaaggacttacaataactgataaggattataatattgatttaggttggaaatttctttttacaatgaaacaaaatgaaatgttcctctttccatcggaagattttaatcccaaagaaacggacctgtttgatgaaaaaaaactttttttgatttctaagaatctgtatagagtgcaaaagtttggagaactttcaaaatctggtttttggtttagacatcacttggaaacatctgttgaagtgaaaaaagagctgagaaattattcctacttagacttttacagtaaggattttatgaagaccgtcgttaaagttaggcttaatcatttaggtaaaattgtacaagtaggagaatattaaatttttattatgattacccgctcaatatacatcggcaatcctgcctatcttaaactcaaagacgagcagctgaaaattctttgtccggaaacaaagacggaaagggggagtataccagtggaagatttgggtttgctaatgttagatcattaccagattactatttcacataaccttattcagaaaatgatgggaaataatgtagtcgtcatcagttgtgatgcccatcatttgccacacggaattatgcttccgctttatggtcatactgaacattcagatagagtgaaagaccagttggaggtaagtgaacctttaaaaaaacaactttggaaacaaacggtggaatgcaaaattgaaaatcaaaaaaatgttttaatgaaattaggaaattactacgaacctatgattgaatatgagagaaatgttaagtccggagatatcaccaatatggaagggattgcggctcagcattactggaaatatctgatcagtctcgattttttaagacaaaggtttggagattctccgaaccagtttttcaatttcggttatgcagttcttagaagcatcgtagcaagagctatcgtagaaactggcttacttcctgtattgggaatttttcataagaataaatataacccgtactgtcttgcggatgatctgatggagccttaccgtccgtttgttgatttgcttgtgatgcaatggctgaaaattcacccggatacagaagaactgaccaaagaatttaaagctcatattttgcagattgcaacaaaagatgtgaatattgatagtaaaataaggccgttgcttgtagctgttaaaacaacagcttcatcactttataaatgctatacaggagaaaaacgactgatttcttatcctcaactgttatgaattccgaaaggtttaatgcatatcgaattatgtgggttttagtactatatgatctcccgactgagaccaaagccaatatgaaagatgcaaaccgttttcggaagctactcattgatgatggctttactttgtttcaattttctatgtatgtacgccattgtccgagtcgtgaaaatgctgaagtacatattaaaagagtaaaatttatgctacctaaggcaggaaaagttgccatcatatgcattacggacaaacaatttggagatattgaaatcttttttgctaggaataaagaagaacctcctccgacttttcagcaacttgaattattctaaattttgaattctaatcataaaaataatctactggttttcagtagattattttttgaggttgtgactaatcacgaagataataatttttgaaagcaattcacaacacccagccatttaggtttttgctcagaatcgttgtgactaatcacgaagataataatttttgaaagcaattcacaacttacctgcaaacgatcaacaactgtgttgagttgtgactaatcacgaagataataatttttgaaagcaattcacaactttttcaccccatctaactcagacatgttcgttgtgactaatcacgaagataataatttttgaaagcaatgcacaacatcattttctttggaaaaatgatattaaagactgtgcctgatcactaagataataatttttgaaagtaattcataactcatgttgataaaaacaatctttttatcaagctgtgattaatcacaaaagtagtaaattttcaaagcaattcacaacggattaagctcgcggaaaggctaactgatcagaaagatagtaatttttgtaattcataaccgctcgcgctttgtaaattttctatttcagttgtgattgatttaaaataacaattcgattatagaattttaaagagtccgccttatagttggacattttaaaattacagaatgttgatagttctgttttttaccagattcaagccacttctaaaaaccgagttgagccatttctattgattccttaaaaatcaattttgagatacatacaatttcacaacaacatgaagaagttaggagcgtatttacaactttgaaggtcgtacctccaaacaaagtttctaatccgctctgcgaggcttttcaataattataattaactagtattttaccatttccaatacagttttataaaatgaagaagtccgctaaaaagcggacaccttacattttttatcaaaaggaaaaagaagctaatttttaccgagcattgccttacccaatgtagcacctttcaatttttaatatgagaaattgttttctcaaaaatataattggttttgagttatagctcaaataaatagtttgttaactatatccaatgatatggtttatccttacgattaatatggcagtgcatctcctcttttttaagttcgggaaaaaattctatagctttatcaatagcataatttggcaggaaatggatttcgtcacgaattgctttgactactttttcgtaagtataaaattctacaattttatcaatatcgttttgattaccacgttcaacaatacgggcaataattgacttataggctttatctagattcatcgcatctaaatcaaaatcccaaaaaaatgaaggatcgatatcaaagcatggtctttttttatttcctgttttcatagtataaatttactgaataatagtgatatataaaagtttaacgcttgaatccacgcttcttttgtttattattttgctctttgatttcagtaaatttaagtaatgggttatgtactgatttttttaatctcttctctatcttttgccaggttatatctttaccttttatcatcttgatttgtacattcctatcaatactgtcgtaatgtagtaaacttaaggcagcaaatgagggatttcctccatactttttttgataaaaatcaagataagtcttaagagaattgtgttccaatagaaaatgcatatcaacgaaatcttttattctgcttccatcttgaaatatagcgtgaagtttcatagcgcctatatcctcaagggatgccaacctaatgccttcttttgttattattgtaggcaattgccattgatactgatgagcaaggatatcgaccttgatttcagatattttcaaaagcaatgtattttcaaatatatttttaacttctacaggatagttattcgaaagatagtttaagatagatttctcattaaacggtttagttgtaaacatatcaatatcaatacttaaacgatgaccaagcattagacttagtgcagtaccacctaccaaagtaaaatcctttagtctttcctctttcatcagtttttgcagaagttcccacatttccttactgacagtttctttatgcagcatactttcatttttcagaaaattaattctgaaaatgaggtatgcctttatagtggcgttgcaaggaactatttggcttcgattatcaatgaaagtctaaattagaagccttttattaatggagatattaataaatggaattataatttttttctgtgggtagttagtacctgcatcactgatacagtcaacttaaattttagtgtagtttgttcttccaattggctcttgtaattttaaaaagtctagcttttagttggataccttaaaatctataatatgtagatggctttgttttgtacttttaaagagattaatgaaaacccctgcattataaaaaataattttcctaagattctatttttagaacggatatattgtctattaaaatgcgtgtgattttacaactatgcggagaagttaggagctcattcgcaactttgaatgtcggtaccctcccaacaaagtttctacttcgcccgcagggggctaaaaaaagcagccaattgttggctgcctcaagtagaagaatgtttgaagtaattactgcaaacgcttatgagctatcaatacaaatatatcacaatttaacaaaacaactatcttatgaaaacctcaattaattttaaagcgataaaacctgattctgagatccataatttcaggagaaaaactttcgattatatcaggaaagagctgagctcaaacaatgagtactggcatgaggataagatttgtgacagactcaataaaattcaggcatattgtaaggagacatcaggcagaaaattgcaaagcaatgctatgcctgtccgtgaagcagtggtagttattaaggaggataccacgatgaaagacctttttgatctttccctaaagttggagcaggaactgggaataagggtttttcaaatagctattcacaaagatgaaggacactgggacaaagaatctaaggagtggaaacctaatcttcatgcccatcttgtcgctgactggcaagacctaaaaacaggaaaaacattaaagcatcagtcatttcattattccaagatgcaggatattactgctgaatgtcttggtatggaaagaggaatcgctggatcactgggaagattggaagcggtagaattcaaaatccataaaaaagaagaagagcttaaagctttagaaatgaaaattaacgagatgcaaacaaagctagagggcaattcattcaaagacctcattgttaaagagactgactttttggggtttgaacatataaagacagaaaagaccattaaaaattatggaaaggtttttaggctttacaattctcagctgttaaaaaataatgatctgatcgagtcccatcgtaaacaaatagcggcgctaaaacttcagacagaatcacaaaaaaaagaagtatctgatcttaggagcaaaaatactctgcttataaccaatcccaatgtttttgctggtgaaaagaaaaaatatatggattctgttattcaggcactggaaaagcagatcctttccgagcgtttaaataaccctcatcatagttcaatggatgagaaaaaccttaccctagaaatgagcagaatatgtaaagatctatctgaaaaaaatattattcctttctctgcttttgaagagatctttaagacaagtgaattacttctcgatttattttccatgttaagcttaggagcggcatataatccagagccagaagagattcctctgcccaaaaagaaaaagaagagaagaaatataagatactgatacaaaaaaaggcagatttgaagatatgatatcctttactatcttgaaaatatttgttacataatgtgtgtaattttcatgactacgttatcatttaattacttatttctttgtctgattaaaaaacgttaaattaatacaataaaccatacgttacagggattcgtaaatttcgcaataattgatgccagctttatataaaattatacaataaggaggtacatatgaatgttaatacaatcatgttatttgacaaagtgatgaatcagtctatggagcgtttttctacgctgtcttttgttaaaaagcaagtctatatccataatactgaatatttggctaaaaaggtcgcctatataacacagttatatataggttgtttttctaagtttggatggctttctaaagattcacggttttttaaacgtattttgcagggaaacctctattttggctccgatattaataaagatgacagctccgtttctaagattgtggaatatctacccgagcaagaaacaatgaaagagaattttccattaccttttcatatccatttcactatactccccaatttctgttgtgtaagcggtattatatggaaagataatttagaaagggtgtttatatgtctatccgagtgttccatcccaagggatatgattgagaactcgccgggctgttatgcatatctttcggagttattagaagagtatgattctgttaaacatcctcagctccggaattggatcaaagggaaggaacttagtatccataagattcacagtgattctaaaaaatactggggcgacagcttttatagccattatctaaaaataaagatgattggtgctcttggagatgttctttttacttcaaagacattgaaagaagttgcgataagccataactttgttaagtataacaatatgtacaaggcttttaacagatatgaaatagaccttagcaaaatttccagattcgccaaattgtaatatttgtattgatccctaatatgtatagtaataggatgagcaaaaagtccttataattttaagacattatggatatattttaaactgatgataatctcctctattggataaggacagatctcttggaacggtgaaagtatgggtatggtcaaaactgcacatcccaatcccaggctcaggaacattccttttactcatgctgtcgtaaattggagaagggtgtataatgtttacctttccattgcatcctgaaaaaatacactttgcttcatgaataatggttgcaggtcttctttttagatccctaataacttttattatgtacatgacactcataataagtaataaactcatcagaaacactgaattgatctcccacttttctttcataatatatatgaagaaaaaaaccagaaggatgttaaaaatagcaatactaaacaaagccgcataggcattgaaaggattaaacgccctttccttcggataataaactacatgtggatatctggcaaacttaccattacctataggataaggattataaataccatttaaagtgtctcttacatgcttttcatgatttgtcttaatagtctgcagttcttctaatgagaagtattttgttttttcatgacaggtgggatgcaaaagaaagagattttcatatttatctttttctttaatgggaatctccctataacttggtacattggtgtcatgtcgggaaattatatgagcctgatgaacgatacattcaagagtttccatatctataaatggtttcttacagtatgcacaaaaaccgcctgataaagcccaaagcagcctaaaatctctgtcatcaagcctttttctgtattcagtatttttctttttcatatatttaaaatactaatttatttagttgcatattttaagggtaagaatatagaagacctatctattaaaatcttaataaaacatacaccatgaagtccaaaatatcagaaaagagagctgttttcctggctcatcatttttttaactattcctttgatggaagagagctggatataaaaatttttaatacgatacaggagccaatagaattacattatatagcacaaaatcataattacgataacggcaatgacttgctaaagcatattattaatcatccacaatgtgatgtttctacggcaagaataattttctttcgatcagatatagatggctttataaaggataaaaacaattgtgaggatacagatcttattacctctattttgaaaaattctgagaagaacttttattcacaggagcattttttttatcactctgaccatgatccggattctttacatttcgatcagcaggaatttattaatcaatatcaatctgcagatatcttattttcaaatcctaaagggaaaagagtagaaccttctttcactgaaacatttcatcaaagaaatttaaaattctaccaaggaaatctaaccattacaaatgaagaaggaaaactccttttaacaacaccccataaacaaatactatttcaaattcctgtcggatttgttcctgttaatgataagaggtataatgatttttttacctcatggaagttttctgagaacttaaggaaacgctttgatacctctgacaaagcattaaaaaaggtattgataaaacctcggctcattattgaaaatgatgattttatcatagtattgaacatttttaatagtaaacccttacaattaatagacagtgttaccaatgttgccaccatcttaagaaatgaactggtctatcttgaagcatttgtcaatatcattggggttgaagatgaatttaccaaatttaagcgaattaaacatgataatgtgtggtttgtttcaaccaaagtaatgcagattaaagtggtaactattgaaaatctccaatatctcaaactacttttagtggaagtcgatggcattctatttttattatgtattattaccgggaatcccgacagtttcaataaaaatatcattcacgagctcatacattccttttcaattaaaaatggtcaggaatctatttaatttgtttttattttccggtatacagaataccaaataaaaatgattccctaattatctgtatattttttacctttacctgtagttactggccatacccgttatgaaatatctcaacgaaagtgatgaaaaggctttgctgctaaaaatacgcagtggagacagggcttcgtttgagtctatttatcatcattataaagcccctctggctaaaaagctatacaggatcctcaaatcattggatcagacacagggagtttttctgcgcgtatgagaaaacagtgaaaacatcaaaatagagtattcttttgctgcctatctctataccaactgggccaaaagatagtcaaataactgtccttttttgttacattcaaacatagcattatcagcctactggtcgtattattctatttttagtattttatttctttattaagttaaaaaaaattagatttaaaaattagcagaccaaaattacactattcgaaaaatacccacgattgttatgctcttagcctctggtctgattttttacttaaatagatcggttatgaatatacacattatttctttgcttaatgacatggctgaacagaccatacacaatttttctaaattgccttttgtgaaatcagctatttattcagataatacagctcttatagctgttcattttaaacagcttgctgatttttatattgatttttttcaaaagctcaaatttctgcctttgaacagaactttctataaacgtagccttatgggtacttatagcttttacaattaccattagcaaaggaattaattttaaaatatgagaatgatccgcattgtgtaagtttaggtgttttgtttcctgttatcagtaatcaaactatgaattcctacctcaaagaaattgcaaatgtatgtggaataaataagaattgaccttttatattgcaagacatacttttgctactactgttacattgtcaaatggagtaccgattgaaagtgtgagcaaaatgctggagcataccaatattaaaactacacaacaatatgctaagattttggatgaaaaattgagtaacgatatgttggctctaagaggtaaacttgaagaagaaaaaaaataaatgtctttattcttgctcaaatatcttggtagaatagttattaactgaaacagaaagtttaaaattatttatatcaatgaacattaacgaacataacttcagaaacttttgctatgatttagttaattttagtcaaattagtctggaattggcgatttcatttttagcattacatcactcatagttgttaagttctttgcactataatttttagtatttgcaacaatcaaataggtttggttagaccatggtaggactcaactgttttgcagtcaaatgaagatttaattagggtattggaagataattagaatgaaaatatgatttggcacggtcaagtatattgttgccaaatttattgttatttttaatgaataacttattactttttataaaattttgagagactagcggaatagtgaagatggacacattaaatgagatgccttttgaatagtttatgactactcacaattttactcaataccactacagattaatcaaattttcaatatcatcttttgttgaaacagttttggcttttctttttaccattgtttccgtgacataaatacactgtccttttttaaaagtacagtaatccgatcttaattacctaaaatgtccttttctaaaatatggaattcttaaacttttagatcatccaaatcacaaaatttctcagata

SEQ ID NO: 2188 - DNA, 24200 bp, synthetic construct
  source 1..24200: mol_type = other DNA
  misc_feature 1..24200: note = Synthetic
tgctggcatgatggtcatggccagtagcagggccgagaagatgtaggattgtttcattacaattgaattttatgatatgatactattgtgtgcaagtgtgatggtgtgcagtttgcacatctctttaattcttttatgcaaaagtagagcgtggttttttctcttgtaatcccccaaagttgtcatttctcgcgattttatccccacgatgggtgtgggcggtgcgggcagcaaggcaacgaaaacatggaaaaaaacatgagggagcaagacttgctcaaagtcttgctccctcgtgtgggtgtcaagcctggaggcttgttgcggggctatgtcatttcttcacgccgcgtgactcgttgttgcagtggtcgacggcggtcacaatataggtgaacttgcccttggcggtttctacataggaggcttgatcgcttatctgcacgatggcctcggcgcggctggtatcgattttctcgcctttcttgaagcgatacaccacgtattttactgcgcgttgcatctcgtcgctggcagccggggcttgccaggtgagtgtgttgtgctttttcttgagcttcaccacatcgcctggagccttgttgtcgagccagggatacatgggcggcagggcaagcgtcgactgctggcgggccatgagcgagtcggccacgcccttgtagttgcctgtgaggtcatagcagggccaccacaccacgccgcccacgtgggcgaggctgcgcatcttgtccagtttttggccgagctgagtgggaatgttgctgtcgtgggtattggcatagttcatggtgttgcgtatggccaggccatagtacatgtcgcggccgttggcgttgtcgttccaccagtccatgagcaccgagtcgctggcggctttgtgctccatctgccagtagagttgcggcaccatgtagtcgacccaccccatgcgggtccacttggggcagtcggcatagagggcgtcatagcattgcaggccgttggtgtcgctgcccttggggtcggttttcttgttgcgccatattccgaaggggcttattccgaagcgcacccagggcttgatgctggcgatggtgcggtgcatcgaggcgatgagcgagtcgacattggcccggcgccagtcgcccttgtcctgcccgttgccgtagcgggcgtagctggtggtgtcgggaaagtcgatgtccttgatgggatagggataaaaatagtcgtccatgtgcaggccgtcgatgtcgtagcgggtcacgatgtcggccaccacgcggttgatgaagtcgcggcactcgggataggctgggtcgaagtagtattgcttgccgtatttcaagaaccactcgggatgcttgcgcaggagggcactgtcgcatatttgcgactccgagcccactcggtagggattgatccacgcgtgcagctcaagtccgcgcttgtgggcttcggtcaccataaactccatagggtcccagtaggggtcgggggcttgtccggccttgccgctgagccacagactccagggctccagcttgctggggtagaaggcgtcggcctgtggccggcagtggaagatgatggcattgcagtgtgtgagctgggcgctgtcgaggatgttgagcaggtaggccttgttctcggcagtggtgtggttctggtagtagcggtcgcccacggtgggcagccacacgccacgaaactcgcgtttcgggttttgtgccgcagtgtgcatcgttgctgcacatgtcgcggcgatgaggataagcagtaatgtttttaatttcatcgttttttagtgttgattgtattgtcgggattgattagtcgcaatgggcgtcttctatcttgaagccgcgcaggaaagcatcggcaggcattctcttcttgccagctacttgcaactgtgtgatttcgaggcgtccgtcggcgcaggccacccacaggtgccggccgtcgcttgtgacggtgccaggcagttcaccctcgggcttggtttgaggctggcccgtggcaaacaccttggtcgagtgtgccttgcctgtggcgtctacaatctcggtccaagctgcagggtagggcgagaggccgcgcacgtggttgtagagggcttcggcagtgcggttccagtcgatgcggcaggtgtctttgaatatcttgggtgcaggtgtgggttgctggccggcggtgagcatttgggcctggggcgtggtcttgacggtcccgtcgataattgagtcgacggtgtcgatgaccatttgggcacccaggtgcatgagcttgtcgtgcacgatttccacattgtcggtgcgggcaatgggtatcttgcgttgctcgatgatgtcgccagtgtcgatctcgtgcttgagaaagaaggtggtgacgccggtctcggtgtcgccattcatcacggcccagttgatgggagcggcgccgcggtacttgggcagcagcgaagcgtgcaggttgaaggtgcccagccgtggcatggcccacaccacctcgggcagcatgcggaaagcaatcacgatttgcaagtcggcccgcaggctgcgcagggcttcgacaaaggcctcgtctttgagcttcacgggttgcagcaggggcagcccctgggcgagggcatagcgtttcacgtcgctctggtacatgtggtggccgcggccggccggcttgtcgggcatggtgaccacgcccacgatattgtagccgccttccacaagccgctgcaggctctcgacggcaaagtcgggcgtgccgaagaatacgattcttaagtcttttttctccatgttgtagtgttgttgtatattgttgtagtcgaatgtttgttgccagcaggagccagcagttgcggccgggctttcttggcccggtgtatcatctcgtgggtgaagatgcgcgcgccgcggtcgttgaggtggccggcatcgtcccagcaaggggctttccccacaaggttagggtcttgggcaagatagatgtagggcacgtggtgcgccttgcacaagtctactatgggcttgtgcacgctcagcatgtcgggttgcgggtcgaagtagggcgatgtgaccacgatgagccgcgactggcattgttccacaagtttcttgaggtagctcatttttttggcatcgagctcgcgggtgaacttggggtagggctcgtgctggggcttgatgacgccgaattgcggcacatagccgttgtcggccagcttgttgttgtaggggctgtcgctccggtggctggccagccatatctcggcaatgagcgagttgtaggggtatatgcccgagagcatgcgcacgcgctccatggggtcgatgtcggccagcatgctgtcgcgacacctgagctgcctcatggggcgtatcttgttgacgggattgtcggcctggctgtggcgcatggcgtcgtagccgtactgcagctcgtagacgaccaccctgggcctgtagcgttgcagcagtgcacgcagcagcgcgtagttgagaaagatgttgctgccctcgatgccgcagttgtagcagctcatgccagtagagtcggtgatgatgcgtggcacatagtggtgcaacgcgcgcgacgagcccagtatcacgatatcggcccgggcgctgtcggcaatatagttgagcttgcctatctcgtcgcggtgcacacggctgtaggcatcgcccagcacgggccccagtgcctggtcgcaggcggcaatcaccgccagcatgatgagaaatgtgccaataaaccgtcgcatgcgctaaaattttacatatataaattgcccactgtcgatgacgccgatgagcaagatgagtatcacaacgatcccgtagcctgccagcgagactggtcgcggcagcttcagcacttgccactcggcttgcacgtcgcgcagcatgaccaccacaaaggtgaaggccatgtagcacatcacgctcgtggcgtgtaccgagttggcaggcaacatgatgtggaatgcattgaatggcgctgtaaacagccgggtgaatatctggatatagttggactggaaaaatgtcaagttcatggccatgagcaccagggtgactgctgtcacggccacgcgcgccggcacgtgacgcctccactgcttgagcggtagcgcgtggctcagggtcaccagcacgccgttgaccaagccccaggccacatagcacacagtgccgccgtgccagcaaccgctggccacaaaggtgaccatgatgttgaaacaggtgcgccatttcgagcaccggctgccgcccagccgaatgtagacatggtcgcgcagccaccccgacagggccatgtgccaccggtgccagaactcgcctgcacccattgcaaacagcggctgtgagaagttggccttcaagtcgatgcccagcaggcggccgcatccttgggcaatgtaggagtaaccggcaaagtcgcaatacatctggaaaagatagcacacttgggcaaagagcagcgagaagccgttgtggctcatggcgtggccaaacacgccgctggtgtagatgccaaagcggtcggcaactgccaccttcagaaacatgccccacaccaccagccgggcgccgctgccagccagcgacttgtcgaaacccagccggtgctctctgaactgcggcatcaggtcgaacgagcggttgatgggacccgaaagcaccgttgggaagaagctcagatagagggcatggttgagcaacgactgctcgcgcggcaccttgccccgggccacatcggccacgtagcccacggcctgcagcgtgtagatcgacaggcctgcgggtatcatccagttcagcccgttgaagtcaagccccagcccgcaggcgtgcaacgctgccagcacaatggcatcggcaggagcgataaacttgtagaaggcaagcggcaacagcatcagcgccaggcaggctgacaggcccgcctggcgcctcttgccgcacttggtggccagcaggcctccagcgtagctcacgcccgcaatccacagcagaaacacactgcacagcgggcgccacatggcatagaaggccaggctcactgccagcatgaaggcattgcgccaccgccgtggcaatatccatgtcacgagacacacacagggaaaaaacaatatgaacttaagcgtattgaatgccacgtcgctgcatcgttgtcttgcactgtaaatgctctctacagtttcccatgccgtcagtcataactgtagtgcttgagcacctgcctgtaggagttgaatatcttggattttgacacaaagcccacatacttgcccttgtcgaccacaggcaggttccaggccttggtgttgtcgaaggttttcatcactttctccatgggggtgcccagctccaccttggccggcggcatcgacatgaagcgctctaccttcatgcgacggtacaagtcggggcggaacatgatgttgcgtatgtcgtcgagcagcaccacacccagcaggttgttgtcgttgtcggtcaccggaaacaggttgcgcttgctcttggatatcacgtctaccatttgcttgaggcacatgtcggggtgcacgggtatgaagtcggtctcgatcacgctgtccatcttgagcagggtgagcaccgactggtccttctggtgggtgagcagctcgcctcgcttggccaggcgcttggtgtagatgctgtagggcgtgaacacgcggcaggtgccgtaggagatggctgccacgatgagcagtggcagaaacagcgagtagccgcccgtcatctcggccgtgaggaagatggccatgagcggcgcctgcatcacgccggccatcacgccagccatgcccagcagggcgaagttcttgatcgaaagcggcacgctgggactggcaaagcccacggcgttgagcgtgtaggcaaagaagaagcccgccatgcagcccacatagagcgacggggcaaaggtgccgcccacgccgccgccgccgttggtggcactggtggcaaacgacttgaagaggcacagcccgcccacaaagaggatggtcgacatcgtgttgttgcgggatgaataaaacaggctgttgtcgaatatcgaggccacatcgccgttaagcagattgttgatggccccgtaaccctcgccgaagagtggcggaaacaggaagatgagcacactcagcaccacgctgcccagcatgaatcgctgccaccggccctgcatgcgcccaaacacgtcttccatcaggcctatggtcttgttgaagtagagcgacacaaagccgcacatcactccaagcacgatcacataggggatgcgcgaggtgtagaacggctcgctctggctgaagaaaaactccacattgtagcccgtgaacacatagctcactgtggcacctgccaccgaggccatgatgagcggcatcacactgccggccgtgaggtcgagcatgagcacctcgacggtgaacagcaccccggctatgggcgccttgaagatgcctgcaatgcctgccgcagccccgcagcccacgagcatcatgagcaggtggggcgacaggcggaaggcctggcccaggttgctgcctatggctgccccggtaaacacgatggggccctcggctcccaccgagccgccgcacccaatggtgagcgacgaggccacgagcgaggcatacatgttgtgggtcttgagccggctcttcttctgcgcaatggcatagagcacacgcgtcacgccgtgcgagatgttgtcgcgcaccacatagcgcacatagagccccgagagcagaatgcccacgatgggaaacagcagatagtagtagttggcctgggtggtcacgcccacactgttgatcacggtcgagatggtgcttatcaagaacttgagcagcacggcggcaagacccgaggcaatgccgatgacgatggccagcatcaccacaaaggttttctcgggaatgtgcttctcgcgccacagtatcaggcgcaagtaccaccccttgctttctttctcgttgctgctcgctgctgctgttgttgttatttctggttcagccgttgttgtcatcgctttttcattttattgagttaaacaccccggccggtgaatacaatcttcacggtgtagactatgattttcaagtcgttgatgagcgacatgttctcgagatagagcaggtcgtagcgcagccgctcgaccatctcgtcaacattttgggcatagccgtatttcaccatgcccatcgaggtgatgcctggccttatctggtgcaccagcgagtaggctggctcgcgctcgagtatctgttgtgcatagtatcgcctctcggggcgcgggcccactatcgacatgtcgccgcgcagcacgttgaaaaactgcggcagctcgtcgacgcggtacttgcgcaggtagtggcccacccgggtgatgcgcgggtcggcatcgctcgagagctgcggcttgccttgctgctcggcgttttccaccatggtgcggaacttgatgatgtagaacggcttgttgtgccgccccaggcgctcttgcttgtagagtaccggcccgtgcgagtcgcacttgatgatcaggcctactgcaatgtagaccgggatgagcactaccatggccacggccgagatcaccacgtcgcaaaaccgcttcatgttctgccccccggcgctcatgttgctgctcgagatgtcgatgagcgggtcgccgtagaggtcgctcaggcgtgcgcgcgagagcaggatgttgtacttgtcgggggtgatcttgatgggcaggttgatcgaaaacaggcggttgatggcactcagcagctgggccgagtcttgcttggtgggcaccacaatgagctctttcacgccctcgcgctggcacaccccggccacctcgtcgaggctgtagcgaggcttctcgatgtctttcaccccgttctcgccaggtatgtgcacatagcccacaatgtcgtagcccagcgaggcacgcatgtgctcgagcttgcccacaaaggcataggccgcagccccgtcgcctatgatcagggtcttgaaactccactgccggctctttatcttgtgcgaggtgtagcccgtgatcacggcccgcaccacataggtgagtacaaacatgatgcccagcaacacaagcacgctctcgttgttgaaggcgcggttgtcggcggtcatgtcgttcatgagtgctatgaaaaaggtgatgagcgcgttcacgcaggtcgacgacagcgtggtcatgagctcgctgagccgcgacttcctgaacacctcgttgtagtagcccgagaggtagtatacccccatcatgatgagcggaaacaccacttgctcgagcttcactacatcgctcgtcaagaaggtgtgcagcgactggtagccgcgcacgccccccatcgcaaagcgggcgcagttgtagcccagccatgcgagattggcagtgatgtagtcgcctgccacatatttcagccgttgtgctcgttcgcttatcatcggggtgattgtcgtagtgtgtgtgcgcgccttagcgctatcgctttcttggcaagaagctatcgcagtatcttgaatgtgccgtcgctgctcagcatgataatgttggaggccgagtgcggcgccgtgtcgtcttgccggtacttcaccacatagtccacaccctgcacaatggcagggttgatttgggcaaatgtcgctgccgctggctcgccgctcacgttggccgaggtcgataccacaggcttgccgaagcgcgcgcacagctcttgcgagaacttctcgtgcgatattcttatgcccacgctctcgttgtcgcccagcaggttgggcgccaggttgtaggccccgtcatagatgatggtgagcggcttcacggccacatcgatgagctcgcgggccatctcgggcacgtcgaccacatagtggtcgagatgctcggcactgtcgagcagcacgatgagcgccttgttgtcggccctgtgcttgaggcggtacactttcttcacagcctcgggattggtggcgtcgcaccctatgccccatattgtgtcggtggggtagaggatgagaccgccccgctcaagcacttcgatacacgttgtaatgtcttcttccattcagtttctttgtcagctttgagagaggcctgtcctggccccgatacaattaacaaaggtaactcaaaaaccggacataaaaaaaacaaaaattggtttttgacgtcctgttaacagtaaaaatgttaaatttcttaatttcctgccgcctgccatgtccactggcaaggattattgtgttatctttgcactccatgccagctccaggtggctgccacgccgcatgcgggctgcaagagcgcgtgaaatctattttttttatgtcagatagtaacattttaaagaaaagaaaggtcaaaaaaatgaaaaacattctatcggttgccctggtggccgccgccctgtgggcagccatgccagccacggctcaaagcaaagttatctacaccggcgacatcgccaagaaagtgatgggctaccagggcccaacgccattgaacatcaccataagcaatggcaagatcgagagcatcgaggccctggccaaccaagagtcgcccaaatacatgcgccgggccgagcgcggcatcttccctcactacataggcaagaccgtgagccaggccctcaagctcaaggtcgacgccgtgaccggcgccacctatacctccaacgctctcctgcagaacatcaagctcggcctggagcaggcccgcaagagcggcaaaaaaacgggcacagccgccaagaagtcgcgcaagcgctcctcctcgcgccgccgttagccccgcgccgcccagcccagcaaccacagccccgccgcccccgcgccggggctgttttcatgtccctctctacaacaaaaaagagcgagtagaacccgctcctgatgttttcacaacggaataatccttattgtgaattgcttcaaatttgtactgcaaatatatacttgaatttgatatattccaaaaattttccaagaaaaatgcattatcctcaatgaatttttttatttttgtaaaaaatagaaaaaacaaaacgatcatgaaaagagttttaggcctggacttaggtaccaccagtataggatgggctgtagttgaccaagctgcatctcaagaagaaaaatcaaagattattcaactgggagtgagagttaatcctatcacggtcgatgaacaaagcagctttgaaaacggcaagagcatcaccacaacagccgatcgcaccctcaagcgaggcatgcgtcgcagcttgcaacgctacaagcagcgtcgcgagcatcttgtcggtctgctgaagaaacatggaatcatcaacgatgatacgctactgaacgagaatggcaatgcaaccacgtttcagacctatcggttgagggcaaaggcggctcacgaggaaatctcacttgaggaatttgcccgtgtattgcttatgataaataagaagcgaggatataagagcaaccgtcgcgccgacagtcaagaagacggcgaactcatcgatggcatggcggtggccaaaaagctctacaacgagcatctcacacctggagagtttgcctaccacattttgcagagtggcaagcgctttatcccgagcttctatcgctccgacttgcagaatgaatttgataagatatggaattgtcaaaatcaattctatccacaagtgctcacggccgaactcaaagataaactcaccgaccgcagcaagaaagataccgaaaacatcttttttgcaatacatcacatctcttcagctacagtcaaagaccgcaagacggccacactcaccatttacaagtggcgtgtgcaagcgcttcggcaacagctcgatttagagcaggtagttgcagtgcttgccagcttgaacggcgcaattgcaggagcaagcggttacctgggccacatcagcgacaacagcaaggagctctacttcggtcacatgacggtgggggagtacttgatgcgcggtcttgagcaagatccgcatttccgcgtaaagaatcgcgtgttctatcgtcaggattacttgaatgagtttgaacagatatgggagactcagcgtagatttcatcctgagctcactgctgagcttaaagaaaaaataagagataccgtgatcttctatcagcgtaaactcaagtcgcagaagggacttattgcctattgcgagctcgaaggtagagaaatcactgtgaaggtcgatggcaaggagaaaagagtgatgactggccccaaggtgtgtcctcgcagcatgccgctgtatcaagagtttaaaatgtggcaggtgataaacaacctgcgcctgcaatccaaaatcgatggtacccaagtgcctctcaccatggagcagaaaaaactgctgcatgacgcactcaacgttgagggcgacatgcaggctgcccgtgtgctcaaggtgcttgcattgaagcccaaggattatggcatcaactgcgacgaggtgccaggcaacacaaccaatgccgctcttttcaagaagtataagagtatcgtggaatggacaggccacgacgtggaaaaatttgacaagctgtcggccagcgagaaaatcgcacttgtagagtcggttttcaaagcgctcaagttcaataccgattttctcggtgacggctgtgacgagcaaagcaaggcattcaggctgtggcatttgctttattcctatgagggcgacaactccaacacgggcatcgacaagcttgtcgaccacatttgctcgttgacagcgctgccggccgactatgccaaggctgtggctcaagtgaaatttgacgacgattacgggtcgcttagcgccaaggctatcaagaagattctgccctacatgcagcagggcatgatgtacagcgaggcttgcgaggctgcaggctaccggcattccaagtcgtcgctcacgcgtgaggagattgctgctaagcaactgttgcagcatcttgaggtgttgcccaaaaactcgctgcgcaaccctgtggttgagaaaatcctcaaccagatggtgcacgtggtgaatgcttgccaagatgcctatggccccttcgacgagattcatgtcgagatggcccgtgagctcaagctcaccagcaagcaacgcgaggagcgcaccaaggccttgaaccagcgcaccaaggagactgaagaaatcaagcagaaactgataaaagatttcaacgtccctcatcccagccgcaacgacatcatcaagtatcgcctttatatggaacttgctcccaacgggttcaaaacactctataccgacactcctatttcgcacgagaaactgtttaccagggagttcaatattgagcacatcattccacaagccaagatgttcgacgactcgttcaccaacaaaacgcttgaaacggccgaggccaatttggacaagtcaaagatgacggcctacgactatgttctctcacgacaaggcgaagagggtgccaagcgctacaaggctaagattgaaaagctctttggcgcctccaatcccaagaagtgcgagcgcctgctcatgcgcgagaccgacatccccgatggttttctgaatcgcgacttgagcgactcgcaatacattgccaggaaagctaaagaaatgcttgggaaaatcacgcgagtggtggttcccaccacaggtgcaatcacagcccggttgcgtgaggactggcaaatcgtcgatgtaatgaaggaacttaacctcgaaaaatatgagaagcttgggcttgtcgagacctatagtgatcgcgacggccgttgcgtgaagcgcatcaaggactggagcaagcgcaacgatcatcgccatcatgccatggatgctctcgccattgcttttacccaacccagccatatccagttgctcaatcacctcaacgctcacgagagtgacgacataaaggccaacgcctatgcactcatgcgcaggaccctcaccaagggcggcaccttcattcctcccatggagaactttagaaccgtggccaagaagcatctcgaggccgtgctggtttcgatcaaagccaaaaacaaggtggtgacgccacacgtgaaccgcatcaagggctcagctcatcatcaactcacactcacccctcgtggacagttgcacaaagattttttttatagtaagaaatatttttatgctactaaagtggagaaagtggggaaatcttttaatgccgctaagatcgcaactgtgtgcaaaaagacttatcgtgaggccttgctaaggcgactgcaagagtacgggggcgaccctgccaaagcttttactggaaagaattcacttttgaaaaatccactttatgtagatgaaagcaatatgaaagtagtcccgagcaaagtaaaaactgtgacaatggaagagtttttctctaaaagaaacttagttgataaagacttgaaaattgatgatgtcgttgatgaaggcattaaggagattctgcgaaagcggttggatgagtatggcgatgttaatgaagcctttgccaaccttagagataatccaatttggttcaacaaacaagcagatattgccgtaaagcgagtgaccaccaaagaacgtattaccaatcccatttatatacatgagaagcgagataacgcgggtcgatttatattagatgaaaagggaaatcgccgacctaatgattttgtgaacccccgcaacaacaatcatgttgcaatctttgaagacgaggacggcaacttacatgaacatattgtctccttatacgatgcggtaaatctggcacgtaaaggtctgcccattgtcgacaagctttacaacagcgacaaggggtggaaattcctgtacaccatgaagcgcaacgagctcttcgttgtgcccgacctggagcatggcttcaaccctgccgagattgacttgatggacgtgaaaaactatcccgcgataagcaagcacctgtatcgtgtgcaaaaaataacaaaaaaagattattttttcaagttacatattgatacgacctcagagtttcaagcaccactaaaagatattcattggaagcgtatcactaaagaaaatgatttaaaggggtttgtaaaagtgcgagtcgaccacattggccacatcgtggcagtgggcgagtacaattgacaatagaaagactgccaacgatgattaagcgtacgttatatttcggcaatccggcctacttgagtctgagaaacgctcagctggtgcttcgcctgcccgaggtggtgaaaaacgacaccttgtcggctgtggtgaagaaggagcttgagcgcaccattcccatcgaggatataggtgttgtcattctcgatcacaagcaaatcaccattacgcagggcttgctcgagaaactgatggaaaacaattgtgccgtcatcacgtgcgacagcacgcgcatgcctgcaggcttgttgctgccgctcgacgtgcattcggtgcagagtgagcgtttccgcgctcagatcgacagcaccaagccgctgcgcaagcaattgtggcagcagacggtggcagccaagattgccaaccaggccgccatgctgcatcgcgtggagcctgcaaccgaggtgggcaacatgatggcttgggcacgtgctgtgaggagcgacgatgccatgaatcttgaggcccgtgcagcggcctactactggcgcaatttttttcctgagtgcgagggctttgtgaggcatcgcgagggcgatgcccccaaccacctgctcaactatggttatgccatcttgcgtggagttatagccagggcacttgtgggatcgggactgttgcccacattgggcatccatcatcgcaacaagtttaatgcctattgcctggccgatgacatcatggagccctatcgcccctttgtcgacgaggtggtgaagcgcatggtcaagaagtatggccttctcgacgacatcacaaccgaaatgaagcgcgacttgcttgccattcccactctcgatgtgaagattgagcgcaagcgaagtccgctcatggtggcagcatcgatcactacgtcgtcgctggcccgatgctatgcaggtgaatccaggctgatatcctatcccgaattggcttgatcaacaacatctatggaccgccttagtgaatatcgtgtaatgtgggtaatggtgttctacgacttgccaaccgagaccaaaaaagagagaaaggtggcagctcggtttcgcaaggatatcatgaaagatggtttcacaatgtttcagttttccatctacctgcggcattgcccaagtcgagaaaatgcgcaggtgcacatcaaccgtgtgaagtcgattttgcccgactcaggtactgtgggaattttgtgtgtcaccgataagcaatttggcgcaatggagctattttatggcaccaaggagaaaatcaaggagtatggtccccagcaattggaattgttttaaaagaaaaaagcctaacatgttcaggcttttttcttttgatgacacgaatttttttttaatgcgaaatctttgtatcactttgattagtaataatttgcaaccatcgatctgtgtcatccgatacaaagatacaaatttgaaagcaattcacaaccaccgaagcaaccgcaagtcaaacatcaaagctgcgtcatccgatacaaagatacaaatttgaaagcaattcacaacgttggccagcaagcccacaagctggagcccgctctgtcatccgatacaaagatacaaatttgaaagcaattcacaacatatgccagcaagtcaagcagcgtcatgcctctgtgtcatccgatacaaagatacaaatttgaaagcaattcacaacacatgcgctgcacaagggacacggtggccggctgtgtcatccgatacaaagatacaaatttgaaagcaattcacaacgatagataggcgggtgcaggtgttgcgcagctgtgtcatccgatacaaagatacaaatttgaaagcaattcacaacatcaagagatacttctcgtcgtggcgcatgggctgtgtcatccgatacaaagatacaaatttgaaagcaattcacaaccttgggccacatcatcgcagctggtgggcggctgtgtcatccgatacatagatacaaatttgaaagcaattcacaacccccgtcgatgtgtatgcctgccgcctcaagctgtgtcatccgatacaaagatacaaatttgaaagcaattcacaactaaaatagttattcaactctgttagcttgtgctgtgtcatccgatacaaagatacaaatttgaaagcaattcacaacttcatgaagcgttggaccatgagcggcgtaggtctgtcatccgatacaaagatacaaatttgaaagcaattcacaacatccaacgatgtttaacgatgttgtcaagagctgcgtcatccgatacaaagatacaaatttgaaagcaattcacaactccttgtcgcttgaacttatcagttgcacaagttgtgccatccgatgcaaagatacaaatttgaaagcaattcacaacactttcgagggaatgagcgcactcacgcagcctgtgttatccgatacaaagatacaaatttgaaagcaattcacaaccaagtccttgttgctcccgtgcacaccccagctgtgtcatccgatacaaagatacaaatttgaaagcaattcacaacaaaatacggaacatctttgctgtgagtaagaaaatgtaaggcctcaatttgagcatcggtgcaaccagcttctttcaactggctaaatcctacatttgtatcctccggcacgtcatgcagcactcctacaattttctcatcatcacttttgcccgacaacatcactcgcaacggatgtaggattgccgcatttccctcaaggtctttcaatccttgcattgccgtcgttgccaaaacgattgcctgctcaatagttatcataaaaattcttgttaacctcctccccacccatcatgatatcaagcacgataggctctgactggggaatctctctttcttccctgcctttacgcttaatccatgcctgcgtgttacctgcaactttggaagacacaaacttaacgatagcgtcctcataatcatcatagatataaacgataccgtcattttctaatttcttaataaacgaacgataatccataaactaacattatcatgtggttagaatattgcatacgaagatattaaaaatatttgatatgttgtgtcatccgatataaagatacaaatttgaaagcaattcactgcctcaagctctggtacataggagtagtaatattttatcaaccagagtcaacctaaaacaggaaaggacaaatacaacttcgcaccaaaaaaataaatggctttaaaagggaaataatttactgtaattatagtattaattattacaatttttttacctttacacaaaactataaccttactataacacactgttaataacaatgaagtataccgattttacaggcatttattctgtgtctaagactttaagatttgagctcattccacaaggatctactgtggagaacatgaagcgcgagggtattctgaacaacgatatgcatcgtgccgatagctacaaggaaatgaaaaaattgattgatgagtaccacaaggcatttatcgagcggtgcttgtctgatttctccctgaagtatgacgatacgggaaaacatgattctcttgaggaatattttttctactacgagcaaaagagaaacgataagacaaaaaaaatctttgaggatatccaagtcgctttgcgtaagcaaatttcaaaaaggtttactggcgatactgcgtttaaaagacttttcaagaaagaactcatcaaagaagacttgcccagttttgtaaaaaacgacccagttaagacagaactgataaaggagttttctgatttcaccacctattttcaggaattccacaagaatcgcaaaaacatgtatacatctgatgcgaaatctactgctattgcctaccgcatcatcaacgaaaacttgcccaaattcatcgacaatatcaacgcatttgacattgttgccaaggtgcccgaaatgcaagagcattttaagacaatagccgatgagcttaggagccacttacaggttggaaatgacatcgataagatgtttaacctgcaatttttcaacaaagtgctgacccagtcacaactcgatgtatataatgccgttataggaggcaagagcgagggaaacaagaaaatacaaggcatcaatgagtatattaacctttataaccagcagcataaaaaggcgcgcttgccaatgctgaaactgctgtataagcagatcttgagcgatcgcgttgccatttcatggttacaggatgaatttgataatgaccaggacatgcttgatacaatagaagccttctataacaagcttaatagtaatgaaactggtgtgctgggcgaaggcaagctcaagcaaatactcatgggactggacggctacaatttggatggagtgttcctgcgcaacgatttgcagctctccgaagtttctcagcgcctgtgcggtggctggaatataataaaggatgccatgataagtgacttgaaacgtagtgtacagaagaagaaaaaagaaactgatgccgattttgaagagcgtgtatcaaaacttttctctgcccagaacagtttctcaattgcttatatcaaccagtgccttgggcaggcaggaataaggtgtaagattcaagattactttgcttgtcttggtgcaaaagagggtgaaaacgaagcagagacgactcccgacattttcgatcaaattgctgaggcttaccatggggccgctccaatattaaatgctcggccaagcagtcataatttggctcaggatattgagaaggttaaagcaatcaaggccttgcttgatgcgctcaagcgcttgcagcgatttgtcaagccattgcttggtcgtggcgatgaaggcgataaggataatttcttctatggcgattttatgccgatatgggaagttctcgaccagctcactccgctatacaacaaggttcgaaaccgaatgactcgtaaaccctattcgcaagaaaaaatcaaacttaatttcgagaatagtacgctgttgaatggctgggacttgaacaaagagcatgataacacaagcgtgattttgcgccgcgaagggttgtactacttaggcatcatgaataaaaactataataaaatatttgatgccaacaatgttgaaaccataggagactgttacgaaaaaatgatttataaacttttgccgggtcccaacaagatgcttcctaaggtgttcttctccaaatcaagagagcaggaattctctccaagcaagaaaattcttgaaatttgggagagtaagtcttttaagaaaggtgataatttcaatctcgacgattgtcatgctctcatagatttctataaagattctatagcaaagcatcccgactggaataaatttaacttcaagttctctgatactcagtcatatacaaatattagtgatttttatcgtgatgttagtcagcagggttactccctttctttcacaaaagtgagtgttgactatgtcaacaggatggtggacgaaggcaagctatatcttttccaaatctacaataaggacttttcaccccaaagcaagggtacccccaacatgcacaccctatactggcgcatgctctttgatgagcgcaacttgcacaatgttatttataagctcaatggtgaagccgaagtgttttaccgcaaggcaagcctaaggtgcgatcgacctactcaccccgcacatcagcctattacttgcaaaaacgaaaatgactccaaacgtgtgtgtgtgttcgactacgacattattaaaaatcgccgatacaccgttgataaattcatgtttcatgttcctataacaataaattataagtgtactggcagcgacaacatcaatcagcaggtgtgtgattatttgcgctcggcaggcgatgacactcacatcataggcatcgaccgtggagagcgcaatttgctctacttggtgataatcgaccagcatggtactattaaggagcaattttcgcttaacgagattgtcaacgagtacaagggtaatacctattgcaccaattatcataccttacttgaggagaaggaagctggcaacaagaaagcccggcaagactggcaaactattgaaagcataaaagaactcaaagagggctatctgtcgcaggtaatccacaagatctctatgctcatgcagcgttatcatgccattgttgtacttgaagatttgaacggttcgttcatgcgcagcaggcaaaaagtggaaaagcaggtatatcagaaatttgagcacatgctcatcaacaagcttaactacttagtcaacaagcaatatgatgctaccgagccaggaggcttgttgcacgcattgcaactcacgagcagaatggatagttttaaaaagctgggcaagcaaagcggtttccttttctatattccagcatggaatacttcaaagattgatcctgtgactggatttgtcaacctttttgacactcgttactgcaatgaagccaaagctaaggagttctttgaaaaatttgacgacataagctacaatgacgagcgtgattggtttgagttttcttttgattatcgtcattttaccaacaagcctactggaactcgtactcaatggacactatgcacccaagggacacgtgtacgcacttttcgcaatcccgagaaaagcaatcattgggacaatgaggaattcgatctcacacaagcatttaaagacctctttaacaaatatggcatcgatatcgcttcgggacttaaagcccgtatagttaacgggcagctcactaaagaaacctctgcagtcaaagacttctatgagtcgttgcttaagttactaaaactcactttgcagatgcgaaatagtgtcactggtactgacattgattatcttgtatcccctgtggctgataaagatggtatttttttcgacagccgaacttgcggtagccttttacctgccaatgccgacgccaatggagctttcaatatagcacgaaaaggattgatgttgttacgtcagattcaacaaagctcaattgatgcagaaaagattcagctcgctcccattaaaaatgaagattggcttgagttcgctcaggagaaaccatacttgtaagaataatggaggattttattgctatagccacgctcaatgatttcattttctgcccgtattcgatatatttgcacagtgtgtatgccgataccgatgatggcttgtataaggctacgcctcaagtgcgcggaacgatagcacacatgggtgtcgactccaagaagggtagctcgcacaggtgtgatatcatgtcgctttccgtctatagtgagagccttcatgtctatggaaaaattgatgtgtaccgagctgaaaagaaacaactcattgagcgcaaatacagtctaaagaccatcttccgtggtcagctctatcagctatgggctcagtacttttgcatgaccgagatgggctttcctgtggaggaattgtgcttttatgagatttctgcaaataagatgatcccggtcaatctccccaccgagaatgatcgggttgaactggaacgattcctaaccctgtttcgtaactacagtccattaaacgacaccaagatgacgaatccaaacaaatgtgcgcattgcatatactgcaatttgtgcgataaaaccgactccgacaatgtttactcataaagatatagcgacgcgtaccatttttgtgctcaattgcatggaacacactcgtagcttgcgggtgatgaatggagaacttatgctcgaggaatttgatggtaacaagaactctacactcaccaaattcccttttcaaaagattctggctctatttgtaattggccacatcactgtgacgacacctttgatcgataagtgtcgcaagcatggggtggcattggtggttatgaaacctaatttaaggcctgtctttttctttgcatgttcggccgaagccaactatctgcttcgcaaacgccaatatgactacaccgactctgagctttctgtagccagatctctcatgataagcaaatttaataatcaaaaaacgctgctggagaaaacacgtcgccgagatgaactcaccattgcagcaacttcattctgcgcatcggctgtcaacaagttgaaggataccatcgattacaatggattgatgggactcgagggacaggtggcaaaattttttttcattgcctattatcaagattttaattggaagggacgccatccgagatccaagtgtgatgccttgaatgttactcttgacatagggtatacgatattgttcaactttgtggagtcttacttgagactttttggctttgatctatataaaggagtctatcatcgcttgtggtttcaacgcaagtcacttgtgtgcgatatagtagagccatttagatgcattatcgaccatgcaacattgctcgcttttcatcgagggcagttttcttctacacattttgtgaaagttaaagaagaatttcatctgaaatatgaaaagtgttctgattactacaaggtgtattttaatgctttgattgcttataagatggaaatttttaagtacgtgcagcagtattaccgttgttttatgggaaggaagtctgcaagtcaatatccaatatttcaatataaatgaaaattattagttacgatatcagtgatgatcgctggagggctcgatttacacgcatgcttgtaaagcacggagccattagattgcaatattcggtatatgaagttgccaacacaaaaagggtgatggataatcttacagccaaaattgaagcctgggccaaacatttcactctcgatgatagcgtgattatttttgatgtagatgaaaacaagatgataaaatatggcaatgccatacatcgcgacaaacctgtagtttttttataggtttacaaacctaagtgtgtcgcgttttactttttttctcctcatttcattgtgaatcaactatatgaatatatggctgttcaacttgcgtttacggggtgggggtaaattctttaaaagaaaggtttactactattgtgtatatcagtgattttgtttaaatttgccccttgtaagaggctacttaaagcctgtaatttctactatgtgtagatttgatactatctttcagaaactttacttgggctacttaaagcctgtaatttctactatttgtagatacctgcatgatttacggccagccaggcggctacttaaagcctgtaatttctactatttgtagatttgtagcccatgtaccacagtctcaaggctacttaaagcctgtaatttctactatttgtagatcaaggtcgttggctgcgctgccgctgaccggctacttaaagcctgtaatttctactatttgtagatctgtagaacttgcaaatctgtgtaaacatggctacttaaagcctgtaatttctactatttgtagatgatcaaggcagagggtctgaactgttagcggctacttaaagcctgtaatttctactatttgtagatttaggggtttccaaaggggatttctgggccacttaaagcctataatttctactatttgtagatgggaaatatactccgtgctcttgcgcaaggctacttaaagcctataatttctactatttgtagatcaaatgcgaagatactaaactttaataaggctacttaaagcctataatttctactatttgtagataggatatgcttaatccttgcttgtttgggctacttaaagcctataatttctactatttgtagatacttaaccgtgttgtcgagggctgagttggctacttaaagcctataatttctactatttgtagatatgaggcagctcacacctacctccgtggtggttacttaaagtctatgatttctactatgtgtagtgtatagactatatacttgaatggtgatggtgtgaagttgatgctgtgccttgcagtgcaggttgtaggggctggcgttttgtgcggggatgtgatgatat

SEQ ID NO: 2189 - DNA, 24200 bp, synthetic construct
  misc_feature 1..24200: note = Synthetic
  source 1..24200: mol_type = other DNA
cagcatcagggtattcgctcttggcataaaacaaagctacacgctcggcacataacccggaaggataagcggcattttcttggtttgttccgtaaacccactgtttattatccagttttacagctgcagcaaccttaaattcagaataaggcgcatacgcatcctttaccttcttttctaatataagaaattgttctcgaatttcttgcggcaattcttctaacgactgataaaccgtgtatgatatgttatgtgaatgctgcttcactttcttaaactgtaaattatttaattccaagcaattctacatcaaatataagtgtagcatttggcggtataacccctccggcaccattagctccgtaccctaaattggaaggaataattaatcgtgctttttcaccttttttcatgtgtgaaaatgcttcgtcccaacctttaatcacttgccccttacccaatttaaactcaaaaggtttaccacgatcgtaactgctgtcaaattttttcattccatcaagcaaataccctgagtaatgtacaataacggtttcgccctcttcaggggttgcgccttcggtttctttaatttttatcatttttaaacccgaaggaaatgttaatgtatcttttccggctgtgttaaaaggctttttaggtttttcaaccgaaatcaattccacttcaaatttcaaggtagcatttggcggaatcacgcctcccgcacctcgttcgccataagccaaatcaggcggaatgatgaaaacagctttatctccggttaccaaatacgaaataccttcgtcccaaccttttatcactcttccttctcccaatgggaaacgaataggttcacctcttttgtaagaactgtcaaaaacagtatcattcataaatttacccacataatgcacttcaacaatatcgccttttttcggtctgtcacctttttttgaggcttctgtaatggtgtatttcaaaccactttcagtgacttgttcttttccttcaatctttttattgtttttgcgcattttcttcttcttttcgttttgagccgaagaatcggaggctaaaactgccagtactaacactggcagtataatgtatttggctattttcataggaaatatattttgtattttttattgtgctgcttgtggttgaggagcatcgcttacttccaataattccacttcaaaaaccaaagtagaaaacggaggtattggtcctgtttgacgaccaccataagctaaatgtgaaggaatgattagtttggctttgccaccttctttcatatagctgataccttcgtcccatccgggaataacctgaccgacacctaatacaaattctattggctcgcctctgtcaacagatgagtcaaatttagttccgtcgagcaatgttccggtatagtgcactttaacttgcttgcccggctcggcttgtttgcctgttccttttttctcttcaatataatacaacccgctttgcgttggttctgcggtgatattattttctgtcaagtattcttgcaatttggtttgctcttcttcttgtgctttttgcatttgctccatctgttctttttgcaactcttcgagtgtttgcacttttaacaatttagcttcaaaagtaaggtttgaaccttggggaatttgcggaggaagcggtgcattcattaagtgagtaaaaaatgaatcggcagaggttacaaatgtagcactgtcgcctacgtgcatcattaaaaaaccttcagtaatatcgccattgtataaagctgaatctactttaattttaaattcttgaccaccttttctggagtcgaacaatacttcgccactgtcggttttgtaaagaatatcgaaagtggctatttctcccgattttaattgaggagcttcagggtttgaattatgaaatttgtatttcaatccgtgttctgtggtttggtatccgtcttccgattgattttgatttccacatgctgccaatgctactacagcaatacttaatactaattttttcattctttaatgttgtttattatttaatttttgatttacaaatatggcgtaaaattatgttttttcgattatcaatatcataaattatgttaaactttcatgatattaatgaaaaagaaaatccccaagcataaaagattacggttggggattttattataattttaattaaaaaaacgagcgttcgttatagttttctttactattgtttgaacgggttcttcttcgatttcccgagcgatgatttctggtttgacgacgacctcccctgtcggaactgtctttgccttttgaatattctactcgcaaagttttcccttcaaaatcttcaccgttaagtgctacaacacggtcgccatattcagcatctacatctacaaaagacatattatccaataaatcaatacgtccgatgtttttaccggcaatacccgaggcatcgcacacaaaacgtaaaatgccgcctttttcgcggataccgtcgtttcttcctacattaataaaaatgcgttttttgttggcatcacgtcctcgtcggtctccttttaccgaagattcttccatatctcttttcccgggtttggcattcaaatcgcgggcatgttcgtaagcttttaagtatttgctcacttctgccattaccatttttttgatgatttcatctttcgaaaattcttctaactctttaaaaacttttggcaaataatcatcaattaatgtttcatccacttcagtattatgcaccgaatcaataaaatgatagatttgtttctcaacaattacttcaccggttggcactttcaccaacttcatttttttgtttatctgtctttctacttgtttaattttatacgcatcacgcggatgcaccaacgaaatggcaattcctttttttccggcacgagccgttctaccactccggtgagtataactttctatatcttcgggcaaatggtagttaaaaacgtgtgtaatatcatctacatcaataccgcgggcagccacatcggttgcaaccaatatttgtaaatgtttgttgcggaatttcttcattacatggtcgcgttgcgcttgcgataaatcgccgtgcaatgcgtcggcatcgtaaccgtcttgcattaagcggtcagcgacttcttttgtatctctacgcgttttacagaaaaccatcccaaacatatcgggataataatcgataaaacgtttaagtgcaaagtaaaaatcttttgcctttacaaaggcatattgatgctcaatattttcgttactgctgttttgcttaccaaccaccactttaaaagggtcggtcatataatttttggcaattcgctccacttctttgggcattgttgccgaaaatagccacactcttttatcttcaggagtttgctccaatatggtatccatatcgtctttaaaacccatattcaacatttcatcggcttcatcaagcacaacggtatttacttccgaaaggtttaaggcacggcgtttaatcaaatctaccgtacgtccgggcgtaccgacaactatttcggcaccacttttcaattggtttatttgcttacgaatatcggcaccgccataaacggtaacaatgtttataccttctttgtatttggcaaagttttttaactcgttggtaatttgcaaagccaactcacgtgttggacttaaaataatcgcttgcggcgttttggcaaacggttcaatagtttccaatagcggaataccaaaagcagccgtttttcctgtccctgtttgggcaagtccaacgtaatctctgtctgtttctaataaagccggaatggatttttcttgaatgggggtgggattttcgtatcccaggtcgtggattgcttgcaacacctcgttgctcaaccctaattcactaaatgtcataaatgtattttgattataaattaattttggcaaaggtacgaataaaaaatgaatagcacttttttagaagatttcggcacttgcaattaacaattattaaattattctgtcgtttatatttaaacaacttttgtttttaacaataactaaattgagcattaaaaattgtaactttgagtaatggaaaattcggcaaacagcataaaacagattattgaaaaaggacgtgtttctaatcgtaaaacattaaaaccaaacgaaatagcacaacttggcaaacttcctcctcaagctttggatttggaagaagctgtattgggagcgcttatgttggataaagaagctgtttctgaagtaatagatattttagctcccgattccttttacgatgaaaagcaccaacgcatttttgccgccattcaatctttattcaacaaaaccgaacccattgatatactaaccgttaccaacgaattaaaagaacgaggtgaattagaattggtgggaggtgcctatgccgtggcacaattaaccaaccgcattgcttctgctgccaatattgaataccacgccagaattattgttcaaaaagctattcagcgtaaacttattcatattgcctcgcaaatcattcacgatgcatacgatgacacaattgatgtattggaattattagacaaagccgaaaaagaattgtttaccgtatcggaaggtaatttgagaaaaaattacgacgatatgggtaagcttatccataaagccattgagcaaattcaagaagccaaaaataaaagcaaagatggagggactattggagttccgtctggattttctgctttggataaaattactgccggttggcaaccttcagacttaatcattgttgcggcacgtcctgcgatgggaaaaacctcctttgtattgtcattggcacgaaatgcagccgttgattttaatatgccggtagcatttttctcattagagatgtcatcaattcagttggttacccgtttgatttctgccgaagcattggttgactctgaaaaattacgaagcggaaatttgcgtgatgatgaaatgcaacaaattatcaccaaagttaatcaattggcacaagcacctatttatattgatgatacgcccgggttgtcggtttttgaacttcgggcaaaagcacgccgcttaaaacaacaacacgatattaaattacttattgtcgattatttgcagctgatgactgctggaggagccgattcgagcggaaatcgcgtgcaagaaatcagcaccatttcgcgttcattaaaaattatagccaaagaattggaaattccggttattgcactttcacagcttagccgttcggtagaaacccgtggtggagacaaaaaaccccaactctcggatttgagagaatccggttctattgaacaagatgccgatatcgtgcaatttatttaccgtccggaatattacggtattaccgaagacagcgaaggcaatccattgcaaggtgcggcttatatccttatccaaaaaaacagacacggacaagtttgcgaagtgaaattgggttgggatgccaattatgcacgatttagagatttcgaagatattcacgccaatccattcttaacagcacctgctgatctgcaaggcgatgacggatatgcaacaggaagctctatgatgcccaacacaaatttcccggtaggaggtgaaacgatgactgttccttcaaaaatgaacgatgacacatctttggatgatgatgaagattttttacaagataataattttgaagatgcgccattttaaaaatcatctgacaacaatcatcatttttatattaagcatttcttctgtaaatgccactaagatattggtaatgatggatgaaacacaagccaatcatctgaaagcttatggtattgcatattgggttttggaaaataacgttgaaattcattggttgctgaactatcgcggaggaagtttcttgcttccttatgctaaaagcattgaagaggaattaattattcgtggagtttcttatgaagttatccccgatgcaaaaagtgctgcaattttgcaagaaattgccaatcctgaggtaaatcaagaatcggtaaaactggaaaaagcacctaaaattgccgtatattcacccaaaaacaaacaaccgtgggacgatgccgttacacttgtattgacttatgccgaaattccctacgatgtaatttatgatgaagaaattattaatgggaaattacctctatacgattggcttcatttgcatcatgaggattttacggggcaatacgggaaattctatgccggatatcacacgcaaccatggtatcaagagcaagtaaggtttaatgaagaaatggctgccaagcttggtttctcgaaagtttcgcaactgaaattggctgttgccaaaaacattaaaaattttgttttgggcggcggatttctgtttgccatgtgctcggctaccgattcttacgatattgctttgagtgccgaaggcgttgatatttgcgatgtaatgtacgacggcgatccacccacaccaaactacaacagtaaaattgattattcgaaatgtttggcatttgaaaaatttaccatctctaccaatccgtatgaatatgaatattcaaatattgatgccacacctgtacacgccaaaacaccagaaaaattagattattttacattattcgaattttctgccaaatgggacattgttcctacgatgctttgccaaaaccacacatcgattataaaaggatttatggggcaaaccacggcttttaatgaacaatttattaaaaaaaatgtacttattatgggcgagaataaagcgttaaattctgcccgttatattcatggagaattaggtaaaggcacttggactttttatggtggtcacgaccccgaagattaccgacattatgttggcgaccctcctaccgacttaaatttgcatccaaattctcccggctaccggttgattttaaataacattctttttcctgcggctaaaaagaaaaaacaaaaaacatagtctgtcattcttgtggttgtacccattttgttacgtaattttcttcaaaatcaatcggcatttttgtgttataaatcccataaaaagccgaaccacttcctgtcattgaggcgtaaagagcgccgttttcatacaatttatcttttattctttttaattgaggatatttctcaaaagccggtttttcgaaatcatttatcactttatctttccaatcttcaattggcaatttctctaattctttaaggttaaaatcgggccgggcaggtgtaatacctgcaaatgcttctttggtggatacatgtaaatttggaaaaacaatacacatccacattccttttaaggatatttttacaggggtaaatttttcgccaattccttcggcatacattggtgcattatagataaaaaaaggacaatcggcacctagttgtaatgcatattgggctaatttgctttcgggaattttcaaattaaacttttcattcaagagtttaagcataaaagacgcatcggcagaaccaccgcccataccggcgcccatcggtatatttttttttagaatgattttcaaagggggaattttataatcttttcgtaatagttgaacagcatccaaacaaagattatttttagttaaagattcatcatcattatctattatggtaaaagtatcgttatttgattctaaaacttccaacacatcatacaaaggaacaggataaaaaaccgtttgcagattatggtaaccgtcgggacgtttactcacaatatttaatccgatatttattttggcattgggaaaatcaaccatagtataaaaataaaaaagccggcaataaaattaccgactttctttaagtattgtatgaaaagaagattattctttttctacatcaaatttaacaactaccgaaacatcttttgttaaacgaatttcggcttcgtaagtaccaagttgtttgatagcttcgccacggattttcattagtttacggtttactttgtagcccattttctcaatagcatctgccaattgaatagtagttaccgaaccaaaaatacgaccgttttcgccggcttttgttttgataacaattttagcatcttttaatgcctcagcagttttaagtgcttcttctttcaatttagcttctttttgtgcacgctgacgcattgtttcttcaaacatttttttggcagaaggagttgcggcaacagccattccctttggaattaaataattgcgggcatatccgggcttaacgtttactatttcgttagcaaatcctaaattttctacatcttgttttaatataatttccatatcgttgtcctccggaattttattttaataaatcagctacgtaaggcataagtgccaaatgacgtgctcttttaattgcagtagatacttttctttggtatttcaaagaagtacctgtaagacgacgaggtaaaattttaccttgttcgtttacaaattgcattaagaaattaggatctttataatctacgtatttaataccgtattttttgaatcgacagtatttttctttcttaatgtcgatgcttggaggagttaaatatttaatatcttcggccatttttctgaaattttaagggttaataattactctgcttttgcagtttgattgttacgtttactttcggcaaatgcaatagcgtgtttatccattttcactgttaagaaacgcataattcgctcatcacggcggaattcggtttctaatttatctaccaatgcagggtttgcttcaaactctatcaattgatagaatccggtagattttttttgaatgggatacgctaatttttttagtccccaattttcttgatgtacgattttggcgtcatttttctccaaaaaatcgacaaatttttgaactgcttcctttacctgagcatcagataaaacgggagttaaaatgaaaacagtttcgtaacgattactcattttgttagtttttagttaataattacttaatttttaaggtcggcaaaagtaatgaattttatctttaaatgcaacgggtttagttatttttttgacaatgagagaatttaaagcgagtatccggttagagaatgtgaaacgagtaaactaaataagcatcaattaaagttagttaattaatataaatattttaccacaattattattggaaattcaataaatattccgttactttatagcacaaaactttttatatcaatttgacaaaatgcatttaaaaaaaatcattaaacaaaacaactgtaaaagttatgaaattcaaaatattacaaaaaaaatgcctcccactttgtggcggagaggcttaccaaatgttttcacaacggaataatccttattgtgaatagtgttcaaattgttgacacaaatataagatatttaatctaattgtcaaatggaaagaaaagattttttaaagcttataggtaaaggcggttcaacttttttgtttgctggcattgttaaaccggactttacaacagcgtttgacctgcaacaggtaacgatttatgataattatattcgtggtgagaatttttaccgtaaaaattttaataatttgaacttacaactcaaccaaccggttgaattagtcagagaccataaaaacatccatgacagttttgcggttaaggcatgtgtaaatgagcttcaaatcggctacttggccgcttatgaaaatattgttattgccaatatgttggatgcgggtgccaaactctttgcttctattagtgctttaaataaagtgtacaacaacaaggacggattaggcagaatgggttatttacaaaacactattgccataaaaattgaaaccgaattgatggtcccgctcagcaatataaaattatccgaccttaccgaacatcgtgccgacgatgcttgggaaacttaccgaaaagggtatgattttaatcaagtaaaaatatattaaccgaaaaaagataaaaaactatggaaaataaaacaaaaaccgtattaggattagacttaggcaccaactctatcggttgggcgttggtaaaagaagatattgaaaacaactccaattcaaacattatagattgtggagtaagagtaattccattaacatctgaagaaatagacaattttgaaaaaggtaaatccatcacaacaaataaagacagaacacaaaaaagacatgctcgaagaaacctgcacagatttaagctcagacgtaaagttttgattgaaactttaaaaaaagcaggcattattgatgagcaagctgttttaactgaagatggtaaaggtaccactcatgaattaatacggattagagcacaagccgctgaccaacaaataaagcttgacgagtttgccagagtattgctggctatcaataaaaaaagaggatataaaagcagtcgaaaaacaaaatctgccgaagaaggcgaagcaatcgattctatggatatagctaaaattctttatgagaagaacttaacgcccggcgaatatgtacttaacttattggagaaaggaaaaaacttcatccccgatttttacccatccgatttgcaagaagaatttaatcgcatttgggaaaaacaaaaagaatattatccggaaattttaaccgatgaactaaaaaaggaagttatcaataaatcgggaaggcaaacatggacaatccttaaaaagccatttaatattgttgggataaaaagaacaggaaaaaaacatgaacaaagattagaaaattaccaatggcgtgtagaagcgcttaaaaacaaacttgatttagaacaattagccattgttttacaagaaataaatacacaattaaatcgtaccagtggttatttgggggaaataagtgacagaagcaaacaattatatttgaataaaataacagtagggcaatatttgtacaaccaaataaaagaaaatccacacaaccgtttaaaaaatcaagttttttaccgccaagattatttagatgaatttaataaaatatgggacacacaaagtaaattttacccggatattctttcgcctgagcttaaaaaagaaatcagagatatcatcatattttatcaacgtccgctaaaatcacaaaaagggcttatcagcatttgcgaactggaaggcagggaagcagaaattaaagtggacggcaaaacaaaaaagaaggtaataggaccacgtgtcattcctaaatcatcccccttatttcaagagtttaaaatttggcaacgattaaatgatattattgtaaaaaacccggttaccaaagaagaatattatttaagcgaagaacataaaaacattattttcgaagaagtaaacttaaaaggtaaaatttccgataaagaattattaaaacttctcggactaaaaagtaaagattgggaagtaaattttaaaaccattgaaggaaacagcactaatgccgaactgttgaaagcttatcaagaaataatcaacacagcaggatacgacaatcaagaattaaagaaaatggatgccggtaaagcagtgccatttttagaagaattgtttgaatcgcttgggattaataagcacatcgtaaaatttagcaccgacttacccgacaatgaaattgaaaaacaaccgcattatcaattatggcacttattatactcttatgaaggtgataattctaaaagtggaaatgaaagtttatacaaacatttgaaagaaaaattcggcatcgaaaaagaatatgcccaaccgttcattaaaataaattttaaaagtgattacggaaatttaagtgccaaagccatcaaaaaaatactgccacacttaaaagacggcaaagattattcagaagcagctcaattggcaggatacaaccattcacactcttttactaagaaagaaaatttagaaagggaattggtggacaaattggaaattttgcccaaaaacagtttacgaaatccggttgtggaaaaaatcctcaaccaaatgattaatgtagtgaatgccattatagatgaatatggtaaacctgatgaaatacgcattgaattagcccgcgaactcaaaaaaagtgctaaagaaagacaaaaaacaaccgagtacattacaaaatctaccaaagaacatgaacaaatcaaaaagattcttgaaaagatgcctccattcaatcaaggagtacgaattacgcgcaatgatattatcaaatataaattatggaaagaattagaacctaacaaataccatacattatacagcaatcaatatataccactcgaaaaacttttttctaaagaaattgacgtagaacacatcattcccaaagcattattatatgatgattctttttcaaacaaaacactcgaataccgaaatgtaaacctggaaaaaggagacagaacagcttatgattatatgattgataaatacggcgaaaactcagaagagtttaaacgttacattactgttattgaggaattatataaagacggtaaaataagcaaaggcaaattcaataaattactgatgaaacaatcggaaattcccgatgattttattgaacgtgatttacgaaacacacaatatattgcaaaaaaagcaaaagaattgcttttaaaattagttagaaccgtagtaccaaccagtggaacagttaccgacaaattacgtcaagattggggattagttgatataatgaaagagcttaattgggataaatataaccaattaggattaaccgattatgaagaaacaaaagacggaaaacgaataaaaatcattaaagattggagtaaacgaaacgaccaacgacaccacgctatggatgccattaccattgcctttaccacgcacaatcatattcaatacctcaataatctaaataccatttataatttgcatgagcaagaagaagtgcaacacgacaaaagcaatttatacggcataaaagaaaaaattacagaattggttgaagataaaaacggtaacaaaaaaagaaagttcaaaaaacctatgccaaatctgcgttcggaagccaaaaagcacctcgaaaacattttagtttcctacaaagcaaaaaacaaagtagtaacacaaaacaaaaattacattaaagtaagtgccaacaatccgcgaaaaaacaagataaaaagaaaaggaaaacactaccttgtacaagataccttaactccaagagggcagttacataacgaaaccatttacggaaaaattaaacaacctttaaaaaagccggtaaagctttccaaaaaattcacagcaaaacaagcagagctgattatcaataaagagataaaacaaactgtattaaatcatttggctaaatacaataataagcacgaaattgcttttgaaagtaaaacattaaaaaaagaccccgtaatttttaataacaaaccgttgaaagaagtacattgttttgaagaattttacaccataagaaaagatatttcgccggatttgaaaattgataaagtaattgatgaaaaagcaaaaaaaatattagaaaccagactaaaagaatacaacggaaatgccaaagaagcgttcgctaatttggataaaaaccccatttggctgaataaagaaaaaggcattgccattaaaaaagtaaccataaaaggcataaacaatgccgaagtattgcacaccaaaaaagatcattttggcaaagaaatattagacgaaaacaaccatccggttcctgccgactttgtaaacacaggcaacaaccatcatgtagctatttaccgagacaaagatggtaatttacacgaaaaagtagtatccttttttgaagctgtagaaagagccaatcaaggaatgccaattatagataaagactacaaaaaaggattagggtgggaattattgtttaccttaaaacaaaacgaaatgtttgtttttccaaatccggaaacgggttttaacccaagtgaaatcgatttattaaaccccaataataaatcattaataagcccaaatttatttagagtgcaaaaaattggaagttctgattattggtttagacatcatttggaaacaaatatcaaaaacaacattaaaggaataacatatttcagaataacgaataaaaatactttacaaaacattaagaaagtcagaatcaatcatacaggaaaaatagttgccgtaggcgaatattaacacacttgtaacttttttacataaaggtgcgtaatttatcataaaaaaccattgtgttatgataaagcgcaccttgttttttgccaatcccgtgtatctaagcacaaaaaacaaacaattggttgccacttatcctaccggagaaaaagaaaatattcctcgtgccaaacaattaaaagaaataaaaccccaaaataaaaaaactgtacccatagaagatattggggtaatcattttagaacatccgcaaataaccattaccaacaaactgttggaacaattaaatttgcacaacgtagctgtaatccattgcaacagtcaacacatgcctgttggtttaataatgccacttaacggacattccgaactgtccgaacgattcaggcaccaaataaatgccagtttacccttaaagaaaaatctttggcaacaaaccattcaggcaaaaattatcaatcaagccgcccttttatccgaacgaggtattccggtaaaaaatatgctacaatgggcaaaagacgtaaccagcggcgacaaacaaaaccacgaagcccgggcagctgcttattattggcaaaacctgtttgatattccggactttaaccgtacccgctttggcgaaccacccaacaacttactcaattacggctatgccattttgcgttccattgctgcacggtcattggtttcgagcggtttactgcctgctctaggcattttccaccaaaacaaatacaatgcctattgccttgccgatgacattatggaaccctaccgcccttatgtagatgtgattgtaacacacattgtagataatgaagacgattacagcgaattaacaaccgaaataaaattgcaactggcaagcattgctgcaatggatgtaataatagacggcaaaaagagtcctttgatgatagccatgagccgaaccaccaattcattatttgagtgttttgccggcataagccggaaactgctataccccaaatatgaataaacaaaataaaaatgattgaaaaattttcacgattaaatcaataccgttgtatgtggatactcgtattttttgacctgcctaccgaaacaaaaagagaccggagagctgctgcaaaattcagaaaatctttggtagaagatggttttggtatgtttcaattctctatttacatccggttttgtaccagtcgcgaaaatgccgatgtacatattaagcgagtaaaaagtatcttaccaaaatatggcaaggttggcatactgcgtattaccgacaaacaatttgaaatgatggaaatatttcacggacaaaaagaagtagaacccgaaaaaccaagtcaacaattagaacttttctaactcaatgctcattttttctattcaaaaaatacagataactaacaacataccagccagttaagacgaggtatgttgcgaattatccataaagataacaatttgaacgctattcacaacaaatttaaaaccatttttatatatttgtaagttgcgaattatccataaagataacaatttgaacgctattcacaacgaaagtgtttaaagcccttaatttaaagaagttgcgaattatccataaagataacaatttgaacgctattcacaactattccaagaaatacgaggcgttttttttcgttgcgaattatccataaagataacaatttgaacgctattcacaacaccattacccattccattagcatcccattggttgcgaattatccataaagataacaatttgaacgctattcacaactattttatgtataactttttcatattacaagttgcgaattatccataaagataacaatttgaacgctattcacaacaggcggtgtaacattatttgttacattttggttgcgaattatccataaagataacaatttgaacgctattcacaacgtttatttctggcaattgatttttactgcttgttgcgaattatccataaagataacaatttgaacgctattcacaacaccgtatgaatgatgactttttaaatttatgttgcgaattatccataaagataacaatttgaacgctattcacaactcttttttattcgtataatgaacaaaaggagttgcgaattatccataaagataacaatttgaacgctattcacaacactaaacgcaaatgcaacggctcaaaatgtgttgcgaattatccataaagataacaatttgaacgctattcacaactttttattagagtctataaacaaagcagcgttgcgaattatccataaagataacaatttgaacgctattcacaactaaaaaaaatatagtttaaaaataactattgttgcgaattatccataaagataacaatttgaacgctattcacaacgtgtttgattgttggcttgtcgaaattgaagttgcgaattatccataaagataacaatttgaacgctattcacaacacgcttctttgtctttacgtttctttttaagttgcgaattatccataaagataacaatttgaacgctattcacaacaataattaaaccaattatttattgttaatggttgcgaattatccataaagataacaatttgaacgctattcacaacgagcagcttgaatggtatccgttaatcgatgttgcgaattatccataaagataacaatttgaacgctattcacaacgtgataagctaaaaatggatcgaatccaaagttgcgaattatccataaagataacaatttgaacgctattcacaacagtagttgaggatcaattgaatgtgcatagttgcgaattatccataaagataacaatttgaacgctattcacaacttacttgctttcatatttttaattttatcgttgcgaattatccataaagataacaatttgaacgctattcacaacaacaataaattaaatacttctgtaattagggttgcgaattatccataaagataacaatttgaacgctattcacaactacattctactttgtatgttttgccgttatgttgcgaattatccataaagataacaatttgaacgctattcacaactgctttcttgtccaataaatttatttcgtcgttgcgaattatccataaagataacaatttgaacgctattcacaaccaagctccgacaggtcttttatcctctcttgttgcgaattatccataaagataacaatttgaacgctattcacaacaatagtttgcttactacttctattggtattgttgcgaattatccataaagataacaatttgaacgctattcacaacaatgttttaagtaagaagtggcaggcggtcgttgcgaattatccataaagataacaatttgaacgctattcacaacactacatcatcaataatgatgttaccgtttgttgcgaattatccataaagataacaatttgaacgctattcacaaccgggcaagagccgcattactttcgtcaatagttgcgaattatccataaagataacaatttactcactgcgtgtttattttttattgtgttcgtgaactcgtaaactcgtttgaaagccatctgcaattaaaatcatggattaattgctattcatctattatagaattgaaacttttgggattttcatatattttcatatcacatatcaatatagaacatctttcaaccccttaatgcgccaatctacttctattttagtgtaatcgaatttttcttcttctttgtcgggaatcaatatggttttcattcctaaatttttcccaaattccatatccgaaatagagtcgcctataattacactattattaaaatctatttcaggaaaatcagtttttgctttgattgccaattttggtgagggttttcggcaattatcttcctttgattttaaatcaaaacaattataaacggcgtctattcttcctccggattgcttaatttcatttatcataaagtcatttacttcttgaacatcttctgcagtcattaaccctttccccactccttgctgattggtaacaacaataattctgcggaactttttactcatctttgcaatggcttcttttgctccgggaataaattcaaattctgccgaggttttgatgtatccgcccggtttacgtttatttatcactccgtctctatccaaaaaaactgtggttgtttcgggcaaatgccaaaatttttctttgtttaaattgttcgaaaacataaactgtgcagcaaaataatcttcgggaatgccaatatctataaactgtgcctcggttttataatacccaataggaatttgagatacatatttttcaagaatatcttgctcaaatgaaaatttattctcctcggggaaatagttttgtgcaaattgtttgttcattaaatatacaccggcattaatgtatccttccttatgaaattctttttctttaaaggcagatattcgattctctgtggtttcaaccactccgtagcgatcgaaatttttcattttcaccaaagccaaacttaaatcgttgcataggcagtttttttcaaattcggcaaacgaaataccaacaaaagtatcgccgttgataatccaaaatttatcatcatttacatatgatgcggcaagttttaccgctccacccgttcccaacggttctttttctatggcatacacaatctccgcaccattgaatgtattgccaaaataattttgaatgctttcgtacttataccctacggacaggataaaacgggaaatcccttgatgagataaaaattgcatcaaatgccatagaaatggcttgccgtttaccggcgccataggtttgggcaaatcgttaactacactttgcaagcgtgttccctttccgccggcaagtataatcgcttcttttatggctgttttttcagttttcataaagcatttggcaattaaacttgttttacacgaaaggaatacaagccgttgtcttcgaaaacaaagttgtaggcacgtccaccaaattcgttaagtgctttaattacgttggttttggtacttccgggacaataaaaaatcataaacccaccgcctccggcacctgaaatctttcctcctgttgctccggcgttaatggctgccgaataaatttcgtccaataacgggttagaaatggcacttgccatttgctttttaaattgccaactttcatcgagcagttcgccaattttatgtacttcgcctttcagtaatgcttctttcatcaaataggcatattccttaatgcgatgtgcggcttgcacggcacccgtatcgctttttttaaagtctttttcttgcgctacaataatatcggcagaatcacgactggttccggtgtaatacagcactaaattccattcgagttgatttttgtacaaactctttatacgcaacggattaacaataactttatcgtctttttcaaactcaataaaattaaatccgccaaatgtagcggcgtattggtcttgcttacctcctgccaaacctaaatctttacgctcaatttcgtatgccaattgggcaatatcataatctcccaaaggtaaattaagccattctgcaaatgcgccgaggatggcaaccgtaatggtggaagatgttcccagccctgaaccttttggcacatctacaatggtagtaagtttaaatgacaatggcttttttacataatcgcgcacaatgcgattatacacaccttttagcaagggcagtttgccgtctatttccaattctgtggtgctgtctaattcttggtattgttccaaatcttgcgattcaagtatgattttaccgttatccaacggttctatcattgctctggcatacaaactgatggtggtgttcagtactgctccgccaaaagtgtcactgtacggactgacatctgttccgccgcctgccaatcctaagcgtaaaggtgcttttgcttttattatcatacgtttctaaaatctaatccaacatttttttcacaaagttgtgccacgaaaattcttttttcttttctctgacacgatcaataaatttattttcttttccggatttgaaataatctaaaatagcttttgcaatttcatcaggattaacatctaccacataacccgatttaccgttttctacaatttcgggcaaaccgccaacattggttaccaccattggtttttcgaaatgataagccaattgcgaaataccgctttgtgttgccgatttataaggttgaacaattaaatctgctgcgctgaaataatatttcacttcactgttgggaataaattcggtacgcataattaaccggtcttctatgcccaaatcttttatcaattgttcgtacttttctttttcgccataatattcacccgccacaatacattgtatattttgttcttgaatttctttatttgccattgctttgagcaacaaatccaatcctttgtaatttctgatgataccaaaaaacaacacgtattttccgtcaggatttaaattaaggtgagaacgtgccgtttttttatctactatttcgccataattgtcgtaaatgggatgagcaatatatttaaccggcttggtagttgtaaattttttcatatcttcttttaccgaagccgacattgccacaaattcatcattggcattgacataatacttggcaaggatataatcgcccgggcgtttctcgtgcggaataatattatccaaaatagaaattacccgtgtatttttattttttgccaaccggataaccgttcctaacgaaggtcccataaacggtaaccaaaatttagaaatgattacatccggttgttctttctttatttttaaccctgcttttatccagttaaagggattgatggagtttatcaatggtttgatgattaatttttcaggcgcaggttcttgcgaatattgtgtttttccgggaaataaaaaatttggatactgtaatgtaaaggtatagataatcacttcgtgccccatattcattaattcttctgccaatcgttcgttaaaagatgctattccacctctaaacggatatgccgtgccgatgatgattatcttcataaaaatttacaataaattgattgcaaacaaaagtattgaaaaaaacaaggccaacaaaattgtgattggtttctgttaaatttgactttccggtaattatgaagaaaaaactttctgcaatactgttaattattcttttttaaattcccggctttttccaacaagaataacaacaatgcaccggtaaccgccaaagcaattgctgctgctaattgcgggttttccgtagcgaagggcgatatgtttttttgaataaacggcacaacctctccgtgcgaattaacacgtgtggaaatggtttctttccaaggccaaattttattgagcgaacccaataaaaatccgcttaacagggctaccgaaagattatggaaatgggcaaacatccatttcagcaaacggctgaatgaaagcaagccaacgacacaaccggcggcaaataatagtatggttttgatttcgatatttttaatggcatttaacactgtttcgtaactgcccaacaacaacagaatgaaactgcccgaaattcccggtaaaatcatagcgcaaatggctattgctccggataaaaatataaaccaactgctttcgggactgtgcattggcggcaaatcggtaactacataagcaataaccgcacctgcaacaaacgacaatgcggtagaaatattccacttacttacttgcttcccgacaaaaaagatggatgcaaacaccaacccgaaaaagaatgaccataccaaaaccggatacgttgccaataaatgggtgattaattttgccaaagaaacaatactgattccaattcctgccaataaaaacaagaagaaatttccattgatatgctgccaaaaaggttttacaccttctttgaataaaattgttattgctttaccgtttaagcggttaatagaatcaatcaattcttcgtaaatattggtaataaaagcaatggttccgccactgactccgggcactacatcggcagcgcccatagccatacctttgagcattaatatcagataatctttgattgttcgcattacttaactttgactatattcggtatatccgccttctaaaacggacaaattatcgagtttaaatttgcgttccaatgttgatacaattgctgatgctttttttccggaaatacaaacaaacactacttctttgtcttttggaatttcatttacccgaggtaaaatttgcgccatcggaatgtttttccagccgcaattgtcgtcttcatactcgtattcttcacgaatatcaattacctcaacctttggttcggattgattgagtttttctttcagttcggataccgtaatgtatttcattgttttttggtgctaaaattaaggcttaaagctcattaattcttcgggtaaaaattgaaaaaacgtatctcctcgtaatcctaagcgtaaacattctaacggaattacttcgtttggcgcaatatttcccaagtttacattggttccaaattgtttaataaaccaaacttgttgtgcttttttgggggcttcccacaaaatgttttctacttttacattgttgatgattttattgaccaatgccacgtgagccgttccgtttggcctgtaaatacccactgttccgctttcgcgcgcttcggcaattactttccatgcgccggcttccaattcggttttcatcatacttatccattttccgggactgatgaaaataccttcttcttttgagcccacttcggacaatacggtgtaatcttttgccaattcagatatgtatttgcatttttcttcttcgggcaacacaatggaaccgtcagaaacttcgcaaacttccattttatgtttatccaaaaaacgacggtattcgtcaaacattccgcgcacaataaaggcttcgaaaagagtgcctccaaaataagttttgattccggcttgtttgtaaatttctaattttcgatcgagattattggtgatgagcgatgttccaaatccaaattttaccaaatcggtatatcgtccggcattttcaacaaaattctctacttcgcgccagctcaatcctttatccatcatcattgtaacaccattttggcgaggtgctttctccctttcgggaatatatggtaaatcaaaattcattcttcaattttttaaaatatcaaatacaaagttgttatttattttgtaataataaaatgattgttgaaaattaaatgatatttaacaaatattgcagctattaaacagataaggttacttgatatccgccgaatttacggacgttaaacactgtattgtcttcaaaaagcaaatactgtccttttattccggttaattttcctttataaatgggtgttttatctaaatttaatgattttactttttcgggataccggataaccggaaatttaatttctacaattgtatcatcctccgacaagtaattttgcaattcttcgggaaggatttttttcatctgatttttcacctcaatcaaatcttcttccttgaaagtattttgcaacattgcccgccaattggttttatcggaaatatgcggtttaagtgctacttctatttctcctgccaaacgacgatacggaacttctgccaaaataagagcggcatgcgccccttggtcaatccaacgggttgggatttgcaagtcgcgtgttacacccacttttatatggctggtttgcgataaatagacaatatgcggttggttatggtgtttttgctcccattcaacatctctgcctttatttaaatgggcttcgcacagttcgggatgaataatacaaggcgatgcttcgggtgcattttgaaaacagggataacaaaacccttgattgaatgatttattggtttttctgccacagcttatacaataaatagcattttc

SEQ ID NO: 2190 - DNA, 24200 bp, synthetic construct
  misc_feature 1..24200: note = Synthetic
  source 1..24200: mol_type = other DNA
ttgtggccatgagtgccaatgcctttaccgaagatatggaaacttccaagcgttcgggcatgaacgaccatattgcaaaacccatcaacgtgtccaggttggtgatgctgatggaaaagtacctacgataaaaccccgattttctcggggctttaggtttaagctttttagggctgcggctctaggggttgttgctctaggggttgttgcggaaatcttcgatgaggcaacagctgatgcttacgtctgtctcgtaaggggggatgtcttctctcttgacccacatggcttctgaaagttcttcggcctgcatgtggatggtatcgtcgccatctagttctgcggtccagccggcgatcagcgaatcgctgaagggccagggctgacttccaaagtacttcaggttcttgattttgacgccggcctcttccatgacttcgcggtgggcggcctgttccagggattcgccaatttctacaaagccagagatcaggaacagtctggggttgggattgtcgatgttgtgggccatcaacagcttgtcgccgttacggaccgcaacgataaccaccggcgagattcgcgggtaaaccgtgttgccgcacttggggcagataatgctgcgttccctgtcgccgcggatggtgacgttgccgcacttgccgcagaacttgttcagggattcccagtgggcgatgtgggctgccgtggcgccacccatgcgttccagggggctcatggttctaaagctgcggttgcccatgaactcgaagccttcgggggcttcgtagtcttcggccacctgctgcgtaaagtaggcgcggccgtcgatgttcagcaggtaatgtccctcgaaatcgggaatctcgctgacggtgggaatggcgtagcccgaggcggtctttttcagaaggctcttgcttccgttataaagtatgcagtaatcgtctgctttcggatcctggatcttaaactggttgtcgagaacgtggggggcgatttcgtggatcattctagtatttaccgataatctgattgcgtccgttagactttgccgtgtagagtcgttcgtctacgacggtcagtatcttgtcgtagttggaaaagttcgggttatagcagtcgataaagccgccgctgatattgatgcttacgttgggctggtcttcgaactttatggccgataccctcttgcggaaatcttcggccttggccagggcgctggtgtagttgtcttcgcaaatcagcaagatgaattcttcgccgccgtagcgcactgccatttcgccttctctgttgcaaatgttcttggccagctggccgatgctttcgagaacctggtcgccgaacaggtggccgtaagtgtcgttgatctgcttgaagtaatcgatgtcgaacatgagcagataatatccggcagggctagagagcacctggttgcggatgcgctcgataaagatgcgtcggttgtaaagcccggtaagggggtcgtgggtcgaaaggtaatccagcttggcgatgacttcgtctttcttctggcgttccaggtggtatgccttcagcaggtaagacaccgtggtaaaaatcagcagggccatgaaaacgaaggagaccacctgatccaggatggtgtcgaagggttccaggggcggcgaaagttcaggattgtaccagtcgtagaacagtatggacgtgtagagaatcagggaataaatggccatgattacacgggtcctgaaatttgaaatcagcgacgtgatcagcagactggtaatacagtaaaagggcatgccgctgttcaggccgccgcagataaagaacatgggcggcagaatcagggtgttcagggcgaagcacatggctgaatagcaggcctggtgtttcttggtcatctgggccacgatggccaggatcacgaagtagaaggtgatgaaggctgtgtagatggcggcgactttacccaggtcttccatggccgtaaagatggctgaagcgatggaggccataaaacaaaaaaacagcacgccccagaaggtcacgctttcgaatgtctcgtggataaaagtctttttgatgaactgaagcatctacccaaatataaaagtttgggccccgaaaaaaaagaaagcctcgtcacaagacggggcttcttatagtctaacgtggaactatttaacggttcactattccaggtaggtgtagccgtaaaggccggaacggtagatgttcaggaattccttgccttccttcacagagatcttgccttccttcacggaaccggtcacccagttttccatggtcttcaccagggccttgtcgctgaagttcacgtagtccagcacatcttcaacagattcgccgtcgatgatcttgtcgatctcgtagccgcccttgttgtcgcagacaatgtggacggcgttggtgtcgccgaagaggttgtgcatgtcgccgagaatttcctggtaggcaccgacgaggtaaacggcgatgtaatagggatcgtccttcttcagcttatgcaggggaagagtgcgggccacgtcaccaccgcgaacgaacatgccgatcttaccatcagagtcgcaagtcacgtcctggatggtggtttcgacagtaggttcttcgttcaggcgctggatgggcatcaccgggaaaatctggtcgatagcccagctgtcgggcaggctctggaacaagctgaagttgccgaagtatttttcggccagcaggcgggggagttctgccagttcgtacggagcatggcgcagttcgcttgcgatctggttcacttcgcgggcgatgctccagaacagtcgttcgctcatggcgcgggtaggcaagtcgtagtcgcccaccttgaagccgttcagaacgtcatcgttcagctgcatggcgtcgtgccagctttccagcaggttcttgggagtaagacccttatagatgctgtacaggtccttcagtgcgtcgggagcgtcgtcaccgatttcatgttcttcttcgttgaagaaggcctgacctgcagtttccagaatgttgaacaccagaatggagtggtgtgctgtaagggcgcggccagattctgcaatcacgttggggtgaggcagctttgcttcctggcaggcttcgtacagggcgtacaccacgtcgttggcgtattcctggatggagtagttcacggagctggcgttggaactgcgagtaccatcgtagtctacgccgagaccgccaccaacgtccacgaattcaaggcccatacccatcttgcgaatctgcacgtagaactgggagacttcgcgcaggccgctcttgatgtggcgaatgttggtaatctggctacccagatggaaatggatcagcttcaggcagtcttccattccttcttccttgatgtagtccaaggcttccaggagttcagaactgttgagaccaaacttgctgtggtaaccaccggattcttcccacttgccgctgccggagcttgccagcttgatgcggacaccgatgttggggcggatgccgatgcgacgggacagttccaccaccaggtggagctcgttcatcttttcgaccacgataaagatcttcttgcccatcttctgcgcaaggagagccagttcgataaagtcttcgtccttgtaaccgttacagataatcagtgcgtccggattatccatgttggcaagcacggcgtggagttctggcttggaacctgcttcaagaccgatgttgtacttcttgccatgacgaacaacttcttccagcacggcgcgctgctggttcaccttgatggggaacatgccgtagtaggtgccttcgaagccgtattccttgcgggcgttgttgaagcattcgttcagcttttcgatacggctgtccagaatgtcggggaaacgcaggagcatgggagtggaaacgtcgcggatagacagttcctgcaccagctcgtaaaggtcaatttcgcagcccttgtccttcatgggagaaacagttgcgtggcccttgtcgttgatgtcaaaatagttgacgccccaaccgcgaacgttgtacaaatcgcgtgagtcgtcgatacgccatttcttcatgagagatccttcggatcagtggttagtaaacagtggttagtaaacagtaacgcagaaaagtacatgtcctgcatccctaatcactaaccactaaccactaatcacttcctagtcgacgagggtcgggttaaagtcttcctgccaggggaggccgtacttgttcagtgcgtccatgtacggatccggatcgaattcttcaacagtatgaacacccggggtagtccacttgccggtgagcatcatcaatgcaccgcacatagctggaacgccagtggtgtaggcgatagcctggctgcccagttccttgtagcattcctggtggtcgcagacgttgaacaggtagtaagtcttgggcttgccgtccttggtgcccttgaagatacagccgatgttggtcttgcccacagtgcgggggccaaggcttgccggatccggaaggagagccttcaggaactggataggaacgatttcctggccgttgaacataatgggatcggtgcggagcatgcccacgtcttcgagacagcgcatgtggtccagatagctctggccgaaagtcatgaagaagcggatgcgcttcacgcccggtatgttcttggcgagggattcaatttcttcgtggtgcaaaaggtacatgtccttctggcccacttccttaaagttgtattcgcgcttgatgctcatggccgggatttcaacccagtggcccttgccgttttcgtcggtatcccagtaggaacccggagcggaaacttcgcgcaggttgatttcggggttgaagttggtggcgaacttgtagccgtgatcaccgccgttgcaatccaggatatcgatttcttcgatagtgtcgaactggtgcttcagggcgtaggcgcagtaagcctgggtaacacccgggtcaaagccagaaccgagaagtgcggtaaggcccttttcttcaaacttcttggcgtatgcccactgccagctgtaatcgaagtaggcgctaaagcctgcttccttgcagcgcttgtcgtaaaccttgcgccattccggatcgtcgatgttttccggttcgtagttggcggtatccatgtagttcacgccgcattcaagacatgcgtccatgatggcaagatcctggtaggggagtgcgatgttcatcaccagatcaggcttgtattccttgatcagcttaaccacgttctcggccttgtcggcgtcaacggcagcggtggtaatcaccgtcttggagttcggacgaatctgttcggccagcttttcgcagttttcgcgatggcggcttgcaatgcagatttcagagaaaacttcgctgacggtgcagcacttcttgatagcgacggtggcaacggcgccacaaccgataatcagagctcttgccatttttttgtttttcctttttgaaaaaatgaacgtgcaggggcggcgacccctgaagaaaaataagtgctagtaaatatagaaagcggggggtggacgcatagaaaaggaagtaaagatggggtaaaaattgcctgaatttaggagatgaaattactggttttaaaattggcttattttttaggccaatattgcttaaaattggcttgttttttgagccaattttgcaacgcaattgaaaattatgtatattgcaagctatgaagaatgcaattgccgaaatcatgcgtgaattttacgaggaaggccttcccgaaataaatcaccctcgtgttgttgaatactacgaaaaagcgcgaaacgcgacctccattatcggcatgcgtcgtgtgggcaagacctatgtggcgtttcatcgaatacaggaattgcttggcgatggtattccattagaacggattgtttatatcaactttgacgatgagcgcttgcgaggtgtttcggcaaacgacttgaagctcattggggaaattcatgcagccatgtaccccgaggccgcaaaggaaaaatgttggtattttctggatgaactccaggatgttgaaggctgggaattgtttgcccgtcggttggtagattccaatcgcgttcagctttgcctgactggatcttctgcgaaacttctttcatcagaagttgccacgcagttgcgaggccgttctctcgatgttgagattttcccgctttctttttcggaatttctgacttttaatggtcttgtaaagactgtaccgcaggcaccgttttctccgagaacggcgggcttgctgcgaaacgccatgatccgttatcttgaagaaggcggcttccccgatattcaaggcgaaaatttgcgaatccgcaacaaactgcttcaggaatatgtgaatgccgtagtttatcgcgatgtgattgaacgccatgaaatttcaagcactcaggctttgcgctatactttggattacatcatccacaactacgcccgcaaaatttctacacgagccatctccggtgcgctccgtgccgtaggtgcttccgacaatcgcgaacgcatttccgaatacctgcaatattttgtcaatgcatacttgatttatccggtttccataaggactgattctctggctgttcgccgcacgaatccagacaagttctacatcgtcgataccggactcattcgcgccatgaccccaaagaatgatgcggaacgaggctggctgcttgaaaacctggtgtttatgcacctgcgtcgcggcaacaataaaatcgagtattacatcaacaaatctggcggcgaagttgactttttggtgactgaccaaaattcaaaatcacggcagctaatccaagtcgcctggaacatggaaaaatccgaaacatcggatcgcgaactgtcggccttgtgccttgcccgcgatgaaataaaagtcaaggactgcctaatcgtcacctgggattccgaaaccgttctggatgacggaattaaagtcgttcccgtttggaagtggtgcttggggtaaggctttgataaatgattcctggcccttgctttgttaaaacagtttgtttaaatttatgtcattctcatccggcttacgagccggtcgtataattctctgcttgctgttcgcggcacagtttcttaaactgcacaaagccgcagggtacctggataagcgctatctggacacgtaacgtagggcaccaaaaggaatccttaaaactttacatgtttctggccttgcctcattgggcaaagcctccttttactacacaaaatttaacgcgccctttaggacgcagaggaaataatgaacatttcattgttgcatgatcccttttgtagggatgttttatctgatgtctccacatttcttgaatttgtggaatacttgacttctcgtgatgaagatttgaagtctgttgtggatttactggataaaaattcatttttaggaatttccgatgatttggtttttcttgccgaggtgaagaaggaatttcttcctaaagaaaatgagtcgaggcggctcagtgtagggtttctgctagaacataaatcttgccgtgatgacaaggctatagaacaaattcttaggtaccaacatcatctgatggaagaaaatcggacgataggtgttgataaagaccttcccttggttgcgatgattgtgtataacggtgtggaatcgtggaatcctcttgaggaaatgtattcaatctatcctaagattatgcatgactatttgcttccattcaagtgtgtctttttggatgtttcgactgttcccgatgacaagtgcctgaatgaatttacccctcggctgggcgcgtttattggagctctgaaatacgcccgtaatccggaggaccatggcgagttcctggcgcagttggtaaaaaaggttaaaacgtcattgactggaaacgaggcccttgacttgcttacatccatggacgtttatttgcgctattggatttcagaaaacttcaaggatgttttcagcaggtattttgagagaccgccatacaagacgattcatgacgcagaagtcgaagaagccgttgacaaacaagctgtccagacggcactcaagatgctgtctgaaaatgagccgatggataaaatcgctcgctattcaggcttgtccgaagaacgaatccgctcgttgcagtgatatgtttaaacgaaatacggaaagtttgagaattttccgtattttgttgaaatcgtgaactgaaagaagttatatttaaggcatgcctaacaagatgaatatatccgatttacagctagtctattcaagtggtgaactccaaaagcaaggccattcatattatcagatagcgaaaatggtggagtgtggggcactcatgcgtctcagtaaatcgtattacgaaaacgcaaacttttctggtgacctgaatgacttttactatgtccgagcctatgcgactcagggcgtggtttgccttatgagtgcagccgtttattacaatttaacaaccttccgccccgaagccatcgatgttgctgttccgcccaaggcaaaactttctacacagcccgaaaacctaaagattaacctgcactacttttctggcgaacgtctatctcttggtgtcaaaacaatccgccaaaacaaaaaccccttcaaaatttacgatatcgaaaaaactgtcgttgacattgtctcgaaccgaaataaagtcggaatcgaagaaaccaaggaaatcctggtcaattatctcgcaaggcaagaaaaaaatcttaacaatctctatcgctatgccgaaaaactttcatgcctgaaaattctgaaaacatatctagaggtactagtgtgaatgtacaatcaatcaaggataagctcaagaatgttgcgaaggctaattccaggctgtatcaagaattgctaacagtctttgcacttgaacgctccctgtacagaattggaaaatcaaaatatagggaaaacttcactctaaaaggtggaatttttctgtacgctctttacgacaaggaatatcctcgttctacctccgatatagaccttcgcgctgacaaaatcagcggaactcaggaatcgctgctgtcaatttttagtgaaatttttgctattgaatgtgacgacgggataacatttgatttggcttcgcttaaatcttgtgagataacgaagcaagacgaatatcaaggcgtgaatgttagtgttacagccttgcttggaaacacaaagttaccggtgtcaattgatattggctttggtgatgttattattccgtctaaaaaagaaatgtcgttcccggtattacttgatatggagtgtcctcggatttatggttattccattgaatcggtgttagccgaaaaatttgaagcgattgtttcgctgggttacgtcaatactcgattcaaagatttctacgatatgtatgtcattttgcagagcgaaaatattgacgcaaaacttttgcaagaggcgattgtacagacgtttcaaaatcgaaaaacaacttttgacgacattgttgtttttgaagactcgtttgcaacagacatagagcgcgtaaaaagatggaatgcgtttgtgaaaaagaaaaacgctttgatgcaggtgacttttgacaaggttgttggacgaattaaaacgtacttcaaacctattgtagaaagactgcgataattagaataatgcagaaaataaaagagggcgacaccacgaaagtgccaccctaaatgttttcacaacggaataatccttattgtgaattgctttcagatttagcttcaatatacctattgttgtgcttgttgtcaatacccaaaaaaaagaaaaattttttatagtgtcgttttttgacattgaatggagtctatttttataagtttaactatactgaaaactggctttttctgcgaaaaaacaaagatttttgattactttggatgaaaaataagttatgtttaaaatgaaaaaattaagaggtttgtaacgatgaaaaagattcttggactagatctgggtactaattctattggctgggctgttgtaaatgaagctgaaaatgctcaagaaaagtcatccatcgtcaaattgggtgttcgtgtaattaattacgacaattttgttagtggagaaactggaaaggaagttaagggaaacccggcagatttctttattgctggaaaaagcgtaactccaaatgctgcacgaacacaatctcgctcaatgagacgcaatttgcaaagaagaaaacttagaagaaataaattagttaagattctcaaagaaaatcattttatttcagacgaatctattctttgtgaaaacggcaataacacaacttttgaaacctaccgcttacgggctaaagcagtaacagaagaagttggccttgaagatcttgccagaattttcttaatgattagcaaaaaacgtgggtacaagagttctcgaaaggctaattcctctgaagatgggcagttaattgatggtatgaagattgctgaggaaatgatcgagcgtcatttgactccagcacaatatctgcttgaaatgataaacaatgggaaaagggaaaatcctgatttttatcaatccgatttgcagaatgaatttgatttaatatggaacaaacaaaaagggttttatccagaaatcctttctgatgaactgaaaaatgctctcgttggaaaaaataaaacgcaaagctggggtgtttgcaaggaaccttttggtattgttggcattaagaggctgactaaaggttttgaacagaaaaaagaaaaccttcaatggagagttgaggcattaagccaaaaaatcggattagaagaattggcaattgttcttcaggaaattaatggagatatatccagttcgagtggctatcttggaaagattagtgaccgaagtaaagaactgtattttaataagattactgtaggtcagtatcttatggaacaattggatcgaaatccaaattatagtttaaaaaatcaagttttctacagacaagattatttagatgaatttaatgctatttggaataaacagaaagaattccacccagagctgtctgatgatttgaaaaaagaaatcggacaaaggacaattttctttcagcgccctttaaaatctcaaaagggtcttgtcggtatttgcgaacttgaaggtgagttaaaagaaatagaagttgacggacaaaagaagataaagaaaataggacctaaagtatgtccgaaatcatctccattgttccaggaatttaaaatttggcaaaaagtgaatgacttcgaagtgaatggcgaaccgatccctcttgaagaaaagcaaatcattgcaagagagttgagtgttcgtggaaaaatgtctagcaaggacattcttaaggaattgtacgaaaattatagagacttgttttccaattttgatgaactagatggtaatacaacgcaagtaaagttgtatgaagcatatgccaagataattgaaaattccggtcatgacacttttgacttcaaaaaaatgtctgcagaagaatcaactagtattgttgaagaaatttttaacgcacttcatttcaatactgaaatattacattttgattctagtctgccgactccaaaatttgagcagcaagcttcttttaaattatggcatttgctgtactcttttgaaggagatggttctaaaaccggcaacgaaaaactagtacagaaattgcaacaggaattttcatttgatgaagatagcgctaaaattttagcatccgtgacattcaaagaagattacggatctctttcatcaaaggcgatgaaaaaaattttgccgtatctgaagcaaggatattgttatagtgacgcgtgtgaaaaggctggctataaacattcggcaagatccctgacaaaggaagaacttgagaaaaaaacttacaaggagcgtttgcaagaactacccaagaatagtttgcgcaatcctgttgttgaaaagattttgaatcagatggtccatgttgtcaatggtgttatcgatacgtacggcaagccaacagaaataagaattgaattggctagagagttgaaaaatagcgcgaaaaaacgagaaaatctctctaaaattaacgctgattctcagaaacttaatgaaaaatatcgagagattcttcaaaagaattttggaattgctcatcctagtagaaacgacttgattcgttataaattgtatagagaactcgaaactaacggctttcataccctttattccaatacgtatataagtcaggataatcttttcacaaataaatttgacatagaacacattataccacagtcaaagatttttgatgattcttttgctaacaaaacccttgaaagtcgagaaataaatattgaaaaagggaataaaaccgctcgtgatttcgttgttgacaaatatggcgaatctggtaatgattgttcttttgaccaatttgaacaacgagttgacaaattacatcgtgaaggagcaataagtaagaataagcgtaaaaaccttctaaaaaaagaatgtgagctagaaagcggttttattaatcgagatttgaaggatacccagtatattgccaaaaaagcaagagaaatgcttgaggatttagtacgtgatgtggtcccgacaacaggtaaaatcactgataagcttagggaagattgggagcttgtaaatgttatgcaagaactcaattgggataaatacgataaacttgatttaactgaatggattgaaaataaggaaggcaagaaaattcgaagaattaaggactggacaaagcgtaatgaccataggcaccatgcaatggatgctttgacaattgcttttaccaagcgttcctacatccagtttttaaatacattgaatgcccgtgggagagaccctgaaattgattctattgaaaaacaggaaactcatgggcaaagaatctttaatgctccatttgaattaaatgagtttagggctcaggcaaaggaacacttagaaaatattcttgtttctattaaggcgaagaacaaggttgttacaccaaacataaacaaggcgaagaatggcgttgttaccgagatttcactgcctaatggcgagaagaaaatgataaaaggccagcttacaaagactcctcgcaattcattgcacaacgatacgatatacgcaaaacgtttgaaggaaaatttgaaggaagaaaaagtcaacgcgtccttgacaatagagaaaattaactctgtgattaatgaagagtataaaaatgcgttgcttaagcgtcttgctgaaaatggaaacgattcaaagaaggcctttggcggcaaaaatgctatttctaaaaatccgatattcttgaatgccgaaaagtctcggtgcgttcctgaaattgtcaggacgaaatcattccacgagatttttaccattcgcaaggaagtttcccctgatttgaaattggataaggttgttgatgatcgaattagaatgattcttcaagaacgtcttactgagttcaataacgatgctaaggctgcttttagtaaccttgataagaacccgatttggcaaaataaagaaaaaggaatcgccattaagagggtcgctatttccggtccatcaaatacaatgccgttacatagtaaaaaggatcattttggaaaaaatatccaaaatgaaaacggcaacatagcaaacgactatgtgcaattaggtaataaccatcatgttgccgtgtatagggatgaaaacggcgaagtacaggacattgttgtttccgcttatgaagcaacgcaaagaaatattcagaataagcccgttattgataaggaatacaacaaggataaaggctggacattcctgtttagtatgaaacagaatgaattctttgtctttgcaaatgaagaaaccggatttgatccgtcaaagattgatttgatggatgaaaaaaataatgctctgattagcccgaatttgtttagggttcaaaaattctctaaagtaggatatggcaatagttttgttcgagattatatgtttagacatcatctagaatcaacgttggatgaaaataaaatgctaagagggatgacttatttgcagtttaaatccaccagtttcatggacaagatggtgaaagttcgtgtgaatcatattggaaaaattgtttttgttggagagttttaactagtgatcaaacgtacgctatactttggaaatccagcgtatttgtcgctgaaacttgaacaactgagtgtcaagctggtttctgaagatagtgtaaagacggtccctgttgaagacattggcgtaattgttttggataatcctcaaattacgatgtccaacgccttgatggaaaaattggttgaaaataattgcgcagtaattacctgtaatagcaaacacatgccttcgggaatgctactagctttgcaaagtaatacggtgcagaatgaacgatatagagatcaactagatgcaagtttgcctttacaaaaacaactgtggcaacaaaccattcagcaaaagatccgcaatcaagcggttgttttgtcatctgtgattggagacgatgcaaaatgcatgtttgtatgggccgactccgtaaaaagtggcgattcggaaaatgtagaggctagggctgctgcttattattggaaaaatgtatttccgcacatagactgttttacccgggaacgagaaggtgatgctcctaattgctttttgaactatggatatgcaattctgcgaggtgttgttgcgagagctttggttgctaccggtcttttgccaacattaggcattcatcatcataatcgttacaatgcctattgtctagctgatgatataatggagccgtatcgaccttatgtggatcaattggttattgaaattgtaaaagaatttgattccaaagaattgacgaaagaaattaagataaaacttcttgaaattcctgtgttggatgtgcttatagatgggaaaagaagtcctttaatgacggcggtttccgtgacaacagcatcgctatacaaatgctttgctcgggagtcaagaaaaattctttacccggagatggaatgaatgttcgattcagtgagtatagagttatgtggattcttgttttctttgatttgcctacagagactaaagaggaacggcatcgccattctgaatttagaaagtcgttgctgaaagatggctttaaccgttttcagctgtctatttatacccgctgttgccccacagtggaacatgcaaatatgcatataaaaagggtaaagaattttataccacccaaaggaacagtgagcattatgtgtgtcacggataagcaatttgggaaaattgtaattttccatggtccaaaggaacgtcctgcacctaaggtttccccacagttagagctgttttagaatcaaaaaacgagcttgaaaaaagaaaaaatcggccattaaggtcgatttttttctttaatacgaaagaatgcttaactccttttgtatcaatcaattacagtaaatcagctgtaattgcctagttaaaactagaaaaatctgaaagcaattcacaacgtgcggggtctgctataaatgcgcttacgagctgtaattgcctagttaaaactagaaaaatctgaaagcaattcacaacatgccttaaaggcgaaataacagacccttggctgtaattgcctagttaaaactagaaaaatctgaaagcaattcacaactttgggttagaccgatggctagcccgttaggctgtaattgcctagttaaaactagaaaaatctgaaagcaattcacaacataaggatgtcaagaaggttgttcaagcctgctgtaattgcctagttaaaactagaaaaatctgaaagcaattcacaaccatagccttgatgtatcgccaatgctacgggctgtaattgcctagttaaaactagaaaaatctgaaagcaattcacaacacatagacacgaaaccggtcgcagcggcccgctgtaattgcctagttaaaactagaaaaatctgaaagcaattcacaactcaatcttgccaccatttgttccaggcgttgctgtaattgcctagttaaaactagaaaaatctgaaagcaattcacaaccacttaaaggcgtatcagaaaagtgatagcgctgtaattgcctagttaaaactagaaaaatctgaaagcaattcacaacgctcgtctgattcggatggtgggggcacctgctgtaattgcctagttaaaactagaaaaatctgaaagcaattcacaacatatcaattttactatctggaatcatctcagctgtaattgcctagttaaaactagaaaaatctgaaagcaattcacaaccagtaccagcaattataggtggtgtaatgggctgtaattgcctagttaaaactagaaaaatctgaaagcaattcacaactacaagacaaatatattccttgcccataaggctgtaattgcctagttaaaactagaaaaataatgtaagctattttcacaatgacatccttcgccacttgcgcagcggagaactatgtcaaggagaatataattaaaaagcaaaagaaaaaggctggcagctcaaagcagccaaccataaagtcgttacttattcaagataattgaacgcaatcctccccgtcaatcctagccatccacaaatcccgcctccgccatgcatttttgtgcgaagcaattggcttcttcttccttttcggggtgatggtgggtaatttcgacattttgcagacagattccttttttgccgtggtatagaacgtgggcgagttcgtggaagaacgtgtgccacatggcttcgcggctcttgaaacggtcgtgaagttgaattaaggggacgtccttgtaccagcggtacattccatggacgggtgctgtcttgaagttctgtacaaaaagaatgcgaattccgattttgcggcaaagctctgcaagcccggtcatgcaatcgtcaactacgtcggcttcgggagtgttgtaggtaatgtcctttgcgctttcgggaagggctttgtttgccgctgcaaaatcaataatttcgggaagatgctgctttagtttcttgcgaacagccttgtggtcttgcggttccatggggtcttcgtcagaaaggatttctccccggcgaatccacatggacatggcgtaagggtctttcatctctgccagggagatcctgaaggcgacttttagacgtgcgtccttgtaatagcggtcccaggcctgtggggttcccactgcaaaaaacttcagtagtgtgtggacctcgttggcggtggtttcggttttggacttgccctcgggagctttttcgatccagtttctcgcgcatgcttctgccgggaaagattttttccaaaggggctggtttccgaggcttgccttgactttttcgcgaatgaggtattcttcgtaactgacttgtcgacgaagccaatagctggagggtatgttggtcaccatttccaagagaaatgcgacttcggagacgatgcggacgttcccttgtaaaatgtcgttcaccgccttgggcgtgtagcccatgcgagcggccaggtcgttggcgtccattcccatttcttgaattttttctgcgagatcgcgtcctggcgggaaaattacggcaagctcgtcacaatgatatgcattcatataaaatcctacttatggtaatcaacaatttccatgattgagaccgtttgctctataattaaaccgacgatatttccttcgttgttgattaatggtttgaaaataagcctataagggtggtccaaatcgcaagcttgtttaagagtttcaagtctagcccagtaaacgttcgctcgacgctggcctagtttttttaccgcgaatgatttgtcgccggcgcatgttgccaactctttagtggcgtagacgatttgcatttcatatcctcatgttctccttttttgattaacctaaaatataaattaaaattctagtttaagtgtttggtttattaaaaattctttaattgggtgtgctgtccgcaattttcgtctgcaaaagaagaacttatttacgtcacggtttcttctagaaccatattttttactatattacaaccgctcttgaaaaagagtgcggagctttagctcagttggttagagcagcggactcataacccgccggtcctcggttcaagcccgagaggctccactaaaaaagacaggtcgtatggcctgtctttttttatgtaaagggaggggctttcccctccctctagactcctttcccttttgctcgggaaacaaacttctgctttacgtttaagaatttgttctttatgccttgggctgcagtccaagttcgccaaggatcagcaggtacttggagatggttctgcaccattcgtagtggaatccgctgtaggcgttcacgacgcacttgtcccagtcggcggtctcggtcttgtagacgttctcggcgtccttgacgcagcgcagcatctggtggggtgcgttggcgtcgtcaaccaggaaggcgttggcttcgcctgcagtctcgaggctgtaggtggtcagcatggtagaaacgcctacggtgcgtccggtcagggggagtgttcctgcggccatggctttcaagatgatcgaagaagagggttctctcaggttggcggcgaacaggacgtcggaaccggccagcgtgtcgcggagccttgtggcgtcacccatgaatttatccaaatccagcaggtacatgacgtcggggtactgcgtggcgaattccttgtagtagttccagtcggcgttgttcctggacgaagttccgacgataaggaatacgtcgaggtgtgccacgtccgaaaggatggtggccaaggtctcggaagtgttgcccgcttcggaatccaggtggacgtagataaccatcttgtctttaaagacgatgcccaactgctgctgcaggttggccctggctctgcgctttgcttccttgatggggaggcagtcctggtcgttgaaatcccatacctggtagcttacaccgaactgcacgccaatcagcttgtcggcgttgcggttcaggaatccgctaagaccgccgggcaggttggtgttcagcatggcgtcgcggtaacccggcgaggggaacaataccttggtggcatacaggatgccggccttcaacaggctcaccttgccccagaactcgtagccgtccatgttgtagtcttcgcgggggagaccgatcttctcgatttcgctggagggtacgtggaagtcgtaggtgatgttatggatgttgaagaagaaggggatgtcggcggcgtagctggtgtacagagtccttgccagggtgccggcaagggcgccgccccattcgtgacccatgatggcctggcaggcgaagttggaggcttcggcgtaggctagcgctgcggaggccaaaaaggcgaatcgcaggtggttgtcggtgtaggggcgctcgtcgggagggccgtacacgtggggtctgtcaaaaaattcctggttgtatatgtaggtgtggagggggtccttttcggatacccagatctcgtagggcttgttctgaagtttttcggttcctgtaaagatgcacttgtaggaatctacatcgaccatcagctccttgtagaacggggagcaggtcaaaaccttggcaccggcacatgcgaatgcgtctgtcatgcggttgactgcggttgccagggggctcgtgcgcctccaattgcctgcttccgggcttacgacaagaatgttcatgcctaagagattactcctaataaaattttacttatacccaaaggttggtataaatttatttaattatttttaagaagtatacgcccaaattcaaatttttggtgcaaaagcttataaaacacttacaaagccctattggctgaaggaaaacaaaatgaagaagatctttcttgcctctctggctgctgccgtcgcctttacgatggtcggttgcaagggaaccaacgaaaagcgtggtgacgaacaccttaaggaaggccgttatcgtaacgccatcaactcctacctggaagcaaagaagaagggtagcgtgtctgacgaattctacgataacttcactctcgctctggtccgtgctgcagaaatcgaagccaagaaggatcttaacagcgatttgatcagcggctactttgacaaggctggcgtcaacatgcccgaagtcaagaacgccgaagttgttgaagaatacgtcaccaagatggctactgtcggtaagcagcaggctactcaggacggtgtggacttcaacaccatcatcaacgcttttgcacgtatcgataccgccctggtctatgcaaagtccaagggtgtcggcgaaggttctgtaaagaccctccgtaacgaagccgaaaacgccgtcgttgccaaggctctccccgaaatcaaggatgaatctgatccggtggtttctgaattcggcctgctccgcctcgaatacgtcgcacccgaaaatgcagacgtcaaggcagctcttaacaagaaccgcaagaccactcgtggctacttcctgatcttcggtgaaaacatcgccgacgctgctggcaagcgctttgttgacaagtggggctacgtcatggctctgcccaccatcaagatggctccgggctctctcaacggcgaactccagttctgggcctctaccggtaacaacaccgaactggatcccgaaaagatcaaggtcgtttctaccgacggtaaggaagcaattgctaaggtcagcggtggctggtgcgaagctgaagtcctcgtcggcaagaagggcgacgaaaagatcgaaaagaagaagcagcccatcaagaagggcactaagggtaagttgatgaacgaattcctgtgctccgtgaacgtctccttcacctatgctaaggacttcgttcctgactacgtcgaatacaaggacgaattcggtatcggccgcaagtacctcggtcagtaatagtccaagactgatttagtctgaagcagatttaaaatcaacaggagcctcggtgaaaaccggggctctttgcttttgtggcgggcatttgcgttcgccttgtttgcggggcgcttgatggttcgccttatttttggcggggttctcggatctttgccaggagccacagcagtaggcatgcggcaatgggggcggctatgttccatggttcgtggtaacggatgctgccgggggtggcaagccagatgtagaccaggacgatgtgtgccgtaaagacgtctagactgtggcgcccgatgacgttggtaaccttgaagtccagtgcgctggggaagcggcggacaatccagctgaccagggagacgaacaccatgaagttgacgaatcgtaacggcccgattgcggccttgcttatccagaacttggagggctgctgcagggggatatattcgtgcctccagaggaacaggaagacaaggataatgaataatagcgggataaggcggtcaaattttttgaagaatgtaggggtaaagacctgggaacgtttccagcaggcggcaatggccgcccccgtcacataaaggaactgccagcaaagcgggtcgaaaaagccgtggtttatccatctggggagcaggctgttgagggtgtcccgcaggccgtactgccccgcaatccagagggcgacgcttgcgcaccagatggcgagaatgttccctcggatcatctgggggaacagcgcagaaccgattagcagaaagaccacataaaggggcaggacgtcaaggtaatccggcgtgttcaccatgggtatggaccacaggctaactagcaccgggtgttccgggaagttgctgaagtattcgcggatcggggtcaggatggtgcaggcggcaatggcgaccgctgccagcgtaatgctgtggtacttccagatcttgaatgcgcgggagcgcatccaggtttgctttggatccttggcagacttgctgaaggctgccaaggcgcctacaaaacccgataagaaaaaaaagccttcggctgcactgaagaagccgaagcactgatataggtaatgagaaatgggctttccgaagtgatccagggtcatctgcagcagcaggatgccacggattgaatccagagccttgattcgcatagggagcgaagctagctgaacttagaagtttgccttgccgctgaagcccagggagaacttggaatctccgaagggaccgctcttggtgccaaagttgtagccgtaccagaataccagttcggtcttcatggtgggatacaggtaatggttcatgcccaggaagtggaagctgtcgccgctggtttcggtgtcagggtcatggagttcgtagctgaagcccatggtgtacttcttgtggaggttaaagctgggttcgattgcgaagagcttctggtcgtcggtggacagctggggagcagtttcgtattcgctattggtaatggcgtagaagtaggtcatggccaggttgaatacgccgtagttcatgctgggttccagcaagaaggagtgtacgcccttgcccttgtacgggtggagaccccagacggcgtagatgccgtagttgaacttgtcgtagctcttggagtagtccacttcggtgcccagggagtaggtgttggggcggccgatgttttcgccgaatacccagtcaaggctgggggtaaggatcaagtgttcgtcggggtggttcagcatggggaatgcataggtgacgaacaagtccatggtatggtcggtgttgtcggaggcgccgaagtagaatgcgccgtggccgtacttgtcgttgccgaattcagcaccgaaaccgcggaggctttcttcgcggatgattacggcgtagcgggaggcatcgcgccagaagtagtagttgaatgcacctgcgctgtaggtcatgtcgccaaagaccaggcttacgtcgtggctaacgtcccagcggagctgtacgccgtcgaattcgaaggaattgtggcggccttcttcgcccatggcggttgcgcgggccttgccgtggcggacttcagagtcttcttcggtggcgccgagggtgctgtgggtggttccgctaacgacgacagacacgttttcatcgagatttgcctttacggaaaggtcaatatcctggttgccggcgttgaccgggtcaaaatcctcgtcaaaatagctggcgtagtcaaaattcacgtcgccgtggacttcgatgtcggcggcagttgcaaatgcggcggtcattgcgaccatgggcaaaatcattttgcgcatacagtgattccaatactgggtgttaaattttcacgcctaaagatagcaatatccaatgtcgtagaccaacataaaaacaatttgaaatacaaattatggggggtatttttgtaaattttgataactatgataagaaaatgttcctttagaccccaattcctggtggctattcttttggtgttggcccaggtgacttttgccctgactgcaagtcaggccatggaaaaatccaaggcctggttcaagtccggtaaggcctggagcctggattttaaactgcaggtgttttatgcggattcgccggatatcgcatcgcagatgggtagcctcaaggtggccgaaggcgataagtttgttcttgatatcgccggcatcaagttctatagcgacggtgtcgacatgtggcaatacaatgtggagcagaagcaggtcctgatcaaggccgtggaggatctttccagtcagctgcacccttccgagcttctatttaaatacctgaactgcaacgccaaggaaatgaccgaaggcgatttcggtggccagaagttgtgggtactgaaactggacccttcgaagtatgcggggcaattcacccagatggaagtttggctgtctcaaaaggatttttctccggtgcgcctgtttaccatggacccttctgaaaacggttcctggtataacatagttaacctgaaggtcatgaagaaagtttccgacagcgattttagatacaaggccattcccggtgtcgatgaaatcgatatgagatagcagaaaagggacgttatattatgaaatggactgaaggtattttaaggttaaaaggcttggtggctgcaggcctggtgcttgccggttccgccctggccg

SEQ ID NO: 2191 - DNA, 24200 bp, synthetic construct
  source 1..24200: mol_type = other DNA
  misc_feature 1..24200: note = Synthetic
cacattgagaaacgctgccagtccggcgcacactcccccgatggtcttgttgtccaagtcacggaaaagcctccggcgggatgttccctgggcaccgttataggtgaaatccacgcctgatccggaccttggatattcatcttccttcccggcactttgattctgttcccgggcattcgttcctgattccgactccttaggttccttggagccgtccggcattccgagctgctcgaccaccttcgtgacaagagccagattgacaaccctgtaggaagccccgccggtcccttgatcgaacagttccgctatccggttctccagatcggccatcacttcctctttcgcggactgggtgtcacggtcaaggcgagccttgaagtggtcaaaataagtaagaagccttgcgtaggcatcctcatccagagaaaaactccggcctccaacactgacattcacaacttttttcatcttaactatttaattttcattatcttgttctgcggcttaaacttcatcgtccgccccagaccttgttttgcaaccatttttacaatgcaaagatataaataatttcaaataccttgcaagacaaagtactaaaaattttctatagactgttcaaacaaacctaagtgatattgaaaaaacaagttgcatttctaaggattactaaaatgaatatgcgagcatagtctattcttttggctgcggccttgatatatatatatatatcattccatattacgccagtaactctcaggtgtgcgaatatgctcgcacctggaagcgcaactcgcttgtcatcaagtggatgatgttttaggtgtgcgcgtattttcacacctggaagtcataaagtagaacaagacggtggaactattccgaaccaatggaaattgatgtatcttagcggaaatattcagaactgatgagaaaaagatcaatatttttggctgtggccttgatagccgcggcgtgcggatctccggagaaaatgaggatggaggatcctgtggactatgtgaacccgctgatgggcacggcgtccacttacgaactttcgacaggcaacacctacccggcgatcgccttgccgtggggaatgaacttctggacacctcagacaggtgccaacggggacggatggacatacacatattcagcgaccaagatcagaggtttgaagcagactcaccagccgagtccgtggatcaacgactacggctcattctcgatcatgcctgtgaccacaggtccggtttatgacgaggaggggcggcagagctggttctcgcacaaggcggagaccgtgaagccttactactatcaggtctatctcgctgaacacgatgtggttgccgaactcgcccctaccgaaagggcggcggcgttcagactcacctaccctgaaaaggagatgtcctacctcgtggtcgatgcctacagcggcggcaatgccgaagtcataggtgacaggaatatgatcgtaggctactcgaccgcaaaccacggcggcgtgaccgagaatttccgaaactggttcgtggtggtttccgacactccattcgagacacaaaccgttgacggacacatcgctatggtcggattcaagacggtgaaaggtcagaaggtcaacctcaaggtcgcgtcctcattcatcagccaggagcaggcggaactgaacctcaacgaactgtccggcaggtcattcgatgagatcgccgaggccgggcgagcaagatggaacgaggttctgggccgcatcgcagtggaggatgacaatctcgacaatctgcgcacattctattcctgcctttacaggtcggtcctgttcccacgtgatctgtccgagatcaacgcggacggcgaaagggtacattacagcccttacgacggagccgtccacaagggctatctgttcggtgacaccggtttctgggacacattcagatgcctgttcccgctgctgaaccttgtctatcctgacgagaatgtgaagatgcaggaagggctggtcaacacttggaaggaaagcggattcctaccggagtggtcaagtccagggcacaggggatgtatggtcggaaacaactcagcgtcaatcgtgaccgatgcatggctcaagggtctgcgcggctacgatgcggaagagctctggaaggccgtcacccacggtgcacatgccgttaaccctgaggtggatgccacaggccgactcggttgggaatattacgacagcctcggctatgtcccttgtaatgtaggcatcaacgagaatgccgccaggactcttgaatattcctacgatgattggtgcatctaccagttcggcaaggctctgggccgcagcgaggaagagcttgcgccttacgccaaggccgcattcaattacaggaatctctacgatccggagtacaggctgatggtcggaaagaacctcgacggctcgttcgagaggccgttcagccctctgaaatggggaggcaacttcaccgaaggcaacagcctgcactacacctggtcagtcttccacgaccctcagggcctgattgaccttataggcggagacgaagtgttcgcaagcatgctcgacagcatattcacaatcccaccgatcttcgatgacagctactacggcttccctatccacgaaatcagggaaatgcaggttatgaatatggggaattacgcccacggcaaccagccgatccagcatatgctctacctttacgactggtgcggccagccttggaaggcgcagcagcggatccgcgaggtgatggacaagttctacaactccaacttcgacggctattgcggcgacgaggacaacggccagacatccgcctggtacgtattctccgccctcggattctatccggtctgccctggatccaatgaatatgcgatcggtactcctctgttcaagaaggctgtgatcagccgcccggacgggaagaccatcactctggaagctcctgataattcgaaggataacttctacatcaaaggtgtgagaatcaacggcaaggattggagccggaactatttccgccatgaagaccttgcagaaggagcgaatattgtttatcttgtagggtccgagcctgacacggtgagaggaaccgcaaaggaggacagaccatattcatacactaatgaacaataaattatgaaacgcacactgcttctggcttcggccatttttctgctctcaggtactttgacacaagcccaggcaccggacgatgtggttcggcaggatcaccaaccggccgccgagccaaccagtctggtcgccgagcctgtcaaagcgactgccacgagcaacaccaaaacctacgagtcgcagcgtccggctccagaaaagcgtcttttccgctccgaggccgtcgagaacaagatcacccagatgcaaggcatcctgaagaaccagcgcctcgcctggatgttcgccaactgctacccgaacacccttgacaccaccgtgcacttcggcaaggacgacgacggcaacttcaggaccttcgtttacaccggtgacatccacgcgatgtggctacgtgactccggagcgcaggtatggccatacatccagctggccaatcaggatgaacatcttaagaatatgctcgccggcgtgatcaactgccagttctcgctgatctgcttggatccgtatgccaacgccttcaacgaaggccctaccggcagcgagtgggagtccgatctcacggatatgaatccttacgaccacgagcgcaaatgggagatcgactcacactgctacccgatccgtctcgcctaccagtactggaaggtgaccggtgacgattccgttttcggagagacttggctgaattccatccaggccaccctaaagaccttcaaggagcagcagcgcaaggatggcccgggtccttacaggttcgccagaaagacagaccgccagttcgacaccaagtccaacgacggccgcggcaaccctgtcaagcctgtaggccttatcgcctcagctttccgtccgtccgacgacgccacgatgttcgagttcctggttccttccaacttcttcgctgtcacctctttgcgcaaggccgccgagatcctcaccgaggtcaaccacaacaagaaactcgcgaaggaatgcctcgacctcgccgccgaagtggagaaagctctctatgaatatgccgtcgtgaaccacccgaagtacggcaagatcttcgcctttgaggtggacggtttcggcaaccagctgatgatggacgatgccaacgtgccgagccttctggcgatggcctatctcggagatattgacattaacgatcctatctaccagaacacccgcaggttcgtctggagcgaggacaatccgtatttcttcaaaggcaaggccggcgagggaatcggcggtccgcacatcggctacgactacatctggccaatgagcataatgatgaaggccttcacgtcccaggacgacaaggagatcaaatggtgcgtcgagacactgatgaagaccgacgccggcaccggctttatgcacgagtccttttataaggatgatgcgagcaagttcacccgcgcctggttcgcctggcagaacaccctcttcggtgagctcataatccacctcaccgacaccggcaagctcgacctcctcaactccatcaaggtcaagtagcattttccttcatttttgttgcccgagagtgcaagcagacaccctcgggcaacattttaccccataatcgtcgcccaagagaatcagcaagcccgacaagatcatttttacataaaaatgatgctcgccttattgtttgtcgaggaaggacttggcggcggcgagggcttttgtcgggccttcggcgaggactgtctcggaggtgaaggacttgaggattccggtcaactgaccgagttttgcctcgttcccggtctcctgccagcgggagcggaggatgcggactttctcgaagtcctggatgccttcgaccagtttggagaaacggacactgccgcggcctccagggtaaaccacgaaacagtctccggccggccaggtgcggaaacgagtgtcagtgagcggatccaaggtccagctgttgtaggcccagcggagatagccgtcgtaaccctcggcctgggcgaaccatccaagccatgcggcctcgtcaggatcggagatcacgaacatgttcggatgagcctccgcgcagcaggtgtagattgtcgttgtcaatccaagttcctttcttttggccttggcggactcagggaattcccgcttgccggaaaaagtctcgctaaaatcgacaatgtcataaatcaccggctcgtgatagcttcctgcgagagagatcttgaaagccggctcgacctttcggataaggccaaggacagcctgcatcgactccaaaggacgctcatccatcgcgatcatggtcttttcaaaccagcctttcgccttgagatgccgggcgaagtctgcgatgaaagccccccaatattcattgtactcctcacttccgggagcggcctggaaggtcgccggcgaagatgtagcctggtcgatgtagtcaaactccaacgcccatgggatcattgagtagcagttgatctgcttatcaattcctagggagaacatgaactccacccagcggtcgaagatggtgtagtcgtagagccaggtaccgtcgatgcggcggatcttggtgaccatcgagccgaacgcgtcctcggtctgaccgttccacggacggctcatgatggtggcggtgacggatttctggccggcttcggcgagcatcctcatcaccggacgcatggcctcgaaatgagcctcgctccaaagaggaacgttctcatagcgggccactgaatatggattctgccacagatcgagatgaaaagtccaatcgctatccggaggcagaatatggtctgaaacaataagttccaccggaaggctgcgggatttggcgttacttgaggacaccgtcagttttcctctgtacttccctggtttcgcattggaaggcacatttaccgtcatccagacaggctgcttccttcccgccggaatattcatagattccttgaggtcaagcacatccgcgacaagaacctcgccccattcggatttgtcctgcctctggccgcactggccgtatttggtcgtgtccaacagatccgaaaccacgaaggagacgaactggactgaaatattcccggattttatcccggatttgccgttgcttaggtcagacacagacaatgtgacatcttccagttccgtatccgatgaaataacagcctgggcgaacactttttccccacgccaggctgaatgattgaaggctttcttctggtagtccaacgaagggccgccgccgatgacacaatgcgagccggtcgaggcccattcaagcttaaaagaagattgcggctgcgcggccataagaacaggcagcgcaaccgctatcatcagggtgacaatattcttcatcctgtgtatttgtgtttgattaaagtcctaactgcttgaagaagtcgttgcccttgtcatcgacgaggatgaacgcagggaagttctccacgcggatcttccagatggcctccattccgaggtctggatattcaacgcactcgatgctcttgatgctctcgtaggagaggacagccgcagggccaccgatcgagccgaggtagaatccaccgtgcttcttgcaggcatcggtgacgacctgggtacggttgcccttggcgatcatgatcatactgccgccgtgatcctggaagagatcaacgtaagggtccatacggttggccgtggtaggtcccattgagccgcaggccattccttccggagtcttggccgggccggcgtagaagactggatgatccttgaagtactgcggtagatcctcgcctctgtcaagtctttccttcagacgggcgtgagcgatgtcacgggccacgatgatggttccgttaaggctcagacgggtggagacagggtactggctgagaagcttgcagctctcgctcataggcttgtcgaggtcaacgaccacgccttcgccctcaccggcctggcgcagggactcaggaatccactgtgtagggttatcgtcaagtttctcgatccagacaccgtccttgttgatcttcgccttgatgttgcggtcggccgagcagcttactccaaggccgatcgggcagctcgcgccgtggcgaggcagacggacgattctgacgtcatgtgcgaaatacttgcctccgaactgtgctccgagaccgatcttgcaagcctcctcaagcacctgtttctccagctcgatgtcacggaaagcgcgtccggtctcgtcaccggtcgtaggcagggagtcatagtaatgggttgacgccagctttacagtcagaaggttcttctctgccgatgtgccgccgatcacgaacgcgatgtggtaaggagggcaagccgccgttccgagagtcttcatcttctccacaaggaaaggcacgagagtgccaggattgaggacagccttggtcatctgatagaggtaggtcttgttggccgagccgccacccttcactacgcagaggaacttatattccataccctcctcagcctcgatgtcgatctgggccgggaggttgcacttcgtgttgatttccttgtacatatccagaggagcgttctggctgtagcgaagattctcctcggtgtaagtcttgtagacacccttcgagagagcctcggcgtcatcgaagccggtccagacctgctgtcccttttctccgtggataatcgctgtacctgtgtcctggcagaaaggcaatttgcctttggcggacacctcggcgttgcgcaggaagcgcagagccacgtatttgtcattgtcggaagcctccggatcgctcaggatcttggcgacctgctggttgtgtgccggcctcagaaggaagttcacatccctgaaagcggcgttcgcaagcatagtcaaagcctcaggagccaccttaaggataggatgcccctcgaactcgccaagggacacgccctcgctcgtcagcttgtagtactcagttgtgtccggtcccagctggaacatcggagcgtatttgaattctgccatattaatgaaatatttttagtgattatcagtcaatgtcttcaatcggagcagtggtgccgccggagccttcctgcatcaggtagcgcttcataaactcgttcaggtcgccgtcaagcacgccttgggtgtcggcggtggaatagccggtcctcaggtccttgaccatcttgtacggatgaaggacgtaggagcggatctgcgagccccactcgatcttctttttcgtgccttcgatctcggcctgcttctcctgacgcttcttcagctcaaggtcatagagccttgaccggaggatgcggagggcgttctgcctgttgtcctgctggaagcgggactccgtgttctccactactatccctgaagggatatgccgcacgcggactccggtctcgaccttgttgacgttctggccgccgtggccaccggaacggaacgtgtcccattccaagtccgaagggtttatctcgatgttgatcgtgtcatcgaccaaaggatagacgaaaacggacgagaatgtggtctggcgcttgccctgggcgttgaacggagaaaggcgcacgagtctgtgcacaccattctcagccttgagatagccgtaggcatagtcgccctcgacctggatcgtggccgactttattcccgcctcgtcaccttcaagaaggtcagtgacagtcactttgtaaccgttcctctcgccccagcgcatatacatcctcatcagcatcgaactccagtcgttcgcctcggtgccgcccgctccggaatttatcgtcagcacggctccaaggttgtccccttccgcgcccaacatattcctaagctccaacgcctcgacatcctcaaccgcctttgaatatgactcgtcgagttcctgcgtctccgctgtggtgactgtctcgtcggtgcttccgcccagactttccttggcaaaatcgtacagaacatccagatcatccacctcggtggaagccttgtcgaatcctgtgacccaagactttacaccgttcaggttcttcatgaacacctcggctgccttagggtcgttccaaaagtccggcgactccgtcttcttctgcaatgcggctacctgtccacgtttcccagggatgtcaaagacacctccccaacgtctccaaccgctgatgcagagcctcaatctgatcctttaatatcatttgctctccatttttaaattgttcctacaaatttagtgaatttatctctgattcgcatcttatccataatgtgttttcttggatcaagggtaaagcatggattcacatatatcttttcgcgaggtggtggagaacgccattgacaccccagattgccatctccaaagacattttggtctctaaacgccaccgaaagtctctacgcgtccattttcggagacgttttcgccataaagcgatgccttcgcgaccatcatttcacctctaagaacatttcaaacaaatcaaaacaacttctttgtgttttcgaggatagatgtcttttggaagaaggagtgtgccggtggcacatgactgatgaggaaagatagccagaccgaaaagacaatcaaagataaccaagttgttttttaaggattacttaatacaaggttttggacttaatcctgaatccttggcctatagaaaacctgttaagaaaaagacgagaagcatatgctccccgccttaagtgttttcacaacggaataatccttattgtgaattgcttcagatgttgcaaatttagcgaaaagatgcgaatatccaaataattattctaaattagcggataaagactaataagcctcgagttcaaccacgttataataacacgttataaataatatacctcgtatgaaaaccattcttggattagacctcggaactaccagcataggctgggcgctggtaaaggaagcagagccattctctgacgagaaatcagagattgtcagactcggtgtacgtgtcattccccttacagtggatgaaagaacgagttttgaaaatggcaaaagcattaccacaaatgcccttaggactcaaaaacgtggaatgcgacgaaatctccaaaggtataaactaagaaggcaggccttgatcgaagaactgaaaagtacaggatggattggtgatgacttcatattttcagagaccggtccagggtcaactttccgtacgttacggcttagggctaagtccgcatcggaagaggttactcttggcgacctggctagaatattactacagataaataagaagaggggctacaagagttcccgaaagatggtttcaagcgatgacggccaggccattgacggaatggccgtcgccaaggagatgtacgacaaaggattgactccgggggaatatgtctaccagcgtatgctcgaaggcaagtacgctattccagagttctataaatcagacttgcaggaggagtttgacaggatatgggcactccagaaatcctttcatactgaattaaccgatgaactttacaggaagctgtctgacaggaacaagagccagacctgggcgatctgccgtgacgaactgggcattcaagggctgaaaagtagtttcaccgggaaagaaaggctaaaagaagcttaccgctacaggcatttggctgccacacaggaagttaatatggaagtcctgacctgtgccctacaagaaatcaacggccagaaagcctccctcagtggcctcctgagcaagattagcgatagaagtaaagaactatatctcaacaatttgaccgttggtcagatgctattgaaaagaattgaggataatcctaacaatagcctgaaaaacattgtgttctacaggcaggactatcttgatgagtttgaaagaatctggacggtacagtcgaaatatcacaccgaacttacccatgaactgaaaaagagacttcgggacataatcatcttttaccaacgtccgctaaagagtcagaaagggcttatcagtctctgtgagctcgaaaccaaagatattgaggtcgccattgatggcgtgaagaagatgaaaaacatcgggccacgagtatgtccgcgttcctctcctttgttccaggaattcaagatctggcagacaatcaacaacatcttcgtcaacggagccgcccttgatgacgaagacaagtccgtcatcgcaaaagagttgatgttcaaggacaaactcaaagacagcgatctcctcaaactgctgttcaagaccacaaagggacagagtgtcaatttcaaggaagttgacggcaaccgcacaatggcgaccttgatgaaggcatgcttcaagattgccgagaacttgggatatgacgacattgatctctccaaactctcttctgaagaccaaatggtcaggattgagggaatattcaaagagcagggattcaagacaggttttctccatttcgattcctctctggcctccccggaatttgagaatcaggactcctacagactgtggcatctgctatattcctacgaaggtgataagtccgcaagcgggaatgagtcgctcgtgaaatgcataatggacttgtgttcaatggatgagggatcggcaaagatacttgcctcttgcacattcctccccgactatggtagtctaagtgcgaaggcgatgaggaagatcctgccatatatgaaagatggtcttgaatatactgcagcctgcgcgatggccggttaccgtcactcaaagcgctcgctgaccaaagaagagcttgacactaaggaatattccgaccgcctctcccttttgccgaagaatagcctccgtaacccagtggttgagaaaatcctcaaccaaatgatcaatgttgtgaattccgtcatagatgtctatggcaagcctgacgaaatccgcatcgaaatggccagagaactgaaaaagagtgcaaaagaaagagaggaggcacaaagggatattgcatcctcgactgcggaaagccagaaagtaattgagatactaaaaggcgagcctttcttcatccagtttccgacacgtaacgacatcatccgttaccgcctgtaccaggaactggcacagaacgggttcaagactctttatagcaacacttatattcctaaggacaagttgttctccaaagaatttgacattgagcatataatcccgcaagctctcatattcaatgactcctttgccaacaagacacttgaatcaagacagtgtaatcttgagaaaggaaaggagacggcaatggattatgtcaaatcgaaatatgatgagaccggagtccaggcatactgcgatagggtcaatggcctgattggcaagggaatttccaagacgaaggccaaatggctgctgatggagggcaaggatattccggaagatttcatcaacagagaacttcgtgacagtcagtatattgcaaagaaagcaagggagattcttgagtcacttgtcaaattcgttgtcccgacaacaggatctgtgacggcaaggctccgtgaagactggcagcttgtgaatgtgatgcaggagctgaactgggagaaatatgcccggttggggctcaccggtgtcagagaagacaaggacggacgcagaattccgttcatccaagactggacaaaacggaatgaccatcgccatcatgcgatggatgcgttgaccatcgctttcacacgccgtcagttcatccagtatctcaatcacttaaactcaaaaattgacgttgtctcctgggacaagaaggatctggatcttagggattatgaccttgaagacatcaagttcggtaatctaagcgccggagacaggtacggcattgtcaaggctttgcaggacaagttcctttacaaggacggcaacgataagtaccgctttgtcccgccgattcctttggatgagttccggagacaagcgaaagaacaattgagcgacattctcatctccttcaaggcaaagaacaaggtctgcacaagaaacgtcaatgtgacaaagaacaagggaggggcaaacaggaagactcaacttacacctcggggaccgttgcacaatgaaaccatctatgggagcagtctggaatatgtgaccaaagaaaatgagaagatcggtagttcgtttgacaccgaaaggattacgactgtctgcaagaaaaagttcagggatgcccttgcgcgaagactggaagagtttgggggagaccccaagaaggcttttaccggcaagaattcgcctgaaaagaatccgatatgggttgatgaacatcattcggagcaggttccggccaaagtgaggacagtgactatggaacagcggttcactggccgaaagcctattgacgctactctgaagatagagaaagtcattgataaaaggattcgtgagattcttcaggctcgtcttgacgaatttgacggcaaggcggcaaaggctttctcgaatcttgacgagaatccgatttggctcaacaaggagaagggaatcgcgatcaagagggtgactgtgtccggtcctgcgaatccggttcccgtccggttcaagagggacaaggatggcaagccaatcattgatgatgccggtaaaacaataggggctgattttgtgactcctggcaacaatcatcacattgccatattcagagattcttcaggaaaattgcaggagcatccggtatcttttcttgaggcgaccatcgccaaatctcatgggttagacgtgattgaccggaactacaataaagatgaaggctgggaattcttgttcaccctgaaacagaatgagtattttgtcttcccgaattcagagacggggttcaatccgttggattatgatttgactgatcctaggaattatgcggagattagtccgaatttgtatagggttcaaagtatttctactaacgactattttttcagacatcatcttgagaccacaagcgaaaagaataattctctgtatggaatcacttggaaacgtattaggaatgcatccgctcttgagggtctcgtcaaggtccgcatagacaatctcggtagaatcgtagccgtcggggaatatgattaagcgcacactctatttcggaaatcctgcctacttgtcactgaaattaggtcagcttgtggtctacaaaccggcctccggtgaggaaaagaaggaagtagttaagactattccggttgaggacatcgcatcggtagtgcttgacaacaaacagatcacaattacgcaggctttattggagagtcttcttaaagagaattgcgcggtcataacctgcgattcctcccatcttccgaccgggctgatgctacctcttgacggacacacgctccagaacgaacgtttccgctcgcagattgacgcttcgcttccgctgaagaagcagatatggcagcagactatccaatccaaaattgtcaatcaagcagcggtccttgaatatgccacaggcgaaaagcatccgaatatgcttaaatgggcgacttgtgtgcgcagcggggatcctgataatcttgaagcacgagcagcggcatactactggaagaatcttttctctgacaatatcagaggtttcattcgagggcgggacgaagatgccccgaataacctcctgaattacggctatgccattgtccgcgctactgtagccagagctttggtttgcagcggcctgttaccgaccttgggtgtccatcacagaaacaagtataatgcttattgtctggctgatgacattatggagccatatcgcccgtatgttgatttacttgtctatcagatagtgaaagaggaaggtccgttggagttaaacacatctatgaaggcaaggcttttgtccatcccgatgactgatgtcagaatcaatggggtgacaagtccgctgatgatagcggcgactaccacttccgcatcattggctaaatgcttctgcggagaatccaagcaggtcatgtatccgatcttgcaatgactagctcagaacggataagtcagtatcgtgttatgtgggttatggtgttttttgatctgcctaccgacacaaagaaggaggttaaagctgcgacggagttccgcaagcagttgatgagcgacggcttcgtaatgttccagtattccatctatcttcgtcactgtgcaagtgcggagaatgcggatgtccacataaagagggcaaagtctttccttccgcccaaagggaaagttggaattctccgcataaccgacaagcagttcgccgcaatggaactcttcaactcgcagaaatcagaaagtcttccagaagaaggcatccagttggaattgttctgaaaacccgcacgcccaaatcaaaaaatccggcaaaagccggattttttgattcttgaacacctatcgtaagtcgttgtacctcatcgttctacacaaatcctattgtgttcaaagaacgaatatacaaaatctgaaagcaattcacaactacaaagatattttcacggtgtacgaaagcattgtgttcaaagaacgaatatacaaaatctgaaagcaattcacaacgtagtagcggctgaatgacacgggcgggggattgtgttcaaagaacgaatatacaaaatctgaaagcaattcacaacccttgagcccctttgcgctgaaattgattgattgtgttcaaagaacgaatatacaaaatctgaaagcaattcacaactggtcactctcttcgtgtgccaacacaaaaattgtgttcaaagaacgaatatacaaaatctgaaagcaattcacaacgaacaggtacgccaatatgattgcggccaggcggcgggtgcatgtgtagtggctgcggagcctccctcttctggaatgggttgactatctcgttaaggtcttaccacgagactacgaggctgtcataggcctaatctgcgtctatcatcaggaacgctttgtcagcatcactttcagtcccgactaccgccggatcagacgcgatccggacactccggaggaattggctaggattttcaggaaagattgaaaaagagttaattatttgaaattaactgttgaaaaatttgaatactgttagaattaatactatctttgccccagttaaagaaatgaagcatgaagtacaacgaattaatgagacaactgaaaaaggctgggtgttacgacacgggacgacagcagagcggacaccctctctggttcagtccaagaacaaacaaggtgttcaaggtcagcaatcacgggactgacgaagtggcaactgggacattggcacaaatcaaaaaggcagcgggaatttaattcccactgtcttacaataaaaatagagacagttatgagaaaggttaacgcaattattgaaaaggcatcagacggtaattacagcatctatatggatgacaatgatatgccttatcttgtcaccggaacagggaagactgtggaagaggcacgcaaagtgtttgaggatggttacgaggacatcaagaaatactatgctgaaactggagaaccattcgaagaggttgagttctgctaccagtacgacattccttccttccttcaggagtatgcatatctcatcacgctttcgggacttgaaaaaatcaccggtgtcaaccagaaacaactcggacactacatcagcggctacaggcatccgtccgccaagacagccaagaaaatcgaggacggaatcagaagattaggacaaacattttcgtctgtcaaattcgcttgattgcaatcggccttcgggccaagcgagtacttcatttcattttctttgacagacaggcggccaggcatcacccaaatgcctggcttttttaccctataaataaacgtacaatttctattgataaatcttgtaattattagaaatattactaccttcgcaataccaaacaatatgcgatacgaagtatgatgaatttcacgaccttgttaatgggaacggctgggaaaggctaaggcagtctggaagccacgtgatctacagaaagggaagccggacttacccagttccctaccacaaagggaaagagttaggcaaggggcttgaaaacaagatgaaaaaggatatggggctgaaataagccccatatcacaacgataaaagaattgagttatggttatagaagcggttatcgaaagagctacggacggaactttcaacgtctattgcagcaaggaaatattctctggagccggcgacaccatcgaggaagccaaggccgatatgatgcagcagatcaagttctacaaggagactgcgatcgcggagggattcaagtaccccgcctttcttgacggggaatattccttctcctacaagattgacgcggtctcgttgatgcagtactatgtcaattcgggtattctctcattggccggcctcgaaaaactaacaggcatcaaccaaaagcagctttggggatacatcaacggaaccaagccacggaaggctcaggaggaaagaatcgaatccggattccgggcgttggacaaagacctgaacgctatattcgcgtaattgtttggtagcattacttagtatggtgcggccctgggagcttcttccagggcttttcttttgggtaagggccaatgaagagggttaatcttcgtccgcccttacgatttttattggagggaagtgggtataacggggattttaaggggcaatggcggaagatccgtcctgatgaggatgcctctcggagcgccgtggtcaagaggggtgaggtcgatggcctttgaatatgaacgggtcacagacgcggacttaggataggtcttgccggcggcctgaagggcggcgcggagcatcgtctcgttctcgtctcccaactggtagccgtccaacggattgtccttcgcctccaaatccaccggaatgccgtccgggatggaggcattgttgccgttgcagtcagcgaacttgctgatcatcacgtacattccccaatcctggatcagtgaataatcatacctgctgctgtagaattgatccggagccaacaagattccggcgcaatacttcccataggtccgttgaccgacaagctcaacatccatataaggcttcagacctacaatcaacccttccgaagccgaggccgtgccaccggtcacgatgacataaaccttggatattcccggattggcgtccgacacatctattttcaacttctgcgaactgatttcatgaactgttgagaaataagtgttagtgtcctccccttgcttcttccaggcctcggcgagaatggaattatacacctctgtctggaatatatccccggccaggacatttgccatcggtgctatcatcgatgccaacacattctcggtgaaagcgtagccaccgccgttatacctcaaatcaaggataagttcatcaatattctcggacttgaagcgtctgaacacatccggcagcgtctgagaggaattgaggtcaaacgcggaataggccagatagccgattttctttcccgcgacatcgaacgtcttgtccaccagaacaggatcctcgtacatatccaccgccttcaggctcacagtcctgacatcaccactgatgttgccgttcccatccaggccagcaactcccaaatttattgaatatgaattgaaagcatcataaatattttcctctgttatagccttgccgtcaagagtgatgattatgtcacctcgcctaagtcccgccttatgggcaggtccaccgttgctgacacagctcaccacaaggaaatattccccaggcttgttggtaatcctccctgcctgaagatcatacccgtaagtgatcccaagcccttgcacagaattctggaatgacttgaggtcatccgtcaggacagtccaacggtccacttccttgcctccctcatgatagcgaatgcctttcaccacttccatcggtattctgcaagtgtccggatccagcctcgccaaatccttttcaatctcctcattccaaaggtaatacgtttccagcacatcgatcgcgtactgatccgccttcgcgatttcatgcgtgggagcattttctctcttatccgcatcagtctccacgcagcccgaaagccacagcatcaccgcggcaagcaccactgcggtcccgcacatattccatgtcttcatattcattgtcattcagaataatctaacgtttcagatcatgccactacattggacactacagtacaaagatattcaattttatttctctttcgtttctttgttgtatctttgattcaataatttgacttttcggtgatgatcgggatttttgattcggggtcgggcgggctgtccgtgctgcgggaggtgctgaagcttcttccgggggaaaagtttgtctattacgcggacaacgccaactgcccgtacggagaaaagactcctgagttcatccaaagccgatgcagagcgatcactgaatatctcctctcgcggggagcgcgaatcatcgtggtggcgtgcaacactgccacagcggcggcgatcaccactttaagaaatgaatatcccgtcaaattcatcggaatggagccggcggtgaagccggccgcgctcagttctaagacaggagtgatcggtgtgctggcgacggcaggaacgctgaaagggtccaaatacctgaccaccaaggggatctacgaggatgacgtagagattgtcgagcacgtggggcaagggtttgtggagttggtggagaatgggattctggacggagcacaggcggaggagacggtgcggaagagcctccgaccgctgctggatgcgggtgcggacaggattgtgctggggtgtacgcactatccgttcctgaggaatgtcatccagaggattgcggggcctgatgtgcagatcatcgatccggcaccggcggtggccaagcatctgattgaggtgatgaaagaggaagggctgctcgcctcggacgatgtggcttcgacaggctcggtgccccatcctgacatcgaactcgtcacttccggtgacaacacctcagccaaacggattctcagcatggttcttgaagagaacaaggtccgccaaggcaaacaataaccctccggctatcagacaacagaaaaaatggctccggccaaaacatctaaagatatggaatcaaacaacggaatcgaggtcaaagacttcgcctactgttcagacaagtaccagtacacgatgggcaaatccttctacgagacaggcagaaaggatgtcatcgccgtcttcaatatgttctacagaaaagccccggagaacaacaactgggcggtcgtgagcggcatcgaggaagccatagaatgcatccggaacatcggcaaggccgaaccggaattttacgagaagttccttccgggtgatgaatatgccgaattccgcaagtacctgtcaacgttgaggttcacaggcaatgtctatgcgatgcgcgagggcgagatcgctttcccgaaccaaccgatcatcacagtggaggctccgctgatcgaagcccagatccttgagactcccctcctctgcataatgaaccaccagatggccgtggccacaaaggcctcaagggtctgccgcgccaccaaccgtcctgtcagcgagttcggatcacggcgcgctcacggcccgtgggctgccacttacggagcgaaggccgcgatcatagccggatgcgccagcacctcaaatatcctgaccggagtcctcaacggagtgccttccaccggcacgatggcccacagcttcgtcacctcctacggcagcacagtcgaaggcgagcacaaagccttcgtggactacatcaacacccaccgaggcgagaacctcatcctgctcatagacacctacgacacccttaaatgcggcattctgaacgcgatacgctctttcaaggaatgcggcatcgacaatgaatatcccaacggctacggcgtgcgccttgacagtggcgacctcgcctatctctcagtcaaagtccgcaggatccttgacaaccacggacttacgggctgcaagatcttcgccaccaactcccttgacgaatatctcatctcggatcttgagcgccagggagcctgcatagactcctacggagtcggtgacgccatcgccaccagcaaggccgccccatgcttcggcaacgtgtacaaactcgtccagatagacggccgtccggtcctgaaacgttccgaggagagaatcaaactgatcaacccgggattccagatcacctacagaatcacgaagaaagaccctgatctcggtgacatctacaaagccgacgtgacctgtctgcgaggagacaccctctcccaaaggatcgaggccggcgagaccttcaccatctacgacgagcaggaccgctacaagtacaagatattccagtccggtgaatattcctggaggccacttcagcatcaggtgatcaaggacggtgagagatgcgccgaaagccacaccctgcaagagaaaaaggccttctacaacaacaccttgtcacatttcagtccgtccgagagacgcctcatcaacccgcactactacaaggttgacatctcagacgacctcctgaacaccaaactcgagatcctcgacaccctcaacaaagagatcgaggcgttcagcattgactgatggcccagccattgtgtcctcgacgaccagaacaccaccctcgagaccaggctggcggccattgaggccgccgtcaagggaatgcctgactacggcagcaagttcgatctcatcgtggcgtccctcgacgcgatcaaggggcaggccgaggctctcggcaccgaccaggccggcatcgcctcgaagatagccggcgtgaccgacgccatcaacgacctcgtcgacgaagtgaacagcggcaacaccagcgccgccggacacaggacatgacaaagagagggtgactaaagtcgaaagactgatagccaccctcttttgcgtaccgtaagcggattgtcggtactacttagtaacatgaaaaaacaagttgcctcagataaaattattgaggatagatctattttccaaggccactaagcaatcctaaatagtaccaagctgattttaggcttacttagaacatgaagccgaacgagacgttgatgagatttaagctggtgcggtcggcgaggttggtcagggacgggtggtaggcgaattccaggaagtacctgttgtagacggccttgacgcctaactgggcgcagagctggaagcggttggcggcggagtcgccgttgtctgacttgaaccagtcgctggtgacgccctcgtacttgctttgacccaggatgtgcgctgtcaggttgaggccggcgaacgggagaagctggatctgcccgaggtcgagctggtacatcaaactgaccggaacaatcgcggagacgagtgtggaattatggtcgccgaacaccgccatcgcatccacaccatattcatagaagaaaggcaactcgccggggagcggtctcgccggggagacacctatggagaggccgttcatgttttccgtgacaggcaatctgcccgatttcatctcgatcgcggcatttgaataggacaccttgaagaaagttgctgtgcggaaattgtcccgcagatggtcattgcggcgatgaccgcaagtagtttgatgtgcttcataaaactgtttgtatttaatgtcaaaattatgataagtcagccacttcccttccgattctgcctgtgggcgggcaaaagggagcggatgctacaaataaaagaattatttcgggcttggcagcatggtatagagaatgtttcgacaatgaaacccgaaaagatgagggcatatcttagctgcagcccgaaaaggattttccctatccggatttttcacgttacaaaaatccggatagggaaaatccttttcgggtctcacactaaggtgagtactacttgctcagttcggaggcgtgggagaggagatattcctcagcctcgatgttccatagtccgttgtgagccttgcagaggcggtcgagctcggcatagacagggttggtcacgcctttctcctcgaaatcggcgatggcggtcagcggcatctccacgtgggtgtagatcaacttcttgccacctttgatcgaaggaaggttcagggtggtttcagggaccacattgaggcctccgatgtgggtcacgagaccggctgggtcaagaccttcgcccatcatcttgagggcttccttcatgtcctcggtgttgccgccgctggtgccgaccacatgggtggaggcatagtggacattgtagaagttgaacggagccttgaaatcggaacggccaggaccggagaagaaattcaggcagccatcctgtccgaggatgtcgtctccctgctcgacaacagcgggaacgggtgccatcacgatgacctcatcatagccggttccgccggaaatctcgcgcagcgtctctacaggattctcgacagtgccggtgttcacataacggagatcgatgccacgggaagcggcgaactccttggtatagagcgtcgcggcacggtcaagacgggcctgatcgatgtccgtcaccacgaaaagggacggctttctgtcctcacggcgaagcacatagttgatcatcgcgagtcccatcgggccgacaccagccagaagtgccatcttgccaccgtccttgatctccatctggtgaacatacgagcccggatgggtgtgatagcaggcgtgcatcgcgccgatcacgcaagccagaggctcgctcaatgatgccggatagaatcccggaccattgtaatgaaggaggcagcccatctccatcacatcggaagggatgatgatgtaggtggcgtcacctccggcgtagcgataggaatatccaggcgcggacagcagaccggctgggccgccctcgtagttaagggccggctggattgagaacttgtccccaggcttgaattgatccttccacttggagccgacctctatgatctcgccggcgaactcgtggccgatgatcgtaggattttcggcgatgtcgtccgggactctcttgt

SEQ ID NO: 2192 - DNA, 24197 bp, synthetic construct
  source 1..24197: mol_type = other DNA
  misc_feature 1..24197: note = Synthetic
aaggcaaaaacagataaaataagaataagattttttcgtggaaaataaataaggtaagactgtgaattccaaaaaaagtgagaataggaaatttatacgacttaaataaagaaaagaaataacataagaacatacacaatgggaatgttataagaataaaaggagccacataaattccatattgttcaaaatagggagtataataataaaaataataaagaaagcttactcctgctattagacttaatgcacataaaactattgtaaatttgtttaattcatattccttatttctaattaagaaatcggctaaccaaaatcctattacataatgaggaattctaaaagttaaattataaagataatcataattcccattagtagaatagctaaaaacatatgctgctataatagcaaatatagtagtaacattcttgttaattttaaaaaatttataatataatggcgttaccaaatataaaaatataagtgccggtatataccaatcgtatatttttcctaaacccacatttctccagtagcctaaggtagttaaattataaaataatgaatctgtattccaaattcccaattttatcgctataatagttactattataacaattggatagtaataaggtaatatacgtaacgctctttttttataaaaatgtcttattgaatcatcattatggattgaaaaatagactccaaaaccggatactaatataaaaatatccacccctccataacctatacgcttaaagaattcaaaaaatgttgatgtacctacctgcacatgcgaatggaaaaacatgacccataaaatggcaacacccatcaataaagttctatacttactaagcaaatttaatttcataatatttattttagtttattttgattgagtttaaccattctatatatgcttttgcatttttcatatgttcttccggttttgaagtaaaggcatgtctgccggtatttctaatagcgcacatatataaatattcagttttagccggatttaaaacggcatcgattacaaaatcattaggaatacaaataggtaaaggaggtaagcctttatacttataggtattatatggagaatcaatagatacattttttactctcttgatttgaaccttaaaaccatatacctttctttctgcatactgaacggtaggatccgattgtaatttcatattttcttttaaacgattaagatataagctggcaatgatgggcaattcttctttatttacatattccctttgaactatggaagctaaggtataaacttctaaaatagacaaccctaagttatcggcttctgcctttcttttttcattccaaaaacggttatgaatagtttcaaatcttgaaaataatagttccggcgaagtattccagtccatataataggtttccggagtgaaatatattttcagttcttctacatcattatatccttttaatgatgcttgttttttaaaataatttataaaatgtaaagaatcgtcctctaaatttttacctaagtcggaagccaattcataaatgtcatcatatgatttaattcttaaatgaacttcatcttgtttgcccaataataaacgtctgattaaatctttattattttctcctacatttaatttatatctcccggcttttattttattcggatatttttcggcataagctactttgtcaaaagattcaatgtctttaagataaggagcgatcattttttttacctgatggtaactagctcgagttggaatatatataagcttttcctgtataacatttgagctgtaatattttttgtaataaggaacgcctacaataattaatcccaacgaaaataataaaaacaaaattattatgacaataattatttttttcatattcgattacttggttcgataaacatccaatatggattgaacgctgcaaaaatacatatctttatttaatttgtataatataaactcgggtttttatatatttgttagtaacttcaagtttaaaaaaatatgattttaggtttattaggaaaaaatatttcttattctttttccaaaaattatttcacggaaaaatttaaactacagggattaaaagatttttcctataaaatatttgatattccttccaaaaatgatatttcaaaactttttaacacgccagatttactcggttttaatgttaccattccttataaaaaagatatactagattttctagatgaattaagtcctgaggctgaaaaaattggggctgttaatacggttaaaattaaaggtaaaaaaaggattggttataataccgatgcaatcggttttaaaaactcattagttcatttattaaaacctcatcaccaatcggctttaattctcggtaacggtggagcttcacaagcggtcgcttatattttacaccatctttccataccttatacaatcatctcccgaaacggaataaatacttatagctcattaacccaagaaataatttcatctcacaatttaattataaatacaacaccggtaggaacttatcctaatatagatgattgtccccctgtacccactcatttttttacccctgaacatttaatttatgatttgatatacaatccggaagaaactaaattgttacaactgggaaaaaaagcaggttcacaaactaaaaatggattggaaatgctccatttacaagctgatcatgcctggaatatctggtatgaaaataagtaactaaaaaattattttctgtcaaataacgttccggaagcttgagctttcggaaatatggtcacatccgcaatttgtacatgatcaggtcttgatactgcataatagatagcgtccgctatatcttctgcgactaaaggctcaaatccctgatatacagcatctgcccttttttggtctcctttaaatcgaaccaaggaaaattcagtttcaacagcacccggagcaatattggtaacctttatcccttgagttaacaaatccattctcattcctttactgattgcttccacggcatgtttggtagcacaatataccgttccttttggataagtttcctttcctgcaatagaacttatgtttattatatgtcctcttttgttggcaactaaaataggaacgacggctttggatacatacagaagtcctttaacattcgaatcgatcatcgaatcaaaatcatcaattgaagaatccaaaaatgtgtctaatccatgggcatttcctgcacaatttactaatatatttatatctttcttattttgatccgacaaactttctattgcagaaaataccgcttctctatttccaacatcaaatgaaagagtggttattttcactttatcttccaatgctttttttatatcgtccaatctactttttcttcttccacagagtataagattgattccattttcagcgaatattttcgccgtagcttgacctatacctgaagtagcccctgtaattaaagctgttttttgcatatactatttttaaagaatttacctactaaatatacaaaattattccaattaaaatagtttataaaaaacagtttgtatattatttgactttattcaaaattcggaaaattctcaaccaattcaatatcatcaactctaaaacctctatcattacttgccgcttcactaatcaattctaaggttgaaatttcttttaaaatttcatccggaattctgatcattacgcctttatatttgtttctattgttgaaggcattgagttcaatatcgggtaatgtcagctctttctcattaaatctaatccttagcttgtttgtattagaaatttcatctgagttataaatgtttgcattgaaattatatctcaaggctatattttttcggtttcctaatggaatatgacttatgattaaagacgattctttgtttgccgggaaccatataaaaaattctttcttggcaatttcactggtcccgtttaattttcttatatcagccagtttaaatgaatccgaataaactgctcctactgcttctccatcaaaattagtaaccgcagatattttaggccatggacttgaaataattaatcctcccttgactttagttaccttattaaaagtttctttaaaaaatccgcttggaggaattgggggcgttgagtagtcatcattatcaacacaggagataagaaatcccttaaccactaatccaattattataagtgaatatatgtattttaatttcatcatttcaataattaatcttccaattgtatcgtatcaatcctaattccttttttatttttacttgctgatccaaaaaattcaattttttgagtatcatccggaataggaattcgcacagtataaaatgtatttttattattgcttttatctaaagcaatatggggcagctctacttcaaaatcattacatttaactattagatcatccacaaagccgatatccaatgaatcaaaaatgcctacattaagtttaaaggataaaatcatttgtttatgacctgatgtattgatatggtctataattaatgaagcattagtatttgccggaaaccaaactaaaggggaaggaaatgaagttccagaagtcctaatatctgcttttccataaggatcactataggtgaccgattgagaattatcaaaaccgattgcattatttattttaggtcttacggatacatttgaaaccttattaaaagtttcaataaaaaaaggttgagtaagtggaaaatttttgacatcttctatagttctcaggttcaatctataggttttatacatcccatcatatcgggtcataattcctctcaatttaccctctccatagggaattttatatcccgcaaaagaagcataattacttataggtacagtaaaataattgagatttatattatttacctgattgtcagtgcttgaattgtttcttacaaatgtcttacccggttcattaaattctactctgctaatttcaaccaaggtacacaaatatgtttcgttattattgacctctttagccgttaataatttaccggctgaatttcttttaataaccaattcttcttcatttttttgatctttacccaacataatattcgatttcataattgaaggagatatttgatcgacgatatatttttccggctgtgtaggaagcataccaatctgaaccataccgttttgctttccataataaagattatctaatttaatgtatagtttagacccaagcggataataagtatataagctggatttattaatgctgagtacaatcccttgagttccgtcttcagtaactaaaaataaatttttataaatatttccggcatgatctgatgaaataacatagccctctaaaatttcgccatttgtaaaagcctgtgcttctataccattttttccggtaaatacaggagctgtttttaaaagatcggaaatgtatacagttgcttgcattagccgaccttgatttactgaaggatttttataatcatcatcatgtacacaagccaagagaaaccaagatataaatataaatagtacactatttttaatcattttttcaattttaaaatttatcgtttatttcagcattaatttaaaatctaaaagaaacgtttatgaaatacgatctgcctctatcgtaaaaaagcttattgccaaaaagcggataggccaacgatttatctttttccaattgttcataactggaatatcttccttgctcaaatgatccggtaacataacctctttcatttaaaatattatttaccgaagcacttaaactcaaggaatacttacccattttaagagatttacccaaagaagcatttaacataaaaacatcttgaaattgcttctgttttactatagatttaacattttcttgagtagctccctcataaggaaaagcatcatctttcattataaaatttttggttcttgatagagaagatatattcgaataattatcttgtaagaaattaccactaactcctacccaccaatagttaggcgaatcatatttaataccaactacatatgctttttgtggagttccggaaatcttataatttttaatgaaagaagatccgtaatcatgtacacccggtgaattatcactaagtatgtacaaattaggattatttttatatgtaaattgccctacagatgctattccggagaggattaaagatggtgttaatttccattccaatcctatttcagaacccaaatattctttttcaacacctgctaaaacttctgaaacaaacgcgtcttcactttcatctaaactaactcctttagcataataacgtgttatttctaccgcatcttttatctttgtatagtatccggtaatcctggctttcacagaaggagactttaaaatatatgttaaatcattagtatttattctttgattagatatatgaggtgttatatcattatttaatcgggaattcacaaaaatttcatttaaagttggtgaagactcaaaataggcggagtttactataacgaaatttcttccattaatcttataagttattcctgttctaagacccaattctgtaaaattggctttattagattttccgcacgaattattcggatataatccgtgtttaaattttccgtttctataggcttcatcccagccgaataataatgatactgccatctcccaatggcttaacgttactcttgaggtagcatttcccgttatttcctgcctgaacattcggtaatcatattccgttttctcgcctttccttgctacactacccggttttaagctgttataatcatcggtagatgaaccggaaccatcaccctttataaatgaacttttatttacgacaaaatctgctcccaataaatcatttacctctctataattatctgaaactaaattttgataatttaaattgagaaataatttccaattatcgctcaaaaaagtctgcaaatgagtggcagcattaaaggttttatctttataaacatcatccaccaggaaataggaagcccttctgcctatttgcccgctgtagggatcttgatatgttggagcatgataatttgtattatataaatatccccaatcgagttgagtcacgttgagatcattagtcttccaagcatgaagaaaattttcatattccgtcatattttcctgactaagccagtaactaggtaaatttttataataagttggagttggattatcagcttcatacctatttagacgggaacttttattatatccaaattgatatgaggctgtagttgttatctttgatttatcgcttaaattccagtaatgagttaacataaatatcggctcaaaaattctttttaccctttcatttcttttatctccatcttgccagccccaatatgaattataattcttacctcttaggtcatatacttcttgtgtattaggactcattcctgtttttcttgtaggagcaccgaatgcagtaagatttagtctgtggttatcattaatttttttctcaagagatgcgaagtacgcatatgaattgttataggtcccatcaattactccttcttccatccatcttctggaacctgaaaaagtgaaagcccatcccgatggtagcattcccgaggaatacgttgtcatgattctatgttgatacgtacgatttgaaaaagaataggttagctgaaatcctttcctgtaagaagaagaacgtgtatcgtaataagttgttcctcccaaattgctgaaagaataatcagagatggtattattttccgctaattcgtaaggatatttaacaacattatttaaaccaccccaatttccaaaatcaggttttcctgtatgatttttagacatcggaataccattaaacataatatttgcataactgttatcaattccccttactttgaaccagtaagatcctaattcaaaagaggcggttttagaaaatacatctttagatgattgtaataacccaattccgctcatagattgagaactctcttcatccggcgaaaaatcatcttccatcaaagtcaataaaccttcatcctcttgagaaggattatattctaattttattactcctaaatctttcctcgtttctttaggaaaaacttttaccgttagagttaaaggcacatagcctactttattaatgatgattagataagttcctgcagctacatctttaaattgaaaatatcctaccctatcggatttggattgtatcaaacgatcttcacctaagctaacgacagcctggtctaaaggtttatcttgacctcctttgagataaccatagatcatagtttgcgcaaatattacctgatttacaaaaagtatccaatacaataacttaaatttcatcatcttttagtaatttcaagaagcctattgaagcaaatataattatttatttttagttttgttaatataaaaaaaacggatctatgcgtatatttttaaaaaatatatttgtttttatttttttattacttgataatacccccattgaagcacaaatacgatataaatcagcaaccgtcatgttttataacgtagaaaatctctatgacaccattccatctgctgatcttattaacggcaccctggatcctaacgatccaaagtatcaaataagcgtatccgaagatgaagctttacaatccggatatgaggtgtaccgagatgaactatccttcaataaactaaaaggaaaaaaagtagtcagaaagcatattttaaccgatgaattccattataaaggaccaaaacgctggaatacaaaaaaatataaagaaaaaatcaataacatcagccgagttatatccgaaaccggaaaagcagaaactcaatctatgccggtaattatcggtttatgtgaaattgaaaatgagcatgtattgaatgatctatgcgaagccatcaataaaagaggaggaatttatgaatttattcatctcaattctttcgatgaaagaggcatagatgttggcttattatataacaaaacaaggtttatccccctaaataaacaaaagctgttaataaatttacccagacaagaaggttataaaaattatacacgcgatatactactggtagaaggtctgttagaaggtgaaaaaatgtattttttggtcaatcattggccttcccgacgaggaggtgaacaaagaagccttcccaaaaggatggcggctgccaaagtcttaaaacaagcaatggacagcctcataagcatcaacccaaaggcaaaaatagtagctatgggtgattttaatgatgattgtaccagccccagtattaaaaaaggattaaatacggtatctaaaaaggaaaacgtaataaccggttcttattataatcccgcagagaacttatttaaaaaaggattaggaacaattgcctatcaagattcatttagctttttcgatcaacaaattatgtctcctgcccttattatagataaggaaggctatcactattacaaaatgaatgtgtttgcccctatttatttagttactcaagaaggtccttacaaaggctatcctttccgtactttttctaatgataattataccggaggatatagtgaccattttccggtttatactattcttattaaagaaattaaataaatgtaatttaaaataaattattctatataattatccttataaaataccatctactataacagcataaaattgcctagacaccaataaaaaaagcgagataattcccgcctttaatgttttcacaacggaataatccttattgtgaattgctttcaaattttattcgcttcaaatataattaataaattaaactaattcatcataaatatacattttttttatttctaattagtttatacttttattgaataattactaaaaccaaatagatcattatgtcttttaagaaaattcttggcctgaacgtaggaatatcttctattggctgggctgttgtccatgaaaatgaagaaaatccaaatttaaatactattaccaaattaggggtgcgggtgattcctataaccaaagatgaaaaaaataattttgagaaaggattgtctgtaacacccaatgcagaaagatcttcagcaagaagcgctagaagaaatcttcaacgttttaagctgagaagaaataacttaatcgcattgctacttcaaaaccaaattatttcatccaactcttctttgacagaaaaaggtaaatttacctctttcgaaactttaaaaaatcgagcaaaagcaacaaaagaaagaatagagccggaagaattagccagggttttacttcatataaacaaaaagagagggtataaaagcagtcgaaaagtaaaaaacaatgaggatgggaaggcaatagacggaatggagattgctaagcttttatatgaaaaaaagttaactcccggacaatatacttaccaacttattagaaaagggaaaaaacaaactccggacttttaccgctctgatttagaaaaggaacggtcagtattatgggattttcaaaaaaaatattatcccgatattttgaccgaagattttaaaaaagagctggaaggaaaaggacaaagagcaactgccgctttatttttaaaaaaatatggaatcagagtcgccataaataaagggaaaagagatgataaaaagttacaagcctttaaatggagaaaccaagcaatctcggaaaaaataacccttgaagaaatagcctatgttttggctgatataaataaccatattgctaattccagcggatatttaggcgcaattagtgatcgaagtaaagagctttatttcaaccaacagacaataggcgaaaatcttttttcccaagtagaaaaaaatattcacaccaaattaaaaaatcaagtatttttgagacaagactatcttgatgagtttgagcaaatatgggaaactcaagcgcaattccaccctcaacttactcctgagctaaaaaaaaagattcgagattccgttatcttttaccaacgtaaacttcgttcccaaaaaagattaattagtctttgtgaatttgaaaaccaagaaattgaaataaataaaaacggaaaaaagaaaaagaaaaaaatcggtttgaaggttgcccctaagtcctcccctcttttccaacagttcaaaatatggcaaagccttggtaatgtactcatcaaaagggaaggaaacgatcgtccgttgacgttaaaagaaaaagaattactatttacagaactgaatattaaaggaaacctatccggaccaaaggctttatccctattaaaattgccctctaaagaaactaaaatcaattttacaatcctggaaggaaatcgaactcaagaacagctttaccgaatttatcttaaaattttagatatggaaggatataatgtttttgaacttttagatatatcggaagaccaagaagaattaaaaccgggagacagtaaaatccctgcttccgaaatcaaagaaatagtaaaatctgtttttgaaacatgttctatttctacgtctatattagattttgacccgttgcttccaaatcctgaatttgagaatcaaagcgcatatcagctttggcatctaatatattcttatgaaggggacaattctacctcgggaaatgataaattgttggaactgttaactactaaattcggatttaaaaaggaatatgcacaactgtttgcttctatctcatatgattcagaatatggtaatttaagtagtaaggcaatgcgaaaaattttcccctattgtaaagaaaatacttttagtgaggcttgcatattggcgggatatcaacattattctaaacattacctatctcgtgaggacagtaataaccgcaaattaaaagatcgactcgaaattttacctaaaaattctttgagaagtcctgtagtggaaaaagtcataaaccaattaattaatctggtaaattcattaatggatgaatatggtgcttttgatgaaatacgccttgaatcagcaaaagagctcaaaaaaaacgctaaagagcgagagaaaatttcaaaaaatagggatgctgctaaaattcgatatcaaaaatatgcagaaatactaaaaaaagaatttaatatttcgagcccctctaagaacgatataattcgctatcgattatatttagaattggaagcgaatggttttaacgatttatatactcataacccgataaataaagattatctttttacaaacaactatgacgttgaccatatcatcccgcaatccaaaatatttgatgacagcttttccaataaagtactggtacccagacaagcaaatcttgacaaaagtaatttaactgctttcgattacttatcaaatcaaggaaaagagaaagaagaacgctttcaatatgtaatttcagaattatataagaaaggtgctatttccgaaaccaaatataaaaacttacgtaaaaaaggatctgaaataggagaaagttttatctacagagagctgaaggatacaccatatattgccggaaaaattaaggaaatcctctttgaaattactcccgatgtggttactactagtagtaatattacttctaaattacgtaaagattggaacttaactggtcttatgaaagagttgaatattgaaaaattccgtaatgccggacttacaaagttggttgaaaattcaagaggtgaaaaaaaagaaatgatcatcgattgggacaaaggaaatgaccatcgtcatcaagctctcgatgctatacttgttgcttttacatcccgaaatcatattcactatttaaattatataaatgctcgagacgatgaaaaacataaacgacatgcagctattattgctattgaaaagaaaatcaaatacaaatacaacaaaattaatgaaaatgaaagcagcccctctcgatttacttttccaactcaaaattttcgacaagaagtcgaaaagcaattaaaagaaattttggtttcatacaaaactaaaaatacggtagccactgtaaacttaaataaacctaagaaaaaaggcggatattcgcccaagcttgaacttacgccaagaggccctttacataaagaaaccatttatgggatgtcaaaaatttcccggactaaagaaataatgatttcttcaaaatgtaactatgagacggtatcaatgattcaaaatcctatatacaaaaatgctctattaaaacgattgaatgattatttcaatgatcctaaaaaagctttttccggtaaaaattcagtaactaaaaaacctattttcttaaatgcttattcaaccgatactattcctgaaaaagttaccatccaatggtttgaaaaagtttatactataagaaaagctattacccccgaaaattttaaaaatgaaaaaactattgaaaaagtgttggatcctaccatccaaaatatactaaaaaatcgattaaaaatagcacatggaaatgctaaagaagccttttcagatttggaaaaaaaaccaatctggctaaacaaagaaaagggaatctgcatcaaaacagttactataaccggagttaatattgtggaatcgctacatactaaaaaagaccatttcggaaatgaacttttagatataaacggcaaacctattccggtagactttgtaagtacgggaaataaccatcatgtagctatttatgaagatgcagaaggaaacctacaggaaaaaattgtcagtttttttgaggcggtcgaaaaagtaaatcaaggacttccagtaattgacaagttttataagggaaatcaaggttggaaatacctttttaccatgaaacaaaacgagatgtttttatttccttcagaagatttcaatccgaatgatattgatatcaatgatgaaaaaaacttaaatctaatttcccaacatctattcagagtccaaaaattagcttctaaagactattattttagacatcatttggaaaccggcattgaaattaatgatgcaaatttaaaaagaataacctggaggagggaaagacctagtggggttaggaatatcgttaaagttcgtttgaatcatataggtaaaattgttcatataggtgaatgaaaagaattatgaagactcattccctttatttcgttttatctcatacttaaagatttatttacatcctaaaagtaagaccgctatttaaggaaacggatcgtgtacgtctttaattgaattggtgaataattgtataaaatagttaagcggtcctacaattattctcgtgatagctaaatatctccgacattaaaaagcagttttactaatttattagaataaaaacagatatactatggagtaaaattacaataatattttaataattagcaaaagctttaaataataataaagataattttaaattagatacttgtgctcaaaaagctcattttttagcaccatctcgataagaatcaggcttagatttaaaaggagccttagaagttgaaagtttaaattatgttgcaaaaattatcattatacttgagatagttcaggctgggcataggaagtttttaaatgagttccaaaataaaaaaataattttattaattagaaactactaaaataagttaaaaaataaaaaacacaggattgactacattacacataaatgtaaaccgaatctgatggatgaattaattgaaagctaaattgacctataagggtactattcaatcagttttgagaacaataaaaaaaaataaaatacccgtttaaaagtcaatactatatttctatatctaataaaatttgaaatcaattcacaacattacatattttccaacccttaggggtacttgcgatttgatttataccattatgatttaaattacctaaaagcagttcacaacattctcacatcaagttgttcactagttgttattatgaaaactcggtatatctaatctaataaaatttgaaacaattcacaacactaagtatacttcattgtaataattaaagttgtgaatgatcgatcactaaaacatcatattaaaaaagctttatcagcatgacatcatcaatcttttaaatgaaaaatgattacatttttacaaatatataaaaattatcattctttatccaagaatactctatttaattaaatatcaaacccaacatttaaaaagcaaaatagtcaaaattaacaggttatcttaaatgttaaaaaacatccttttttagaatattttttaaatcagtttatatatttgcatttatgttttttagtagtaacgttaaagataaaaattctaaagcaagagcaggtattctgcaaaccgatcatggaaaagtagaaacccctatttttatgccggtaggaacggttggatcagtaaaatcagtacatcagagagaactaaaagaagatattaaagcccaaatcattttaggaaatacttatcatctatatcttagaccgggtaccgatatattatacaaggccggagggttacataaatttatccattgggatcgtcctatccttacagatagtggaggttatcaagtattttctctttctcaaactcgtaaaatccaagaagaaggagtaaaatttaaatcgcacattgacggatcgtatcatttttttacacctgaaaaatctatggaaatccaacgatatatcggaggggatatctttatggcgtttgatgaatgtaccccctatccttgcgattattcctatgctaaaaattcattggaaattacgcataaatggcttaaacgttgtgtgaaatggtgtgatgaaaatccggaattttataattataaacaacatttattccctattgtacaaggaagtaccttcgatgatttacgcaaattttcagcagaatttatttcctctgtcaatgcggatggtaatgctattggtgggttaagcgttggagaaccggaagaagaaatgtatcgtatcaccgatttggtaaccgatattttgcctcttgaaaaaccgagatatttaatgggtgtaggtactccatggaatattttggaatccatttctttaggtattgatatgatggactgtgtaatgcctactcgaaatgcccgaaacggtatgctatttacctgggatggcgttattaatattaaaaacaaaaaatgggcggatgatttttccgaactggaccctaaaggtactgcttttgttgaccatgattactccaaagcctatctaaggcatttgttttctgctaatgaatttttaggaaaacaaattgcttctgtacataatcttgctttttatttagacttggttaaaaccgctcgtaaacatattgtagaaggtgattttacaagttggaaaaaatcggtcattccgcagctaagaaacagattatgattactattttagaccggtatattattcgaaactttctgggaaccttgtttttcatgctgcttcttttaattgctgtttttgtgattattgatattcaaagtcattatcaggaattcagcgaaaacggattttccgtattggataccctaaaattatattatccgttttatgttatttgggcagtaaatgtttttgcatccatactggtttttatttcagtaatttattttacctctcgaatggcaaataatacggaaattgttgccataaccagctcagggaccagttttttcagattttcacgaccctattttatcgtgggaatcatgattgcgttaggttcttttatgaccaatcattttcttcttccttgggcaaacattaaaaagaatgagtttaatgtaaaaattcttaccggaaacaaaaaagatgcctatatggccaatcaaaatatatctgcacaaatatctcctacagaatatattttcgttaacagttataatcgtcaaatgaagagaggaacgggatttttatatcagaaatttaatgaaaaaagaatattgctgcatgaattacgttctgctgaaatttattggtctgaagaagacaatacttatgtcttaggcaactattacgaaaaggaaatgtcttctaatggaaatatagtatctttaaaaaacggaaatacgttaaaaaaacattttaattttactcctgatgaattactgcctgaagcctttgtagcagaaactatgaatactcctgaattaagagaatttataaaaaaagaaaagatgagaggtgctaataatgtaaatatctatcttaatgagcttcatcaaagaaccagctcatctgtagctgtagttattcttaccttccttgccttatctctttcttcaaccaaaaaaagaggcggattaggaataaatttggcgattggtatatcctgtgcttttttatatatattttctttccaagccttacaagtattctcttccaaaggaattttaccttcttggtttgcagtatggctccctaatattatttttggtataattactttagtcttgtatgtaaaacgcgcatacgcataaaaaaataagtaaaactactattacgatgaaaaaaaagattgcaaattttatagcatttataattggtatttattttattatccgttcgtttttctggtataaccgctcgcaaggtgatccctcacaaaataatttttttgcgatcgtttatttttgcattggaatagttgccattatcattcaattagttgtaaattaccgtaagaaaaagaaaaaacagtaatggcaatcaacattcttcatatagaaacctcttcaaaaaactgttcggtagcgattggaactgacggtaaaataaattcatattgtgaagaaatatcccaagattataaacatagcgaaaatcttcatttatttattcaatgggctcttgaaggtgcagaattagcactttcagatatccacgccgtctctgtaggaaaaggccccggatcttatacgggtttacgtataggattagcatcagccaaagggttttgttttggaaatgatatcccactaatctccataaactctttatatattttagccgttccctatttaaattccgagtatgattatattatccctgttattgatgcgagaaggatggaaatttacacgtcagtcctaaataaaaaaggtgaatatctaattaagactcatgctcatgttttaaatgaaaaatcttttgaacaaataagttcaaagaaagtactctttgttggagatgctgttgaaaaaactgaaaatttcttgaaagaaacttcatttcctttggaaaacgctacctttattaatgcttatcctcaagcaaaaaatatggttgatctctcatataaaaaattccaacaaactatatttgaagatgttgcctatttcgatcctttgtatttaaaagattggaaatagttttctcaaattactattccaaactagatctttatacttttaaagtaaagttgattgtaataacttatctaattacatttactctatactaatatagcccaataatttataaaatgtgattttaattttaaaattatttctacaataagattaaaaattatttttttataaaattgtttttataaaatataatctattatataattcttatatttttagtttatatctattaacaattattcatctaattataattaattttattatataaaaagtaattttatacaaaaattaagataaacaccttaataacaatatagaaatatttgtatttttgcaaaattgtgtgtgtgtaattagttttagtttatgttgtttaaatagttttttaatataattttattgcatttttccatataattctatttaaatattatttattaataagattacttcatccactttgataatttaattaattatttaatttttttgatcaatagttgatttatgaaacatctatattttgttcttattttactgcaaactataggcattgggtccttttattcgcaagaaaaaaattcaatacttacagaatcttctcaaacactaaaagagagaacctaccaacacctaattatgtatggacaaagtttgtccaccggagctcaatcgtatcccgctctatctaccgaaaatattgagggaaactatatgataggagatcaagtctggatcgagcaaggaaataccaatttcacagaatttaatccgctgaaagcttccactgccataatgtaccaaaattatcctaaaaacagagcatccattactttagcggaaactcctttagttggcctggtaaaccatttacaattaaagcaacccaaagcagggattaaatatctggcttcatccgatggagaaaatggaaaaagcattgaagctttatctaaaaaagggtattttaaaactaattattataacaattattttttaaaatcagttgaatctgctgcaaatattgcccgatctaatggttataaaatggtcactccggctattttttggcttcaaggagaatacaattattttactcttcatgatgataatactagtggtgctactcttgacaaatacggttataaaaaacttctggttgaattaaaaaatgatatgcagaaagatatcatgaatgcttatgggcaaactaaaaaaccggtatttattacctatcaagtaggatcgttacgaaatgatgataatctcaatattggactcgctcaattagaattatcaaatacatatgatgacattataaatgccggcccaatttatcatttgccacacagaggaattcatatggatgccaacggatacagatggtatggtgaaatgttggcaaaagtgtattataaaacccaagtactaggcgaagattttaaacctctacaacctaaacagatctatcgtatatcttcgaattcagtggggattatatttcatgtacctcaaccacctctggtatttgataccaatcttgtgcaagcacttcccaattatggatttaaaataaagaataacggggtggaacaaaatatatctgaggtaaaaatcgattcgaataataatacgataattatttcttgtacaaatgctattaccggaaatgtagaggtcatatacggacagcaaaatatatatcttaataataaattattgattaaagccggaaatctaagggatagtgataactatcctgctttttttacttatgtagatttggatgctaaaaaggatggcgaatatatctatccaagagaaaaatcagaaacaaccttaagaccggacaatgaacctaaagataaggacgggagttttttacatggcaaaccttatccgttgtataattttagtgtagctttcagttacactctggatgctaatagaaattcagtttttatgcccggtttcagatccaaacaagacattttatatgttaaaaaaggtagtaatggagatggaagttcttgggaaaatgctttgggagaattagctgatgctttaaaaattgccgaagagcagaatatgggtaatgagatacaggttaaccaaatatgggttgctaaaggttcttattctccattatatactgcaggtgatggaggaaatgctaatgatcgttcatttgtattaccaaaaaatgtagaaatttatggtggatttactggaacagaaacatccgttagtcaaagagattggaaaaataatagtactacgctccaaggggataatgtttaccatgttgttatttcatcaggagatgccggaaaaacagttcttgacggtttcactataaaaggaggtaatgcaagtctagctactaaagcatgtaataaatggccatttaataccctttgtcacattatgcttaataatagttggatttttacaggatacggaggaggagtttatctttccaattcatcgcccaaactaaaaaatttgattattgaagaaaacaaagcagcggatgccggagccggtttaataattgatgtatctagccctttattaagcaatgttacaataaaagataatatattaaaaggtaatgaggtaattggtggtggcggcgtttataattataaatcatcacctaacctagttaatgttaccattaataataataaaattgaagcaactaatagcactgttggtggcggaatatataatcatgaatcaatacaacccaaactaactaatgtactaattgctgataattcaattactatttattccaaaaataaaaatgtaattggtagaggtggaggtatttttaataaaaactccggtttattattaactaactctttaattgttagaaataaatcccacgtaggtggaggtatttatatggaaggaacagatggatctaaatttacaaatgttactgtttcagacaatgaagttttggctaatagaggaagtggtttatattgtaattctgctgacccaataatttacaatagtattatttggggcaacaaacccaatacaacctttaatgatgaaggtcaaaaacctatttttaattatagtttagttcaatataatttttccaccgataattttaatttaagcggtcaaacagatcctttattcgaagacggatataaattaaatctaaacagtccggttataaataagggcaataatgagtatataactgcaacgaataaagacttagacaacaaccctcgaattgttaacaaaaccgtagatataggtgcttatgaatatcaaaatgaagctttatgtaacagctttaatgatattacgattaaagacacagaagtaacttatgatggaacacctaaagaaattattttaaatgatcttccggatcatataagtgcagaaatcaaatataaaggtatcgggaatacttcttataatgaaagttctgacgctcctattgatgccggaacttatttagtaatcgttcaattaaaaaataattctgaatcaactgattgcgaaacaactcttacagcaaatttgactatcaataaagctataactgaaattgtttcggatgatttatatacctacatttacgatggaaaagaaaagaaagtattcgcttcccataatcatactgattcttcaattacttatgaaccccaacaagaatatgtaaatgccggtgggtataccataacagcaaaatctgctgaaacaaaaaattaccttgccgcaaaaaaagatattatattagttatagaaaaagcaaactttactaatatttcattacctgaaataagtgttacttatgatggtttagaaaaatctgttgagattaccggaactgtaccggcagaaaccgatatagtgtatgaatacgaaggcattaatgcaacatcctatcctaaacaaaaaaataaacctgtaaatagtggtacttaccttgtaacggcaacagtaagtaaccctaattataataccctgttgatacaaggtaaattaataattaataaggcaaattttaacggtattaaacttaatgagaaagttactacttacaatggtgataaacataataatgttatcactgtttcagataaactccccaacaataccgaaataaaatatgaatacgaaggagttaaacatacttcatatcctaaaaatacagaagaaccgatcaattccggtacatacaaggtgacagccactataacaaacagtaattataatacactgattctaaacaacaaccttataataaacaaagctgaagcaattattatagctgaagacgaacaaagttttatttatgatggtaatgagaaaaatataagtgccactcttaatcattcggaaagccaacttcaatatttacctaacaatacatatattaatgcaggagactatgaaataaaaattgaagctccggaatcagataattaccaaaaggccagtaagaaagtaatattaaaaattaaaagggcaaaaactgtaattacagcccaaagtatacaaatatatacatatgatggcaaggaaaaaactgttaccggctctattaatcataaggaaaccaccattgattttcatccccaaaaaggatatattaatgccggagaatattcaataacattaaaaacaagacaaaccaataattatgaagcagcatcattagatgtaaaattgattattgaaaaagcacaatccataatttctgctgatgatatacaaacatttttctataatggtaaacaaagaaacatttctgcaactttaaaccataatgaggcagatttaacctttagccctcaaaaaggctttactgaatcaggttcttatgatattgttataaatgcacccgcttcaacaaattatgaatccggttcaaagaaagttaaacttattattaaaaaagcggaggctttaatcaccggtaacgaaattcaaacatatacttttgatgggacagtaaaaaatgtagttgctcaattaaaccatgacgaagccacacttacctattctccacaaagaggatatacagatgccggctcctataaaattatcgttagtgctccttctacttctaattatgaagctgttactaaatccattactttaaatattaataaagctgtttcttatccatcaacgattaaattagaaagtaaaacatttacttatgatggaaatccacatagtttatttgttgaagattatccggaaggcacacaaattaattatgaaaataatgataaaattaaaagtggaacatatacagttaccgccactttaatacataaaaattacaaagacgttcaattattcgctcaattaatcattaataaagctccttcaattatatccgctgaagatttacaaaatttcacttatgatggtaaagaaaaagttgtaacggcttctctaaatcataatgagacatccttatcttattttccacaacaaggatacagtcaggcgggtaaatatacaattaccgctaaagctgcagagtctaataattataaacattcttcaaaacatattgttttaaacattgaaaaagctaatgctgaaattacggccgatgaggtacaaacatttacttatgatggaaatttaaaaaagatatcagctacacttaatcataatgaaaccgaattaaccttttcaccggtaaatggat

SEQ ID NO: 2193 - DNA, 24197 bp, synthetic construct
  misc_feature 1..24197: note = Synthetic
  source 1..24197: mol_type = other DNA
  variation 15735..16588: note = n is a, c, g, or t
gctgacagttgtatgtaaatcgcatgcgtttggcatctctctcaaacacagccacttcgtggtcgaaactcagcaggtcgatgaagaacgatcccatctttcctgcgcccattactagaattttcatttagaatgtaaaaattagaaaatgtaacaatgtaaaaattacttgttaataatctcaatctgctggcgaacgctctcttcgtggatattctcaaacacgtgtgcaacgaactctgggtccatgccacaaagtgagccctgggcaccacgcttgttcaggatttcgttgtagcggttagcctgcagtactgtcatgttgtgctccttcttgtactgaccgatctcacggcacacacgcatgcgcttagccaacagatccatcagctggttgtccagctcgtcaatctgcttacgcagctgggtgataccctcggtagtggtcttctcgtcgcggattaccaacaagctcaggatgtagtcgagtacatcaggtgttacctgctgcttggcatcgctccaggccttgtcaggatcgcagtggctctccacaatcagaccgtcgaaaccaaggtccatagcctgctgacacaggggggcaaccagctcacgacgtccaccgatatgcgaggggtcgctgatgataggcaactcaggaatacgacgacgtaactcgatgggaatctgccacataggtgcattacgataaatcttttgttcgtagcttgagaagccacgatggatagcaccaagacgcttgataccagcctgattgatacgctccaaagcaccaatccacaactccagatcggggttcacggggttcttcacaaacacggggatatccacacccttcagcgagtcggcaatggcctgcatggcaaaggggttagccgatgtacgggcaccaatccacaggatatctacgccgtgcttcaggcacagctctacgtgctcgggagtagccacctcggtagaaaccagcatcttggtttccttcttcacctgctccagccataccagagcgggctcgccatgaccctcaaagccaccgggcttggtacggggcttccacacaccagcgcggaagttatggcagcccttcatagccagctgcttagcggttgtcatcacttgttcctcggtttcagcactacaagggcctgcaatcacaaagggacgttcgttgtcacttggtaaattcaatggtgataattctaattccatatcttatagtattttttcgattctttctaatgcttgcttgatcttttcttctttggcacagagcgagatgcggatgtagcgctcgccgttgctaccgaagataaagcctggggtgataaacacgcgggcctcgtgcagcacacgctctgtcaggtcctctacattctggatgtcagcgggaatctttccccacaggaacatacccacctgattcttgtcataggtacaacccagcacatccataatcttctcggcccactggcggcgacgcttgtagttatcgatgttgaactcgcgatgccaagcctcgtcgttgttgttcaacgcctcggcagcagccaactgaatgccacggaaggtaccactctcaatgttactctgtaccttcagtatccactggataaactgtgggttcgacaagcacatacctacacgccaaccgggcatgttatgactcttcgacattgagttgaactcaatacagcagtccttggcgcctggcacctgcataatgctcaagtgctcctcgctcaggataaacgagtaagggttatcgttcaccaccacaatattgtgatcctgggcaaatttcaccagtcgctcgtaggtttccatacgggcacgtccgcctgtaggcatattgggatagttggtccacatcagcttcactttcgagagatccatcttctccagctcgtcgaaatcaggctgccagccgttgtcctcacgcagattgtagtttacgattttggcactcagaatcttgctgagcgatgtgtaggtgggatagccgggattaggcaccagcacctcgtcgccagggtttacaaaggccaaggttacgtgcagaataccctctttcgaaccaatcagtggcagcacctcggtcttccagtcgagctctacgttgtaccaacgcttgtagaagttagccatggcctcgcgcagttcgggagtacccactgttatctggtagccgtgtgcatcgggcagcttagccacctcgcacagcttttcgatggttcgctccgatggtggcatgtcgggactaccgatagccaatgagataatatccttaccttcggcgttcatctgcgccacctccttcagtttcctgctaaagtagtactcctgtaccaaacttaatctatctgctggttgtatcataatgctcaattcgtttgtttgccgtctttatattctcctaatatttttaatgcttttgtcagtgggatgatggcatccaccgcctgacggtatcgtgtaagatcgtcgtacatcacatctacgtagaacaggtactcccactccttgccgataatgggcagactctggattttggtaagattgatgtgatagaacgaaaggatggccagtacgtgtgccagcgagccctgctcgtgaggcagcgagaacacgatactgctcttgttggtctcagtcagcggacgcatcatatcggccttgttgggattgctcactaccaggaaacgggtaaagttatgcttgttgtcctcgatatgatcctcaagcaccttcagtccgtacagcttggcagcctcggcatgacagatggcagcccatccgcgcttcttgccctcggctatcatcttggcactaccggcagtatcctcggcctccacattcttaagctgtgggtgctgtgcaagaaagttgcggcactgcatcagggccacggggtgcgaatgtacctcggtgatggtgtcccaatcgtcctcgggcaaacagcagatactgtgggtgatgtgcaacttatgctcgcctacgatggcagtaccgctatcacgcagcaactcgtagttgtgcagcagactaccagcaatcgtattctcgatagccagcatacctatggcggtaggatccttctgcatctcctggaacacctgttcgaaggttgagcagcaaatcagctgtatctgttctccctcgaaataaaggtgtgccgcgatatcgtggaacgacccgattaatccttgtattgcaattctcttcattatcttcttttaattctttaattttctcatttttacattctaaaaaacaagtcccgctatcacttgtttgtgaagcgggaccttgttgtttttatcttccattgtcataagttgaactttacacgcaacttcccgcttcacagtgtcctgcaaagtaaaaataataaccgtaaaaccacgcattcaacattgacataattctctcgtttatttgtttacggctgcaaaagtatagtatttttgcgaaataaacaaataaaatggcagaaattttgcgatttctgccacaaattgttatttttcgtgctgtttttacacgattacacacctttaagccactatctacagtcgttcctacagagttcccagccgcgtagcatggcaaaatagtcgatgctattggcgccattctcctggatggccatggcggcaccaagcatcatccatcgggctggttgatcgctgggaataccgatgggttcgtcggctccaatgccggtcatctttgatacattggcaatgtacgatgctgtattgttctcgtgcggtggtgcccatttttgtatgatggtgcggatggtaaacaaacggtacgtatgataataggtacgcgtaagcaaccagaaggcggcacgccacccccactccatgttctcgaactgacagaacgctgcgtcctgctgctgggctcgcaagcccttccacttatccttgctcttacggatgttcagtggattgttattacgaattcctcttggtgttgtcattttacggtagttcttttataattttacgatacacgccataacttactttcttgattacgccatcctctttcaagcgctttagagcacgcgatgtggcagaatcactcgtgccaaaactgtccttaaactgctgcgtattaaactcctcaggcaactggcggaaacattcctcataacgggtagtgcggcgacgctgtacaaactccttgttctgatcggcgaagtagttgaatgccatctcgccaaagaagaatttctgagactgatactgaatgtccatcaccacacgacagaaacgcttatctgtctcatccatggatagcgtgtggtgctcctgccactcgtcccaatggcgcatcaggataaagggcaacgagatgccgatgccgtagtacgggatacgctttagcagcatgcggtcggccttgtcgccgttaaactcggctatctccatcttatcggtctgccactcataagtttcgtcgttcagcggttcaatgggaatctcaccagccaccttatccaatcggtaggcccacttcttcaacgtttcttcgctaccctcaatcacctgttggtaacgctccaccttgcctttatcgggcagaggaatcacagccagtcgggtactcatacctgaaccaaagttacgctggttcaccttgcgatgcagggcataaggcgtgccggtatagataaagttccaatacacgttgaacatacccgtaacactctcctgattagcgtacatctgtccgtcctcctcgttgtggaaggctttcagttccagtatctcacggtctttccaatcgccacctttgttatttttagtaacgttgtcaagttccgagtcgaacgagaacatgtgcaggttcagcggtttgccatcaatcgtttcgatggcggcattcatgtggcggataaattcaccggtagccgtacgtgccgggtgtacgcggatgcctacagcaggacgtttcaatgcctcgcccttttgcgctttggtgctggtggtgcgttccgtacgtccctccttatagcggttcacggcatctatcaggcagctgtcggcttgaatcatcgggtcggctatctgcttgtaaaactcctcaatcatgtgctttccagcacctggatcgccgataataaaaatgcagtaattcaggcgacgcacaatcttgggtgcaaaccagaagtggtaccaggctcgagtcatcagcgttccgaaaagtgccgccgacgagaacaataccgcaggcagtttatagggatgcacattcacaaacagctccttcatacaagggtaaacatcggccatctcctgcaattcctcagcccacttatccagcggcaattgcgcataaacatcatcactcccgtcgggagaatttacagttggttccgaaggctctaagaccgccttcatctcctttgagatttttggcagccaggccttgcccttcttggcattatcgttctcctgtgccgttacgtagtcggcagcattatccacggtacgcttcacatcctcgccgcgctctgctatcatatcctgtacccaaggctgcaccatcagcagggccaatgtcttagccttgtcgcggtcggtcataatatacaaatcgcgagccagcaccacgctggcctcatgcctcgaaacctcatcgctgctggtaaatcgttttttccaccatgctgcgattatcgagagtaacggcatgccattgtacgtcagaagctcagcaatccgcaggtagtctccatcgccagctgataaagcaggttgaggggtgggcttaatagtaggctggctatgaccagcatgatactcatcattatatcttttaccaaattcttcgttttcatacgtaatcagtttttcttcgttaataaaaataatatcatcatttgtagtcaggaacgcaccccttgaggcatccttgcaggcctcatcagggttcagtcccagctttttagagaacacgatctggttgtctatcaggttacctatgtttacatctgccataaacacaaccttcaatccatgccccgatggtgtaacatacacaaacaggatccttgccttatcctcgtcgctgagcttggcataagcttcctcccaaacctggcgcacatcgccctcgatatggtcaaagtcaatgacgcacaagccattcagtcggcatttctcctgctttctccacatgcccattttagcagtttgctcgccagtgagtttactttcaaatatctttgtcgactcgtcgtacgtggcaacgaatatcacaaacggcaaagctttctttttcttgtcgtaggtattcttatcgcctcgagccagcgcctcgcgggcctcttttacgagagcctgcgttcggggcgccctgatgagcgccctgaactgttcggctgttactatttcggttggtaaaccaaagcttcgttgatagcaaaacatttcgcaatttcacttgttagttggtacaactgcttccttacatccaatactccttcaacctcgaatgtgagccaagccattatctgtggatgctcacctttaacaaaacaaaccttcaggttgtcgttgtttaccagatactcgcctttcggcaaggtaggttcctcgatctcgatgtccttggtcagcttagctaactccttgcggaaataagcagccttatcaactacttcttcaggacatttcagttcaatacaagtcagcgggttcttacccgaagtctgatagcgcttcgacttccccaccttcttcacatccttctgagccggtgctcccttctcctgtggtgttacctcaatcgaatcatcatcaaacactcgggtgttcgatttgaaacttctgatgcacttacgtttctttacgtcttccattttacatcaagccgattttatccacatagattgttgttgcctgcatggcatcacccgtctgctgcgagttccactcacgaaccaccatcgagcattgcaccttgtactgacgctgagggtcgaacttaggacagttcaccgctctctcgccggtaatctcacccaggaaagtgtcggtaccatcggtcaacttcagcacaactgtgttgatcaccttctgctcacccgttttcttgtcggtgtactcgcgggtgttcaatccgctctgattcaaaattcttactgttgcttccataattaatgtttaatctttaatttttaaatttttccatttttacattttccttgtcgcctcgtccttaattccgagtgcaaaattatagataatgaaaacaaaaaagaacggaaaacaaaggtttctcacagaccggaaacctttagaaaccaataaaaacttataaaaacacaaacctgaatctttcgacgctaataagcatgaaaaaaggagagttaaaccactctcctattccaattttgtcggcttttagtatatagccccgcatgattcagtatctcccatagttccccttttcggctattcccataatccgatatgcgtttctcttttacccatctgttaaccacttcggtaacgccactcgacttcattccgtcaatctcattcaggaatcgcagtacctcttccatattattataaaagataggcattagtttttctaccagctcgttgtttacaatatcctcaggttcatcgtcctcttcctggccgagctgttccatctccttattaatcagatgcaacatcatatcaagttcgtagatagccttcttctggttaaaacttaggtcgcaataatggtcctgtatatatttaccatatttggcatagttgataataagtagcgtgccatcccaatggaaataatgcctccatttggcacacgaaatgataaacttctcattcatctcaaaattatagggcaggaatcccttcaagtaatcaaccctcactgcattaatctcgtcttgcgagggcgtaggtgcaaggtacagcacattagtttttagcatcattgccacctccagggcctgcagttctcgcagttcttttaatgtaggcgagctatgctcgtatagccaatcattaaatctgcccaccacaccacattcacagaatttctttttctcattaaagaaaaactgttcgaaggtgttgtgatcaaattccctcataattgccctagtatcttcaagctgagattttaagtttaggatggcatcattcaactcattccgaatttcatccttctctaccttactaacaatattaccgcaacgcaaccagaattcggcgtcattccgtagtttcgacaacaagcagcacatctccatcctacgcccctgtttcaagtcagcattataccccgagagtttcacgtttactttctctatcagttccataaagaagcgcacaaacgtcatctgcgaaaattcgagatagagtgtcatctgatttaattcgttggctatggttctgatgtcgcttatcataccctttagttctttaagatattccggggcagccatgtcgccaccattcagggcaccccaaagttgagctctttcgaactcattagtaataattttagtttgcataatgatattggttttattagttattaaaatataatactgccggcaaaggtataaagaataaatgaaatataaacattttagccaataattcttggaattggaaagaaattcgtaattttgtacccaaataacaaacattcaaaaacgataagctatgattaagatgtatgtaatggagacttgtcccgactgtgcttatgtcgagaagcaagtagaaggaaaccataattttgaagtgatcgacatcggtaagcatgtcagaaacctgaagcagtttatcaagcttcgtgatacacatccggcttttgatgaagcgaaggccgtgggtgacttaggtattccctgctacgtactggaggatggcacagtaacgctctactcgaaggatgtcggtttggagccacgtccccaggacgaaggtgctgcttgtagcctcgatggacgaggatgttaggtatatagaaaatgatcaacaacttaaaagggagcaacaccgctgatggatgttgctcccaatagtttaagatgccacgtaatcactttatgaaacctcgatagctttcgtaactttctccttaggttcggtctttggcatcgtaatcgttaggatgccgtcctcaaccttagcagaaatcttatcctttaccacatcatctggcagcgtgtagttctgctcgtagttcgagtagctgaactcgcggcgcagataatgatggtgtttgtcctcatgtttgtgttcggccttattctcaatggcgatggtgaggttgccctcgtcgttgatggctacacggcaatattctttctttatgcctggagctgcaagttccatggtgtaggccttctcactctccttgacattgactgcgggtgctgtactgttggcacgaggcataaaatcagtgttcaggaaatcgtcaaatactgttgggaaccaactgtttttaaacattactggtaacataatcaatacctcctaattatacttttagttcaacaatgttatgagtgcctttgctttttagctccagcgctcacctaccaaagtgcaatatacgtgcccagtgtcaatttgtcgtatatatgtggacaggatggcactaaatttaaaccatgataaacattgctgccaattctttaaactcgtttaaacattgacatttaaaaacagaaaagcctgtcatcacgacaggctcttctttttggaagttattcaaacatgtagatattttggctaatgcaaaaaaaaatccaccgttgaaggacgatggatcgggacctaatgttttcacaacggaataatccttattgtgatttgctaaaaattagtgctgcaaaaataaagattttcttattaagtaccaaacttttcaaaagaaatatgtacttttgtggcagaaataattaaaaacgctaagaattatgaagaaaatattaggtcttgacttgggaaccaccagtataggatgggcacttgtcaatgaaaaagagaatgataacgagaaatcggaaatcatacgtttaggcgtaagagttaatcccctgacagtagacgaaaagacaaacttcgaaaagggaaaatcgattaccacaaatgcagacagacgtttaaagcgcagtatgcatcgtaatctccagcgctataagttacgcaggaagaatcttattgcatgtcttcttgaacatcatattattaccgaagatacacctttatttgaacaaggcaataacaccacctttaaaacatacagagccagagcaaaagcagcaaccgaagaaatatccttagaggattttgcccgtgttttgttgatgattaacaaaaagcgtggttataagagtagtcgtaaggtgaaagatggcgaagaaggcgaattgatcgacggcatggagattgcaaagcgcctttatgaagagaaccttacacctggacaacttctattagacctatataataaaggtaaaagaaacagacctacattctatcgttccgacttacaagctgagtttgacaagatatgggaggtacaggcaaagtactatccaaacatcctgacgaatgacttcaaagactcaattcatggttttaacaagactcagacatccggcgccttttatggtgtacatcagatatatacagccaagaatagcggaaaggaaggatatgctcagtcactcctatggcgaacagaagccttaaaacaccagctggatattgaggaagttgcctatgctttagccgacattaatggagctatcaacaactccagcaaacgacttgcaatgattagcgacagaagtaaggaactatatttcagccatcagacaattggccaatacctgatgaagagattagatgagaatcccaacaacagtctcaccaatatcattttctatcgtcaggattatatggatgagtttgaaacgatctgggaaaaacaagctcaataccaccctgagctcaccaaagaactcaagaaggagatacgcgacattattatattctatcaacgcgacctgaagagctgcaagaatcttgtcagctattgtgagttagaacatacggaaagagaaataattattgacggcaaaaagaaagtcattcttacaggatgtaaggtatgccccaaatcatctctccttttccaggacttcaagatctggcagatactgaataatctccaggtatctgttgttggaacacaaagaaagaggataaagaaagataaaactcagctttcattatttaatgatgccgaaacaggtgcgctgaaccgatttctgacgcaagaggaaaaagacatcctctataatgaactatctatcaaagataaattgagcaagaaagatgttctcaaaatattgttcgacaatcctaagaatctcgaccttaattataaagaggtagaaggcaacagaacgatggctacactctttaaggcttatcaggatatcatcagtttatctggcaacggcgaatatgacttctcaaagatgcctgcagaagaggttctgcccttagtaaaggaaatcttcacaggtcttggttacaaaacagacttcctgacattcaatcccctactcgatggtaaggcactcgagcaacagcctgcataccgcttgtggcatctgctatattcgtatactggcgacaactctgctacaggcaacgaggctttactgcagaaaattcaagatatttgtggatttgagaaagagtatgcaaccattctatcaaatgcatcattcgccctcgattatggtagtttaagcgctaaggctatccgaaagattcttccccacatgatgaagggatacgaatatagcgaggcatgcaaaatggctggctataaccattctgttcgctcacttacaaaagacgagttggctaataaggattacaagaatcgcttggatgaaatcaagcgcaacagcctcaggaatcctgttgtcgagaagattttgaatcagatgattaatgtcgtcaacgaaatcataaagacctacggcaagccagatgagatacgcattgagatggcccgtgagttaaagaagagccaggaagagcgagaactgctggatgctgccatcaggaaaaatactgctgagagcgagcaactacgtaaggagctcgaaaaagaatttggaatacaacacgttacgagaaacgacatcctacgttacaaactctataatgagttgaagataaatgggtataagactctgtattccaatacatacatcccaagagaagaactattcagtaaacgtttcgatatagagcatatcattcctcaatcaagactttttgacgattctttctcaaacaagacacttgaagctcgcgatatcaatatcgagaaaggcaacatgactgcatacgactatgtagccggcaaatacgacgagaaatatttagcagattatgaaagcagaatagaagatctgtttgaacaaaaggttatttcgagaaccaaacgcaacaatctgttgatgaaggaagaagatatcccatcagatttcttggcacgcgatttacgtgactcgcaatatattgcaaagaaagcccgcgaaatacttgaagacttggtaccatttgtagtaacaaccacaggtgccgtaacaagcaggttacgcgaagactggcaattagtaaacctcatgcaggaacttaattgggacaaatacgatgccttagggttaactgagcgatataccgataagaatggaaacatcgttaaacgcatcaaggactggactaagcgtaacgaccaccgtcatcacgcgatggacgcactaactattgcttttactaaacgaagctttgttcagtatctcagcaacattaatgcccgcagcgataaatcaagcagcatttatggtattgaacagaaggaattgcatcgcgacgaaaaggatcacaaacttgtgtttaatgcaccaatgcctctgaacgaattccgtgccgaagcaagaaaacaacttgaaagcattctggtatctatcaaagccaagaataaggttgttaccaagaatattaataaggccaagactaaagatgggcatcagaacaaagtgcaacttacacctcgaggtgccttacataatgaaactgtatatggtaagattcaaaactatgaggccgaatacagaaaggttgatggcaagtttaccgaagacgtcatccttcgtgtttctaatcagaaatgtcgtgaagccttactgaaacgcttagcagagtttgataacgaccccaagaaagcgtttacaggaaagaacagtttggaaaagaatcctatctggcttaatgctgaacattcttatgccgtacctttaaaggtaaagcttttcaagatagtagatgtatttactatcaagaaagctgtagacaaagacctgaagttagataaggttatagacctcaaggtgcgtgctatattacaacagcgacttgatgaatttggcggtgatgccgccaaagcgttctctaatcttgacgacaatcctatttggctgaacaaagagaaaggtattgctatcaagagggtaaagattagagctaaagtctcatctgacacctctgtaccactccatatcaaaaaagacttgtttggcaatatgttaaaggatgccaaaggaatcgcactacctaccgattatgtaaatacagccagcaatcatcatgttgccattttcgttgacgaagatggaaactggcacgaacatgttgtatcgttcttcgaggcaacagttaatgcgcgattggggcaccctatcgttgataagtactataaaagtgaagagggatggaatttcttattttcaatgaaacagaatgaatatttcgttttcccaaatgaaaaaacaggtttcataccatccgaaatcgaccttatggatccaaagaactatcctcttattagtcccaatctatatcgagttcagaagttctcgagttcattctatgtcttcagacatcatctggaaacaaatgtagacgaatccaacgaactaaaagagactacgtggaaaagaataacaagtgttaaggggcttgaaggtgttataaaagtaagaatcaatcaccttggaaacattgttaacatcggagagtactagcctatgataaagaaaaccctatgttttaacaatcctgcctatctctcactgagagataatcagttagtaataaaattaccagaaatagaaaaagcgagcaacctcacggacgacttcaaaaagtccactgaggttactcgccctatcgaagatattggcgttctggtactaagccatgcacagataactataacatctggcgctctcgaagcacttttggagaataattgcgcagtcatcacctgcgactccaagtcgatgccagttggattgcttttaccattagttggtaacaccactcagaacgagcggttcagagaccagttgaatgctacgcaaacaactatggcaacaaaccatacaatacaagatacgtaaccaagcagccatactcgcacagtgtacagaggcagaaactaaatgcatgcaagtatgggccaacgaggttcgaagtggtgatcctgataatctggaagctcgcgctgcagtattttattggaaaaatctgtttggtaacatacctggatttatccgagacagagaaggtgtaacaccaaataatctactaaactatggctatgccatacttagagcggtcattgctcgttcattagtagcaagcggactactacctacccttggaattcaccatcacaacaaatataatgcatattgcttggcagatgatatcatggagccatatcgtccgtacgttgatcagctcatttatgatattgtagaacaatatggcgaagacatcgaattgtcgaaagatatcaagtcggagttgctttctatccccactctcgacgttgttatagctggcaagcgcagtccgttgatggttgcggcatcgcaaaccacagcttctctttataaatgttttagtggtgaacttaggaaaatagcttatcctgagataacatgaaatcaagaagatttagcgaatatagagttatgtggctcttagtattattcgacctacccacagagacgaagaaagacatcaaggcgtatacaaagtttcgtaaacgcctgattcaggatggcttcactatgtttcaattttctatttatgtacgacattgcgcaagcatggaaaacgcagaagtgcacagaaaacgtgtaaaagcaattctaccagaatttggaaaagtaggcatcatgtgcattacagacaaacaatttggtaatatcgaaatattctttggtaccaagcctcaacaacccaatgcacctggtcagcaactcgaattgttttaataatttaactctgcttatatttatttaagctggcggcatcctttcttacaataaaaagagcctaaaaacagaaaaggagaattttgcaactataacaaaaatctcccttctctcatagacattttttgttttctaattttctttgcaactatctcattatctgcaagataactaattcgagatgtctatgacaatgcaaagatactaatttttcagcaaatcacaacagagttggctctatggcgatatacagaatagatgtctatgacaatgcnnnnnnnnnnnnnnnnnnnnnnnnnnnnnnnnnnnnnnnnnnnnnnnnnnnnnnnnnnnnnnnnnnnnnnnnnnnnnnnnnnnnnnnnnnnnnnnnnnnnnnnnnnnnnnnnnnnnnnnnnnnnnnnnnnnnnnnnnnnnnnnnnnnnnnnnnnnnnnnnnnnnnnnnnnnnnnnnnnnnnnnnnnnnnnnnnnnnnnnnnnnnnnnnnnnnnnnnnnnnnnnnnnnnnnnnnnnnnnnnnnnnnnnnnnnnnnnnnnnnnnnnnnnnnnnnnnnnnnnnnnnnnnnnnnnnnnnnnnnnnnnnnnnnnnnnnnnnnnnnnnnnnnnnnnnnnnnnnnnnnnnnnnnnnnnnnnnnnnnnnnnnnnnnnnnnnnnnnnnnnnnnnnnnnnnnnnnnnnnnnnnnnnnnnnnnnnnnnnnnnnnnnnnnnnnnnnnnnnnnnnnnnnnnnnnnnnnnnnnnnnnnnnnnnnnnnnnnnnnnnnnnnnnnnnnnnnnnnnnnnnnnnnnnnnnnnnnnnnnnnnnnnnnnnnnnnnnnnnnnnnnnnnnnnnnnnnnnnnnnnnnnnnnnnnnnnnnnnnnnnnnnnnnnnnnnnnnnnnnnnnnnnnnnnnnnnnnnnnnnnnnnnnnnnnnnnnnnnnnnnnnnnnnnnnnnnnnnnnnnnnnnnnnnnnnnnnnnnnnnnnnnnnnnnnnnnnnnnnnnnnnnnnnnnnnnnnnnnnnnnnnnnnnnnnnnnnnnnnnnnnnnnnnnnnnnnnnnnnnnnnnnnnnnnnnnnnnnnnnnnnnnnnnnnnnnnnnnnnnnnnnnnnnnnnnnnnnnnnnnnnnnnnnnnnnnnnnnnnnnnnnnnnnnnnnnnnacattttttagcataatgttgtatttaactctgcaaagtctttaacctgatgcaaagatatcgatgccatcgcgttcaatttgttcgcggaggaatgggcgcaggttatcgtgatcctgaatcagatcgaccttgcatcccaaaagttcctccaggtattgcgcagccagaatataattgaagaacttgccaggcataactacaaacaggtcgatatcgctatcttcgcgatgatcgccacgagccaccgagccaaagagacgcatgcttactatgccgaactgctgcagctcagtctgatgctcacgtaaaagatcgataaattcctgcgacgtcttcatatccgactaattaataaatcaatattttgtgcaaagataaggaaagtatcgtaataatatgtgtaaatgcatttgaatctcgaaaaaaatgcctacctttgccgccctaaatataaatgacaaatgaagaaaattgcaattccaacacgtgaagagatggtagatgaccactttggtcattgcgcttattatacagtagtaacgcttgacgatcagaatcaattagtagagaaagattgcttggattcgccggagggttgcggatgcaagtcgaatattgcatctgttatgcaggagatgggaatcactctgatgctggcaggcaacatgggtatgggagcatataacaagctttcatctcatggcattactgtaatcagaggatgccacggaaaggtagatgatgtactcaaggcatatcagaatggagaattgaaagactcacttgagtcgtgcgaccatcatgattgtacgcatcacgaagaaaaacctgtgtacgttattccatcgcttggtaaataaatattaaggaaatacctaaaacaagggatttctcaaaagcaaaaaaaaattcttgaaattagaaagaaattcgtttttttgtacccaaaattctaaaattatgcaatttgtaattacagcttacgacggtgaaggaatgctagcgaagagaatggaggtacgtcctcttcacttcgaaggtatggagaaaatgaagaagcaccttatatcagcaggaggcatgctggatgaagaaggtaacctaaagggctcggtcctcatcatggagtttgataatcgcgaagaacttgatgcgtatttatcaaacgaaatatatgtgaaggagcgtgtatgggataaaaacaccattgaaaggatgaacgtagcctatgctcttggtgagagatatgataacaacaagtaatcatatcctttatattggatatatattttcaaatggagctatttgacgaggagaatatacataccacgcttgatgaacagtgggagaattacgggacgctcaactatattgaagatgagcgtcgtgagagctatgctgatactgctgtggagcgtagtgaactacttggacagatagctgcaatgatagatcgacatctcacccgtcaggaatcagaaatactccgttcctatttcgggctgcaaatgaagcgcgtatctgtagaggaactggcactaaggaatggcgtgtcgaaaaaacgaatcatgcggtttgtcggtgatgctgtagataaactacgcttcagcgacgatgccattgatatctggaagtatctgtatagaaaatgaatagagcctgtcatcacgacaggctcttctttttggaagttattcaaacatgtagatattttggctaaaacattgtgggtgcaaaggtacggggattctccgacatttgcaatacctaaaacatgggatttatattcagatcgatgctatcatagaataatgttgttagataacggctctgccgaatggcgagagggctagtttggccaggcggaagtgcattttgccccaggggataccgataatggtgatgcaaaggatgaagccatagaatatatgtgtgaggcatatccatatgccaccaacaaagaaccatagtacgttcataaaggtgctcagacatcctggttgcgactgcatccactcaaccttggtaccgaatggccacaaagcaagtatgccaagtttgaagctttgcagaccgaacggaatgcctacgatggtgagcatcaagataagtcctgcaatgaagtactcgagggcaatgttaatgcctccgaagatgagccagatgatgtttcctaatagtttcatattcctattttttaaaagtcttcaacttttagacgtatgaaaagatagaaaagttgcatgatatacgaaaaaaagtgtaattttgcagcaaaatatagaataatatgaatgaaccagagataaaaaaggcggatgtttctaccgagctggagctgccgatgtatgatgcgattgcagcgggattccccattaccagcgattatcctgctgacaggttggactttaatcgcgactttatcaagcaccccgaaagtacgttctatgtgcgtgtgaaaggtgactcgatgaaggaggccggcatctttgatggcgacttgtgcctggtggacaaagccgaggagatggaacacggcaatatcgtggctgcgtatgtaaacggaggttttacggtgaagtatctcgatacgtcgactaaggatcagggctttatccgactagtgcctgccaataaggatttcaagccgtttatcatcgattcgtccgacgagtttagcgtctggggcaaagtaatttttaccattagagactggaggaatagctattgtttgccattatagattgcgataactgcttcgtgagttgcgagcgtgtattcaggcccgatctcaacggaaagcccgtcgttgtattgtcgaacaacgatggctgtgtggttgcacgctcaaacgaggcaaaagccatgggcatcaaagcaggcactccctattatcagctgaaggaactcttccccggacaggagatagccgtattttcatcgaactacgaactgtatatcgatatgaccgacagagtgatgtcgcttatccgaaaggaggtgcctgaattctatcgttacagtattgatgaaggcttctgtatgctcaaggggttggagcatctcgacctgaaggcatggggcgaagagatgcatcagcgcatcaaacaatgtacgggcatgccagtaagtataggcatcgcctcaactaagaccttggccaaaatggccagtcattatgccaagaagtaccccggattccaccattgttgctatatcaaccatgtgtcacgtcgcgacaaggccttagagctatatcccattagcgaggtttggggcatcggccgacagtatgccaagcgacttgaagctataggcatcaagaccgcttatgattttgcgacgcaaagccgaagttgggttcgatccacctttaatgtggtggtagagcgcacctggcgtgaactgaatggcgaggattgtattttgctggaggatatgagcaagaagaaaagcatctgtaccagcaggagtttccctgggatggtgaacgactttgagacgctgcgaaccagtatcagcaactttgccgcccattgtgccgagaaactacgcaaacagcaatcggcagcagcgattgtgagtgtgtttatcgatacaaatcacttcagagaagatctaccccaatattggaactatgccgaggaacgactgttgacacctagcaatagcacccaggatatcgtgcaatgtgcgctgcgatgcacccagaagatattccgtcagggttatcagtacaagcgagctggtgtaatcgtgatgggcatttgtcctgatacggctgtgcagaccaatttcatcgactacgattcggagaaatatgagaaaaaacgaaaactggatgaagccatcgaccgtatcaaccgtatcaatggtagtgagacagtggtgctgggggcacaacaatatacggctaaggacggtaaaggccgagctggtgtttttcgtgacagcatcaagcacgacttccgcagtccaagctacaccaccaagtggagtgatatccctgaagcggaataacttttgcagttttgcggttttgcaaacttgacttaaaggtttttagaaatctataatactaagcctattattatataatatatatattatataataatagagatattttactaaaatatccaataccttaatgtcaagtttgcaaaagtgcaaaagcgcaaaaccttcatcagatagaaaaagtagctttgcggactaaaataattaccaaaatatttgcacaattcaaatattttttgtacctttgcaatgttgttgaaaggcaacaaaaaagagcgttcaagccatagaaaaatttttagtaggcctaccagaaaattttagatggctacacccgctcaaacacgactaaggaagaggttttaaagaaaaggaaagattttaacaaaccctttaatttaaaacaaaattatggcacttaaagtaaaggcagttgagcgactgcttaagtttgacaaagagaaagaaggtaagtatcgttatgtactgagccccgacctgtactcgagtctggatcaggacaaggtaatcaaggaggctgccagtcgcagcggtgtgatggaaggcgtaatgcaggcctgctggaatgctgctggcgaggtaatcaaggcctgggccaccgaaggacactcggttgccatccccggactgggaaccatgcgtttcggactgcgcggtaaggcggttgagaacgttaacgaggttaaggccggactgattaccacccgtcgtatcatctttacaccaacggttaagctgaaggacgagctggctaacaccgctatccagattacctgtatcgaccgcaacggcaaggaggtgaagcgtgtaaccagtagcgacagcggcgacgtggaggacaacgagaatggtggaggcaatcagccaagcaatggcggtaacggtggaaacaccggaggcaaccagggcggcaacaccggaggcggtggtgatgaagatgagtcgtacggcgattaaagaaggaggtgagctatgactaagaaagagacattaaagttcattgtacagatgattgccagtatcgccacagcgattgtaacagccctaggcaccaccagctgcatgggtgtctgaagaacaaagaaatcagccgaggtaccctacccctcggctgattgtattttttaaggtgctacttgcaccgtggggtaattaccgatggtgtaagtgaattggaactttgatttaaacttaccagaattggatgtatcgctataccacgtggtaagattggtattaagcgtggtaaccaatgtactaagggctgagttggtaagcgatgttagctggttggcttggtagcagcctttagtagtgccgctatcggtacctatcagattaccttcgccggtatagtagcaggcatggatagtacccgtactgctattggtacccactagggcgccggcggtggtgcctgagagcgttacatcatcgataaccttgcaaccaccgatgataccggcattggtacctgccagggcgcccgtagaaacctcgccgatggcggtaatatacaactgctcaacacaagcgctatcgcccagatttacaaacagcggactgccactcaagcggttgatatagcgatcgccaccaaggaatgtgccttggaacaccttgttatcatcgttagcatcgccgatgcctatccaagaataaccggtagccgttgcactcttttgcatagtgatatctgcatctaagcgcacatacttatccttaaatgtataggcattgtttacctcttgagcaaacgccaacatctgtgcagccgaggtaatgcgataagctgtggcagcagtattaccatcgtttccataaacatcgtatacctcgttgccatttgtatacaaccaagtggcattatctattgtcacaccgtctgtactatgaatttttacatcatcctttgtcaaggtcatatacgtagattttttacgcaactcgcctaagtctggcgttgatacatagttccagtcggtgtagttgacgtcaacaagcatcttctcgttcttatggttaagcgatacattaatggtggtacacttacctgagttaaagagtacttcatcacttactgtaccttgataggtatgagtatctgtttgggtgggatctatggcattagggtatgttaccgtaaacttgaacgacagcttatcgctattaccattaatcttacgatagtcggcattttgaggtgtggtaagaccgtagaaaacaaaggttttgtcttcattttcgcccgataccgatttacgccacagtttgatattctttattttattattgctagtatcagtaacattgaatgtagagagtgttgtggtgtcggctccccatgtaaacacgcaaggctgattcttgataaccatatccgtaacatctacttttttatcgagcgaattagtagcaaatcctgttacattaacaaccacacacacattgcttaatgcatgtttgaagtcaacctgagccgaggctccaccggtttcgggctttacattcttactatggctaaccagcaggtcttcggcaataatcgattcgttatctgtagagaaatcgatagtacccttatcgtccacaccatatcctaactcgcctttataggtaacaatattatcagtagttactgtttgccaatagtaactgctactcggcagacagtaacctgtaaaggtatgtgccgaagtaacatcgctccagtatattttctctggatcgtttgtggtaccattactgctacgtgcccatccactaccattgtaactatactgaatattaccataggtaaagttttcgagaggatatttggtacgcttaatggtggtaaacacgattacatcgccatcggcaaacgctgtacgccccacgccgagtgaagtttctgcgcgagtagcagcctgagtgctactcaaggtagccgtgatgccattgatttggagcgcctcatcgggcaccaaagcctcatcgttggtatcgcatgccacaaggagcgataacgcaacggtaagagataacaacttatgtagtttcatatctatacgcaacatattatattgtcattgttaagtgatagcgggtgccagcttctggggtgaacgaactaccagagttaagcggcatgctgtaacggttctggagattatcgccggtacgcagccagatggtggcattgttgatggtacaaggtggcacaatcaggcggaacgtgttggtgcctgctacacgataagcggtataagtagccgattgattgatatcggcaaaagccacgcgcttaacggtttgagcattatcgttcacaacggcaatacctaatgccttaccgttatcggcctcattggtaatgctactcttagttttataactgcaatcatagcccgaacctgaagcattaacttgactcttgctggcaaaataatcgcctacaatcacctcggcctggtcgatgtcaggcatattggtaattgttagtacggcatcatcagttatggtaccatcgatggttataagcaatacagccatcacatgcttaaaactcaggtgcacgttgtac

SEQ ID NO: 2194 - DNA, 24197 bp, synthetic construct
  source 1..24197: mol_type = other DNA
  misc_feature 1..24197: note = Synthetic
gccatcctgctgctgatagcgctcaaggttctcgggttccgcttctgcctgaagacgatttatgctgtcggtgtgatcactttgttgctgtcgtatctcaccgatctgggctatcagatgcacctgctgcaagaccagcccttcatggccagtatcatcggggccattttctgtggcgccggcgtgggactgggcctgtcgttcaatggaagcaccggaggcaccgacatcgtagcagccattgtcaacaaataccgcgacatttccttaggacgtgtgattctgctttgcgacatcctcgtcatcacttgctcctatctcgtgttccacgacttcgagaaggtgatttacggttatgtggtgctttgcgtcaccgccttctgcatcgaccaggtggtgaactcccgccgcagttccgtgcagttcttcatcatctctagccactatgaggaaatcgcccgccgcatcaaccaggaaccacaccgtggcgtcaccgtgctcgatgcgcagggattctactcgggccatcacatcaagatgctcttcgtattggccaagaagcgccagtcgagtgagattttccacatcatcaatgaggtagacccaaccgcctttgtcagccagagccgcgtgatcggtgtctatggccaaggtttcgaccacttcaaattccacaaataagtctcaattcgagggggcctttcattatttccattatggataatctatttgggtggattatcgcttgggttgatatttttgtaaatttgtcatttgatttgataaactaaagtcaaaactcagaggaatatacgattgatatggttttttcacaatacatacaggaacaactgaagcaaaaaagcggactcgatttaagcaccccttccgatgctgagagcctggcacttgacattgagggcatcacgggcgagcacataggagtgaataccatgaagcgtttattaggcatgattgccgatgaacgcgagccacggctgtcgacactcagcattgtggcacattatcttggattctccgactggaaggaactggaactcttcgacaaaggaagcaattccagttttggcgataacgatgaaggtgtgctcacggcttcctctttgccgaagggttgcaccttgatgatttcttatgcgcccgaacgcaaattgacgctcaggcatttgaatgatgcccattttttcgtagagcagagccttcattcaaaattgaaggtcggcgacgagataaccgtgacacatttcgtgaaaggatacccattgttggccagtgaggtgataagaaacgggaaaagcctcgggcggttcgttgccggcaaagagcggggcattgactttcaattattgtgatggaggatatggagtcgtcattttttacaggagatgagcccacctaccccgatgccgagttgctgcagattggaggagccacttgccaatgttataaggtgaaactatatggcaagttgcacttcctgaaacaactgaagccggaactgcggtcagaccctcgctatgtggctgccttgcggaaggaatttgagacaggctacttgcttgaccatccttttctcgttcggtacctgtcaagaactgacgacagtatattgatggactatgtcgacggtgagacgctcaaccaattcattgctcaccatcccgactatttcaaggagaagaagaatgtcgaccgattcgtctcgtgtcgtcggctatctgcatcagcaccaaatcatccatctcgacctcaaacccgccaatatccttatcacccgtatcggccatgacgtgaagctggccgaccttggcttttgctacaccgacacctacaccgatacgatgggctataccaaagactatgctgcccctgagttgctctatggcaccactcgcccggatgcccgggccgacatctatgccatcgggaagattctgcagcagattccatgcgccaacagataccagaaaatcatcaggcggagcacggcccacgacccgaacaggcgtttttcttcagtagacgagatggcacaagagatgacatccaagcgcaggaaattgtggccatggatgttggcattcaccatcgccgtcttgtcgatatcagcttttttcatctatcagcaaaaagaggccatgcctttgcatgactctaccatacccatggagacgactgaggcagaaaagcctgaggtgccacaagccgattcgacagcccaacacattgaggaacaacacgttaccgagcaaaagaaggagaccgcggctgaggtctcttctccacggggtgaagcatcacctgccgttgtcactgataagaaagtacccaccaccccagcggtcgctatggtcagcttacccacattgcggaaagagctgcaggatctctgccgcccggctttcgaagagcagttgggcgcctaccgcgactcttcctaccaatcgatgggctttatccgtttcaacagacttaccacaaactttaaacagagcatgaatcctcttttcgaccgcttgtgggaacaacgttataagacaagcggcatcagtgagcgcgaattctccaccgagtgcgccaacacctgcaatctccttatcaacaacctctacgaggaaatgatgcgcaacgagtaagatgatgcgcgctaactgcaaatggacgaaatggatgaaccaagctgcccatttgttccttatctttgtagtcatgttcaatctataactacatgcaactatgaagaaaaacattatccctaccattgcggtgattaccaccatcatgttcacctcttgctccagttatttcagtgtcgagaaaatgaagtccaactacgagcggcgcgcccattccaccaccatcgttggaaaactgcttagcaccgacaagcgcgaggccgacatttacaactcggtcagcgtatacatgaacgagaaagaggtgtaacgcccgttccaagtcatcgcattgggagcctatcgcccactcatcttgccactcatccgtcgtgaacgcccacgaatcgaaaaatactacttcctccgtgccgccaaacaagcttacaagctgaaggcagatggcgtcatcatcgacgacaaaaacaactaccgcatcatcaaatatctcgactgaaggcactcctcatgataacagagacgggattgtttccattccacagatctcgaactaacgggaatcatcccttttcataagaaaaagtaaaaaaaagtcgctcgcatgtttgtgtctttgcgaataattctctatatttgcaatgtcgcatcctgtatgcggcaagacataatcaggaagcgtttttggctattccacaatggtgaatctcgacttttcttattcgttgcacggcagtcgagaacctaccattggaatgagttaaagtaggttcacacttcttttttactttgttaaaatctattactatttataatctgcacctatctatcaaaaaggtgctcaaattttttgaattatggcacaaatcaaatgcaaagaatgtggcgagattttcaatgacaatttaacggattgcccgaattgcggatgccccgctagcgagagcgttaatgtggatgaaaatgaggatactaaagttagacctgattcagcaagcagtaactataaacaagagggaaagggctatgtggatgtagatagtgacaatgtgtttgtaggaatcttccattggttttctcccagcaacaatcccctgccctacaattcgaagccgacgaaagtgacggtcgctgtggacaatgacgcagaggatgtgtttgaaatagagaagtctctcttctatatgcttcatgcttttagtcttaaattgctcctctgctatgttgcgtttttctttttgttaggagctgtttatgcaggaatctcatatttggtttattactcatgctatgactacaatgattacaggttggctacgatttttatggtaatattaggcattattggtgttgtctttggtatcatagtcggatttatgattttcctccatatattccgtccttattggtcgcacattcatgtcaggctaagagaactacatataagacattggcgtaatatctatagggctatcaagaatgaagaaaagtaaacacaagtaataaattatagttcaaatgaaaaagttcttccttatttctatactattgatgtcgatgctcgtaggatgtcaagaggtccggcatcgtgaattattcaagaagacagaccattttgtcgaaagtctctattccactgttcaaagttatggattattggggggacaagagtacactcaatatgcagagaacggcgaatatagaattcttcccatggggcggttggttaatgtccgtatagaaagggaggcttccttcagtgaatatgagtctttgcggagtatccttgaaaaacattattctggtgatactcgggtaaacaaagtatatatctgcggtggaggaacagtaatgatagattgtagaaattaaattattaaaatatggctcttataaaatgttctggatgtggacaaatgatttcggataaagctttaaaatgtccgaaatgtggaactcctgtaggtttaacccaaccttcaaaccagcaattgaataatgcagattcttacatgtatacagaagaatcttcaagtaagaaatggctctatcctgtttttggcattcttgctgtcgctttgcttggcttggcggcttggttttttttatccaacgatgataaacaaaaccagaccggacagattgtgggcagcacaagcatgacaaatgaagagtcaaatggcatagacctgagtaacaatgaaacggcaagtcgtcagcctatgaatctccatggatatgtaggcaaataccctgtcactatgcaccttgaatttgataataaaaatgtcagtggatactattcttataattcaggggcttctaaattgctgttaacaggcactatcaataataatcatatcgagctcaacgaaaccacacaagaaggacgcccgactggtcatttcgacgggaagatgattaacggacaatactcaggtgaattcattaactataaaggtgagcatttcaatttctctgtgactagtggcgaaatgacagaacaggcagatataccgtctcagcaagagggtattattactgatgattcgactccgcaagtggggattagatgtgaacttacaggaaatatcagtactattgagaatgtgaaaatggtgcttcatggcaatcatggtacattaacctatgtgatggatggaaagcgtatcaacagcaacatcgaactagaccttagtgcctccaatatcgatgtagacggctttggacaccttgttctcaaaagctatactcccaacggcaagctaaagggacgttttattggagaaatggacagtgcagaatgcggttatctctatgaaggacagtttgtaaacgtgaatggaggctctactacattcttcctttctgaataatctacaatcattattataatatggcattaataaaatgctctgaatgtgggcacatgatctcggacaaggcgacgaaatgccctaaatgcggatgcccgacaaaagaaaagacggtgctgcatcaggaagatgccgcaaaagacgacatgccggtgtatgatgaagaggaaagtcataccaataagtggctgtatgtggtcatcgcactgctcctggcggcaatcgctggcggtgggtattggtggtacagtcgatcaaaaggagaccagaaagtccaacagcttgtagagcagttcttgaaagcggtggagactggcgatagcatggccattcgaaatttttaccccgatgcggcagttgcggactccttgtatattccaagtccggaattcatgatatcaaaaatggatggatccaataactacaaggtggaatggaataaagatgtgtggctggaaatctcacctaaggtaaaaaaaaggtggacggtaacctccagccaaggtctttttgcgtggccgaatgacgttatggagtttgcaaagaaaacggggcaatggaaaaacggactgaccgacaaggaattgtttacccgtatggatgacaaagaattccaaaataatctgattaatgaattctgtagcaatttcaagaaaaaagtgatgcagaaaggtcctctatttctattaaaaggtggttcttacgttttagacccttggatgataggcatcactattgtaaattccaacgatgtccaaatatctggcaacgactacaaagtcacgatgaaagtttggaatcagtatttatataataacaacttggatgaaaatgaagcaagatctacattgagtgttcggggaaaagatattgttccaaatggatcaacaacactttctcatacatttgaaggagcgtatgaatatccagaggatgaaaatgtgaaaatccaatggaacatcaacaatcaacagctcttcgacaagtattttgtggcaaaaggcgatgaatacgagaaatatatagaagagagaaaaaaccatagatgatttataacattgaagttgtcttatatatatctaatattgtttattaatatcgatcttcaattatatatggcactaatcagatgtacagaatgtgggcaaataatctctgacaaggcttcgagatgcccgaaatgtggaagcccgataatgcaggatggcacggcgcgacaaagcaccaacatgaaccagcagccggtgtataacgatggagataatagcggaaacagcaacaaatggttgtatgccatcatcgccctgttgctactggttcttgcgtgtgaaggctactatttccacgacaagaacaaacaggtggataagaatatgcaacaacagcaacagaaattcattgccgactccatagccagggattccatcgccaaggtagaggaggctcggcaagactccatcgagcaggctcgtattgcagaggaaagaactaaaaaaatgatgcctacccttgggagtcttttagacttatggtctttttgcctggactcgcaaatgaaacccaacggaaaaattttgtcaaaaacaggtatgacagtgataaaatataaggccattccagaagatggttacaccgatatatctgttatttgtgccaaaaatgctgttcttggaaagaacagcaattatgtggcaacagatgaaaatgcatgtgttttcgattatggcgcagacacatctaatgaattgataatttcattcaagaatagagaagatgccataaatttttcacgacaattgaaagacaagataaagtctgaagagtggggtggtgccacgatagaaataagcaaaggacaatggggtaatgtggatagaatcgagccacaatactctaacgggtggtactcatttagtttttctgtcggataagagaaaaacatcgaagtcaatcagttttgcagatgccgcctttcgtataacgttcaatagttacctgatacgtcatggctcttataaaatgcagtgaatgagaaaacatgaccaaataaataattatcattgtgagaataaagattattacattaacactcctgctgtcagctgcagctttgcttgtacagtgtaggacgaaacctgcaacagagcaagggagtggtgtcgtttccaagacggaagttacgaagacggattcaacttccgaagacgaagattctgttgcggtgttgcccaatgggaatgagccgcaagccgttacagtcgtaccacagggagagccacacaagggtttcgtctatgtgaagaacatcatccccgacctaattgaagacctgcgctactttacgaccaacaacttcatgggagagaaagtggatggatatgaggcaaatttagtcatcctttccaaagaggcagccacggcactaagtaaggcagccgatgaactgcgggagaaaggctacgttatcaagatttatgatgcataccgtcctcaaaaagccgtagaccacttcgtgcgatggtcgaagaccgacgaccagcgcaacaagaaagactactatcccgaccttgccaagaagagcctcttcccccagtatatcgccacgaaatcggggcacactaagggcagcacgatcgatatgaccatctgctataaggacacccagaaagaggtggatatgggcggccacttcgattatttcggaccgccatcccaccccacttttacaggcaaataccccgggggcgaggtcaccccacagcacaagaagaaccgcctgatgctgcgcgaactgatgatacgccatggcttcaagccctacaacagcgagtggtggcacttcacgctgaaaaacgagccctaccccaccaccttcttcgattttccggtgaaatagggcggctgctccatggccgttgtggcggtttatatacacgccaaaagccattatcacaggcccttcaaccctttgtattcccatttttcaaatttttatccattttggataatctattttggataaaaatttggagtttcggagagaaaagtgtatttttgtccgagtaaagctgttttccagatatgattgagaatccttttattacctatggttacgagtcggcagaatatttctgcgaccgcaaagctgagacccgggaattgattaccatgttgacaaatggcaatcatacggcactgatctctccacgccgtatgggcaagacgggactgattcaccactgctttgcacaaaaagaaatacaggaccgatactacacgtttctcatagacatttatgccacaaagaatttgcaggatatggtctatagaatggggcaagtcattgtcaatcgtctgaaatcacgcgggcagtcagccatcgacgggtttctgcgctttgtgacatctttgcgtacaggcatatccttcgacggacagggcaatgctagttggaatgtaggagtgggagacatcaaatcacccaatttcacattggaagagattttcaactatctgaaggcggctgacaggaaatgcattgtcgccatcgacgagtttcaggtcatagccgattatccagagcgtaatgtagaggaactgatgcgcacctatgtgcaagaatgccgtaatgcagtctttgtattctctggttcacagaagagcatgatgagcgagatgttctcatccccggcaagacctttctaccagagtgtctcgatgatgtttttgaagcccgtagccttgccggcatatgaatcatttgcaaaaggacatttcgagcaggcaggcaagcagatagccgatgatgtggtaaaggtcatttacgaacgctttgacggtacgacatggtatcttcaaaaggtgctcaaccagctcttcgcgaccaaggacagcgttgttgtcggcgacattgacaaagccgtagagcaaatcatcaatcagaatgaagaagcgtataaagacgtgctttatcaactgacggctcgtcagcgcgaccttcttgttgccgtcagccgtgagcgaaaggcgaaacatatcaccggctcggcttttatcaagcggtatcatctgaccaccgcaagtagtgtgcagaaatctgccaaaatccttacagaaaaacagttactgacccatcagcaaggcatttatgaggtttacgacaaattcatgtcagaatggcttgagagatcgtaaggagaataaacgacccctaccccaccaccttcttcgattttcctgtgaaatagggcggcggcacattattaagtaaaatacaagaggcgttgatatacccaataaaaaagtccaccgtttaggacgatggacaaggacctaatgttttcacaacggaataatccttattgtgatttgcagaaaattagtatgcaaaaataaaaaaatccctcataattacaaaattttacgggataaaattgtaattttgaaacgaattaactagaaatcacatttatgaaaaagattattggccttgatttaggaactaatagtataggttgggcgatagtaaatgaaaaagaaaatgactcagagaaatcttccattattcgcctgggggtgcgtgtcaatcctttaaccgtagatgaaaagactaattttgaaaaaggaaagtctattaccacaaatgccgacagaaggatgaagcgtagtatgcatcgcaatctacaacgctacaaacttcgaagaaaaaatctcattgaatgcatgttggagaatggaattattaccgaggacacaccgttgttcgaatcgggtaatcgttccactttcaacacctatcgtgctcgagccaaagccgttgagaaagaaatctctttagaggattttgcccgtgtgctgctgatgattaacaaaaaacgtggctacaaaagcaatcggaaaatcaaggacacagaagagggagaattgatagacggaatggaaatcgcaaaaaagatgtatgatgaacatcttacacctggccaactcctacttgacctattaaaaaaagggaaaaagaacaagcccattttctatcgttctgacttgcaatctgaattcgacaagatttgggaagtccaatctgtgtattatccagatgtgctcaacgaggaattcaagcagagaataaatggattcaacaagacccaaacatctggggcattctatgccatccacaatgtgtccactgtaaaaaacaatggaaaaggaggatacgaacaggcattggaatggaggaccaaggcgataaaagaaaaacttgacatcgaaatagtggcctacgtcttatgcgacatcaatggcgccattaacaactccagcaaacgccttgcaatgatcagtgaccgcagcaaagaactctatttcaaccatcaaaccgtcggtcaatatctgatggagataataaatcataatcctaattccagtttgaagaacattatcttctaccgacaggactatcttgatgagtttgaggcaatatgggaacggcaagcccaatatcatccacaactcacaccacaattgaagaaagagattcgcgacattatcattttttatcaacgagatttaaagagttgcaaaagtcttattagtttttgtgaatttgagcacaaggacaaggagatagaagttgatggcaagaaaaagaccattatcacaggctacaaagtatgccctaaatcatcacctctttttcaagatttcaagatatggcaggtgctaaacaatttaaaagtgtctgtcaacagtcgaaaactaaagagaatcaaaaggaacgatggacagttgcctctattcgatagtcttgatgatgaaccaggcaacagatacttagaccaggaagaaaaagatatcctctataaagagcttaccttcaaagagaagatgagcaaaaaagatgtgctcaatcttttatttgaaaatcctcaaactcttgaccttaattacaatgaggttgagggaaacaggacaatggcggcctttttcaagggatttcaggacatcataagtttgacaggcaatggagaatatgatttctcaaagatgcctgccgacgaagtattggccaccacatctgaaattttctcaggacttggctataagacagatttccttcaattcaacctcttggttcaagggaaagaccttgacaagcaaccactttaccgcttatggcatttgttatactcctattcaggcgacaaatccatcaccgggaacgacgcgctccttcgaaggataagcgagatttgtggatttgaaaaagaatatgcctctgttcttgccaacatttcactacctattgattatggcagcctgagcgccaaggccattcgcaagatacttcctttcatgatgaagggccttgagtatagtgaagcctgtgagaaagcaggttataaacattctgcccgttctctcacgaaggaggatttacagaaaaaagaatataagtcacacctgagtgtattgagaaagaacagcctgcgcaatcctgtagtagaaaagattctcaatcagatgattaatgttgtcaatcaactgattgacacctacggcaagccagatgaaatacggatagaacttgcccgtgaactgaagaagagccaagaggaaagagcctctctgagtgatgccatccgcaaaaacacaggcgagagcgacagcattcgcaaaatactacaagatgagttcaagatacagcatgtcacaagaaacgacatcctgcgttatagactctacgaagagttgaaattaaatggttataagaccatttattccaacacctatattccccgagaggaattgttcagcaatcgtttcgatattgagcacatcatccctaaagcccggctttttgatgattccttctcgaacaagacacttgagcgtcgcgacatcaacattgagaaagccgacaaaaccgcctatgaatatgtggcagacaaatacgatgagaaatggctttctgactatgagacaaggattgaagaattatttgatcaaaaagccatatccaagacaaaacgcaatcatttattgatgaaagccgccgacattcccacagatttcctcagccgtgaattgagagactcccaatacattgcaaggaaagcgcgtgagattttggaagacattgttcctattgttgtctcaacaacaggtgcaatcacaagtcgtctgcgagaggactggcaactggtgcatatcatgcaagaactcaattggaacaagtatgaccagttgggtgagaccgaaacatatactgacaaaaatggagaaatcataaggattattaagaattggaccaagcgcaatgaccaccggcatcatgccatggatgccctgaccatagcctttaccaaacccagtatcatccaatatctgaacaacttgaatgcccgaagtgataaaggaggcagcatatacggaattgagcagaaagaactcaacagagacaataggcacaacaagttggtattcaatgccccaatgccactggatgaattcagagccgaagcgaagaaacatcttgaaagtatccttgtatctatcaaggcgaaaaacaaggttgtaacaaagaatgtcaacaaaacgaagaaaaagaacggcattatcaaaaccaaccaaattactccccgtggcccattgcataatgagacggtatatggaaaaatcaagaatttcgtggctgaatacaaaaatgtgaatggccagtttgacgaaagcaccattcttcgcgtctgcaatcaaagataccgtaatgcgctgctcaaacgactatccgaatacgattacaacccgaagaaagccttcactggcaaaaactgtcttgaaaagaatccgatttggcttaatgcagaacattcctattctgttcccaccaaaatcaaactattcaaggttgtcgatgtctttaccataagaaaaagcattgacagcaatttgaagattgacaaagtcattgacaaaaaaatccgtgagattcttcagcaacgccttgacgagaatggtaaagatgccaacaaagcattctccaatctcaacgacaatcctatatggctgaacgaggaaaaaggcattgccatcaaacgggtgaaagtgaaagcaaaagtctcttccgatacatctgttccccttcatatcaagaaagacttgtcaggcaatgtgattaacgacgacgaaggtcgtgtcgttccaacagattatgtcaataccgcaagtaatcatcacattgccatctttgtcgattcaaacggcatttggcaagagcatgtggtttctttctttgaggcaacagcaagtgcgcttcttggcatgcctattgttgacaaaagctataaaagcgaagaaggctggaaattccttttctctatgaaacaaaacgaatattttgtgttcccaaataaagaaactggatttaatccctctgaaattgatttgatggatgaaagtaattaccccatcataagtcagaatctatatcggcttcaaaagttttccagttccgattatgtatttaggcatcatttggaaacaaatgtcgaagaaaataatgcacttaaaggaacgacatggaaacggataaaaagcataaagaatcttaaaggaatcgtgaaagttagagtcaatcatattggcagaatcgttgctattggagagtattagcatttatgatcaagaaaaccttatgtttcagcaaccctgtctatatctctttgagaaatgcgcaattggtgatcaagttgcctgaagtacaaaaggctacaaacctaacgcaatcatttaaagatttggcagtggttactcgcccgatagaggatattggagtggttgtgcttgaccataagcaaataaccattacctccggtgcgctggaagcattgcttgagaataattgtgccgtcatcacttgcgactcacgttcaatgcctgttggactaatgctaccgttagcaggaaatgccacacagaatgagagattccgtcatcaaataaatgcatcactcccattgcgtaaacaactctggcaacagacggttcaaaacaagattctcaatcaagccgccatacttgttcaacgaacaaacgtagagagcaaatgtatgaccgcttgggcaaatgaagtgaggagcggcgaccccgataaccttgaggcaagggccgccgcatattattggaagaatctgtttagtcaataaattgagaactttgtccattcttcctgagtttggcaaagtgggtattatttgcattaccgacaaacaatttggcaacattgagctgttttttggcaaaaaaccccaaaagccaaaagcacctggccaacaattggaattcttttagaaaaagggaatttcatcataatgataaaattcccttttacatttaccttcttttttcttttctagcttttctcgtatccatctgtatttctgccatttacttcaactcagatgtatgcggatacgcaaaggtactaatttttctgcaaatcacaactgttgggtttgtgttgtgttttgccccgttgatgtatgcggatacgcaaaggtactaatttttctgcaaatcacaacacctataatttgtaagtgatgaaagcaatagatgtatgcggatacgcaaagatactaatttttctgcaaatcacaactggtggtggcagaatacctactacgacaatgatgtatgcggatacgcaaagatactaatttttctgcaaatcacaacacaatcttcgtgatggtgatggactgccctgatgtatgcggatacgcaaaggtactaatttttctgcaaatcacaactcagaacctgatggacgttttgctcaccatgatgtatgcggatacgcaaagatactaatttttctgcaaatcacaactatgatgcaaaacaacgatgaaacaatatggatgtatgcggatacgcaaagatactaatttttctgcaaatcacaacaaacatttaccaattaccatacgagccagagatgtatgcggatacgcaaagatactaatttttctgcaaatcacaactggtgtagagcaggcagatgttctgatgatgatgtatgcggatacgcaaagatactaatttttctgcaaatcacaacgattttgctacgttcaagactcactaattgatgtatgcggatacgcaaagatattaatttttctgcaaatcacaactagagggtgaagtcggtgcagagccgccgcgatgtatgcggatacgcaaagatactaatttttctgcaaatcacaacaactcgtcgtcgcctgtcgactgcttcatcgatgtatgcggatacgcaaaggtactaatttttctgcaaatcacaactgggggtcggcatcggcattcggctccacggatgtatgcggatacgcaaaggtactaatttttctgcaaatcacaacgcgtcaatctttcccatcttcaccgcccgcgatgtatgcggatacgcaaaggtactaatttttctgcaaatcacaacgagtcggccgacattcgcaacgaggcggtgatgtatgcggatacgcaaaggtactaatttttctgcaaatcacaacctctcaactcatcatcaaaaacgtgccctagatgtatgcggatacgcaaaggtactgatttttctgcaaatcacaacatagatgtctgcccagacgtggaggggcggatgtatgcggatacgcaaaggtactaatttttctgcaaatcacaacgtcctcatcatagattgtaatgtctccctcgatgtatgcggatacgcaaaggtactaatttttctgcaaatcacaacacgagaccaacgtcgaagacggatggatgcgatgtatgcggatacgcaaaggtactaatttttctgcaaaccacaactatcaactcaacttcgacaagcggtggcgcgatgtatgcggatacgcaaaggtactaatttttctgcaaatcacaacttcatttcctcgcgtgtggcggcgaggatggatgtatgcggatacgcaaaggtactaaaagaaatgaagacctcttgtgggattcctcgaatagacaatagagaaaagtaggggaagctttaggaaaatttcccctaatttttacaattgaagcatcgcattcgctcaacttctttttgggtgttcaggtgtttataacatgaaacggcaactcaagagttccaaatttaccaactcttctggcacacctttctcaagttgctccttcttaaatttctcgcacctttcaatttgtgccttttctaatttcctaccaagacaaaagacagcaagaaggaatgccacgatgcttataagaataaatgtcataattaatattgttattgggttgattgggttgatttaattctaaagttcaaaatggattttatcagtgttcaagagcaggccacatctgcccctgggctctatccgaattcctgcaaataatgtgccatctatgcccccggtctttcggagtccctctcaaaatgcgaggggctccatgctttctaccagggctacatcttccttggccagcgcgccggtcttgtagatggccgactccctgatgtcgcggcccttggccacgtattctctgcgcaggtaagtgaagagggcggcgcggcccgtctccacggccttgacggcatctttcgaggcattgttcttgcggtggatgcacccacgccagtagggcatgaacttcacttcgcactggcgcaacacgtcctgcaggtcgaaggcggaataggaggtgcggtagttggtgaggtaagaggcgaaatagtagagggcgccatagaccgacagttcgggagcgaacttccccagaaacaggcctgtggcgaggttgagcgcctgctcattgacgaactcatggggcttggccacggtatagaggccgatgaggttgtttctcacgatttgcttggcgatgctctcgccgtagtagagtcggatgatgtggagcgtcaccatgctgtagtcgagacaagcgtctttgtggctgagcgcctgctcccattttgccggcgagaagaagtcgagcaccgatttctctgtggggaagagttgcttgaaacgttccagttcggtccgctgtccttgcgaaagggtcagggtgcctacgttgttttgctctctggtggccatcgatgaatttctcaagatctcgatggctgtggttggcgacgatgcgccacgctgcgtgtggttgttgttcatggtatgtttcttttttagaagttcaggagttcaggagttacaggagttcaggagttacaggagttcaggagttcagacattaacagacgatcgtgggaagcacgataaatttcaaacttcgtgcaagccaagagcaatagagcttgctctaattgccgaggcgccgccgatgttcatcaagcgaagcttaaatctcaaatctcaaacctccaatctcaaatcaaattcaaaattaaggcattttgataccgacagtgtgtcattttcgtatggacgtgattgcggggcgtgtttctcagaacgggaggagggcctgacgcgctgccgtattctcgttatagaagatgccctcagaccaatgctgctggccttgttgccgtcgcgacatctcggcctctctcaccaccctggccgactcagcgatggcccactgctgtgcctgaatgacgcactcgttcgacgtagggcgatggggataggcggtgcgctgcgcgaacaccttgtcgtggcgggcccaggtggcgaggcgcagcggcaggctccatgtgcgctgcaactcaaaccgcatgcgcgagcacgagcggttgggctccgtccagtagtcggcgaaggccttgatcatctccatgccataggtggggatgaagggcgtgagactgtcgacaaaggtctggcgtcgctcatcgagtgtttgcgtcgacttccgcgcgcgagggtgaggagtttttcttttatttttttcttttggggttgtaggggccttttcgtttttgtttttcttttttggcctttcggcggtggcggaggtgacatgctcctcgatgggaaccgtttgctcctcgatggacgtagcatgctccacaatgggcgtaacttgctcagggactggcacttcgaaaacggctatcgtcgtaatattctctgcgtggggcgtaacattcgcctcggcgagcgtaacattcgcctcggaaagcgtaacatttgcctcgacagacgtaacattctcctcgacaggcgtaacattctcctcggcaagcgtaacaattttctcctgaaggagaaggaggtggatgcagaccgactgcaggaggttgccattgtcatcggtcggtatgatgctgatggcgcgacgctgctcgagccgacggagaatacgtgagagtgtgacgcggtagaggcccagttggtgggccatggcatagccactctggctcaccatgccatcaatggcaacagactggaggtagagatagaccagtgcgtcgattcccctatcgaactggctgagaaacgtttgcataccatcgacctggagcgccacaggcgtaggcgcggaggggcacggtgagtgatgaggagaagtggcggtgtgggaatgttttacagaaaagggggatgtggaaaggtgtctcatttttgacagtttttggtttacgccgtcaaaaatagcacaaccttccacatcccccgtgtcattttcgtatgggtgaaaggaagaaaggtttgaggttgatcatgcttcgggggaaaggattcattggtctacgccccctgcccttcgggcttccccctcttcgcatgagggggatgacaaatgtccatattattggtcgctgcgctcaaaatcttacaaaatctaaaagaatatcgtgcaattgatatttacatctgattcgggggaaagacttcattggtctacgcccccctgcccttcgggcttccccctcttcgcatgagggggatgacaaatgtccgtaatattggtcgcagcgctcaaaatcttacaaaatcaaaagaatatcgtgcaattgatatttacatctgattcgggggaaaggcttcattggtctacgcccctgcccttcgggcttccccctcttcgcatgagggggatgacaaatgtccgtaatattggtcgctgcgctcaaaatcttacaaaatcaaaagaatatcgtgcaattgatatttacatcatgcttcgggggaacgggcttcattggtctacgccccctgcccttcgggcttacccctcttcgcatgagggggatgacaaatgtccgtaatattggtcgctgcgctcaaaatcttacaaaatcaaaagattatcgtgcaattgatatttacatctgcttcgggggaaaggcttcattggtctacgccccctacccttcgggcttccccctcttcgcatgagggggatgacaaatgtccatattattggtcgctgcgctcaaaatcctacaaaatctaaaagacaaacatgcaattgatatttacatctgattcgggggaaaacatcgtgcaagccgaaccgagtaagcagtgagtgcagtgtgaacttgttcaaatactgccgagtcgcgttcgaggtcgacaaaagtcagcgcaatagagcttgctctaattgccgaggcgcagccgatgttcatcatgcgaagcatgataaatctcaaacctattaataattcaagtttcgaaagttcaaacctatccgaaaagaagaagaagaagaagagatcattatcaaaaccgcttcgcaagtctgccacgacaagaggcggggtgttagctgggcgaacaatagcgggagccgtcggtaacaaatgaggcttttcggtgtcgtctcgggcgaggactgtgtgagcggcgaagccgcgagttccgcagccatcgcggttctttcttgtttcttctttctgtccacacagaaagaagaaaatatatagtttaccaccttccgcccggacggcctcccatgccaccgccaccgccggtgtagttggagagcgagacggaggaaccgccgctgatggtgccgccgctgacgcccatgccaccaaaacaggaggtgccgccgctgacgctgacacccgactgcagggtgggctgcgacgcgctggagacgacgagccctgaaccgccgcccgacggggtcttgaacgagaaggtagtgttgccagcggtcagggtataccaggtgtttgccgaccacgaagaggactggtagcacgactgggtgagttgtgagccattctccagaccgcccacggccacaacggtgccgccggtgaggtagagtttgtagccgccctcggagttggcatcgatggccacctcgggcgcacccgagcagatggcatacaccgtgccgcccttgatgtagcagttgccgttggcgtcgatgccgtcgttgtgctgcccctgtgcaaagacatagccgccgctgatggccatgttgcccttcgagttgatggcgtcgtcgtaggcgtaggaggccacctcgccgcccgtgatgctcagttcctttttcgtctcaatgccctcaccgttgtagccactggtacgcacccagattcggccaccgccgatggtaatgttgccatccaccttgatgcccttgggcgacgcggtgtcgttgttgctcttaaactgtccgccggtggtcaccacatacacgctgccgccgttgaagttcgcctccatatccacgttgatgcccttgccgcccgatccggtgctcttcagccacagttcgcctccgttcacagtcagcgtcgagtcggccttcacacacgccgcacccttggcttccttgtcatcggtgtcataggtgccattgccggtggtcagcacggtggtgcgcccgccattcacgacgatatggctctcgcagttgatgcccttggcggctgccgccgacacctccacgttcaggatgccgccattgatgaacacgccgtcgttggccttgatgccgtgaccggcggtcgacttcacatggatgttgttgcctttgcgcagcacgatgtagtcggccgagtggatgccgttgttggtgtttccgtttacggtgagtgccccgctgccgttgaagagcagtttgcctttgcagtagagcgcccccttctggctgccgccggtgccgtcggtcagggtgttggtggtgccatcggccaggatgacgtaggcgcgcttgccgctcagcaggttcagcgcagccgagtcggggttggtgatgttcgcgccattgagtctgacggcgtatttcttgtcacccaccacggtcagcgacccgttggtagtcgttccgctcaccacgtagcagatgcccttggtggtgccgtggttggcagtcacatgtccgccgttcaccgtcacctctaccccactctccgtctttgccaccgggttggagaggtcgatcgccacctcggtggcgaacgtgttgttctccagggcgtcctcctcttcggggaaatactccgttgccgtggccgtcggttctgccgacgattcatcgatggatatatcgaacgtggccagttcgccactcgtggtcgaactgccgttacctccattcacgttgccgccattgttccagccgttgttgtcatcgttgatgaattcctcaatcgggtcttctgccgagcagcacatcagcataagcgttgatgccacaagcatcgtaaaaaacaaaaatctcttcttcattcgcatacatttctttgttcgatgcaaagataggcacaacatgcggttcaggaaaaactattcagcgagccccccgatttgttcaacgaaacccgacatggcacggggcattctgatcgggttgtgccagaatcagaaccagtcaccaagattctcaccatgccccctgtctaataatcagcgaatcgcctttggagtgcagtttcgctgaacaatgatacaaaaaaacagccaggcttcctggctgttgtctctttagaaaatattctcttcaattgggtctgggcctgcatatacaggaacatctggaatatcctcactagcgggaactggttcggagcaaatctctcccgacacatcgagcgacaatttctttgtcacaggaagcaaataaatctttttttccatggttgtagttttttaaagtataattagctaattatcatcgcaaaaataaaaaatatttcgtttacttcctaacatttctcagtttttttctactttttcttataattcagaaaaatcaggtatttatttttttattttcaacaaaacatatatctttgtaaataatttaatacaatgattaataacctaaacatttatggatacgaaattaccacagccgagttttcccaagggcatgcgactgcttcaagccagtctgatcaatgagagacgcacgaagaaacataagctgcaccatctgttctgggagtgcacactacgatgcaacgtcagttgcctgcattgtggcagcgactgccgtgccgttgccgaaacaaaagacatgccgctggaagatttcctggccgtgctcgacgacgtgagttcagtgatggacccaaacaccatcgtcatacaaacgacaggtggcgagccccttgtcaggaaggatatcgttgaatgtggtagggccatccgtgagcgtggcttccattgggccatggtgagcaacggactgttgctcgatgagcagatgggcacccggcttctggatgccggactggagtcgatcgccatcagcatggacggttttgagaaagaccataactggatgcgcggccacaagttgagttttgcctgtgcagagagagccgtcaaatttctcgttgggaaaaatctcgtatgggatgtcattacctgtgtgaaccagaaaaacatcggttatctggaggagttcaagcgctacctcatcgatatgggcgtaaagaaatggcgcattttcacgattgtccccatgggccgcgctgcattgtatcctgaattgcaactcagcgatgagcagttccgccaggtgatggatttcattgcggccacacgcaaggagaaatccatctacctgagttttagttgcgaggacttccttggcgattatgaatatgaggtacgcaactctccatttttctgtcagtcgggtgtcaatgtggcttcgattctcgccgatggctctatctcaggctgcctgagcatgcggagcaattaccaccaagggaatatctacaaagaccggttcactgatgtatgggaaaacaaattccaagagtaccgcaatcgcgaatggatgcacaccgaccagtgcagcgactgcaaaatgtgggatttctgtctggggaatggcctacacctgcgcgacgacaagggcaaactgatgctctgcaaatataaataatcgaagtgcaggaattctgatgagtgcaggagtttagacaatagcctgattttttttaccttttatgggctttatgggcataatgggctcaatgggccatatgggtgcaggcaatggtaatgtctaaactcctgtgacttttttaacccctgaaaattctgtgactccttactcctctgaactattttaatcctctgaaacttctgtgactcttttctcctctgaactattttaaccatctgaaatcttatatcttttttaaccctctgaactattt

SEQ ID NO: 2195 - DNA, 24197 bp, synthetic construct
  source 1..24197: mol_type = other DNA
  misc_feature 1..24197: note = Synthetic
tatcggtgcgatgccaggacgtatcatcaagtctattcagaaagcaggttccagcaaccctgtgtttattcttgatgagattgacaaggtaacgcagatgactcataatggcgacccagcttcagcgatgcttgaggtgcttgatcctgagcagaacaatgccttccatgataattacctcgatgtagattatgatctgtcaaaagtgctgttcattgcgacggcaaataacctgagcaccattccccgtcccctactcgaccgtatggagattatcgaagtgagtggctatatcactgaagagaaaatagagattgccaagcgccacctgattcctcgtgaacttgaaaacacgggtcagaatgtcaaaggcctgaagcccacattcaataaggctgccatcgagatgatcatcgaacgttatacccgtgagagtggtgttcgtcaattagaaaagcagattaataaggcgctccgaaagattgcctataaacgacagttggaagatcatgccgactataagaagattacacctgctgagattgaggatttgctaggcaaaccacctttctatcgtgacatctatcaaggtaatgattatgctggtgtggtgacaggattagcatggacaagtgtcggtggagagatccttttcatcgagacctcactgtcaaaaggtaagggcaataaacttacgctgacaggtaatcttggtgatgtgatgaaagaatcggccattcttgccctcgaatatgtgaaggcacatgcagagaccctgaatatcgactatcgtattttcgacaactggaatattcacatccacgtgccagaaggtgccacgccaaaggatggtccttctgccggtatcactatcgcaaccagtatcgcctctgcccttacccagcgtaaggttcgtaaaaatacagcgatgacgggtgagattacgcttcgcggaaaggtgttgcccgtaggtggtatcaaggagaagattcttgcagctaagcgtgccggcatcacagatatcgtgatgtgtcgtgagaacgagaaggatatcctcgagattcccgacatctacctgaaaggcgtcactttccattatgttgagaacgtgcaggatgtatggaaattcgccttgacggatgagattgttaagaatcctctggatttcacgattcaggaagatgaaaagaaagacgagacgaaatgacgtttgaactgcaacataccgatactgccagtgatgcacgtgctggtatcattaccaccgatcacggacagattcagacacctatttttatgcctgtcggaacagcaggtacagtcaaaggcgtacatttctccgaactgcgcgatcaggtaaaggcgcagatcatcttgggaaacacctatcatctgtatctcagacctggtctcgatatccttcggaaagctggtggattgcataagtttaacacgtgggatcgccctatcctcaccgacagtggcggctttcaggtgttctcactgacgggcatccgtaagctgcgtgaggaaggttgtgagttccagagtcatatcgacggatcgaggcatattttcacacctgagaatgtgatggatacagagcgtatcatcggtgcagacatcatgatggcactcgatgaatgtcctccaggacagagtgattatcagtacgccaagaagtcattgggacttacccagcgttggctggaacgttgtgtgaagcgttttaatgagaccgaaccgctgtatggccatcaccagacgttgttccccattgttcagggatgcacctacaaagatctgcgccaggatgcagccaagcatgtctgtgatgtacttggacagctcaacgatggcggtggtgcttctatcggtggtctggctgtcggtgagcctaccgaggtgatgtatgagatgatagaagtggtgaatgatattctgccaaaagaccgtccacgatacttgatgggagttggcacgccacagaatatcctcgaagccatcgaacgaggtgttgatatgttcgactgtgtgatgcccacccgtaatgggcgtaatgccatgctctttacctatgaaggcacgatgaacatgcgtaacaagaagtgggaagccgatttctcgcccatcgatccagatggttgttatatcgatcagttgcatacgaaggcttatcttcatcatctcttcaaggctcaggagttgctggccatgcagattgcctccattcataatctggcattctacttgcgactggtaacagatgcccgtcagcatatcattgcaggcgattttgtacaatggaaacgtagtgtcatagatcaattaggacaacgacgatgaaggaagtgaagtttttgtcgcgactcgaccgttatatcatgtcgaaatttatcggaacctatatctattcgattgttctgataatatctatcgccattgtcttcgacgtgaacgagaacctttccaagtttgccacgtacggtgcgccattaaaggccatcgtcttcgattattatgcgaacttcgtgccatacttctcgaatctgttctcacccttgttcgttttcatcgcagtcattttcttcacatcgaaattagcaggcaacagcgagattatcgccatgctggcagcaggcgtgagcttcaagcggctcatgaagccttatatgctctcagcggctttgattgctgttgttaattacattctgatctccagtgtcatacctcatggtactgtgacccgtcaggaattcgaagccaaatacaagaattccacacgtgtcacttctgccagtaatgtgcagctgatggtgggaccaggtatcatcgcttacatccagagctacgacaaccgcaccaagacaggctatggtttctcgctggataagtttgagaacaagaagctggtgagtcatatgacggcttccaccatccgttatgattctatcagcgatacccgttttcactggaaagccaacaattacaagatcagaaagctgaaaggtctgcgtgaagagattacaaccggcgccgtgatagataccatcatccacatggagccaatggatctggtattctcaaaaggacagcaggagacacttacctcttctgagctacggcaatatatctccaaacagacagaacgaggctccagcaacgtggtacagtatgaagtggaataccataaacgcattgccacctcttttgcctcctttatcctcaccatcatcggcgtgagtctctccagccgcaaacgtaagggcggtatgggcctttacttaggtatcggtctggccctctctttctcctatatcctgttgcagacggttagtgccacctttgccatcaatgctgacaccccacctatgctggcagcgtggatacctaaccttctttattctgttattgcatatttctgttatcgacaagcacctaattaatgaaatttgaagagacatatctgaacgataatatcctcgatgccctctatgacatgcattttgaggacatgacccctattcaggaacgttgcattcccgagatcctcgacggctacgatgtgctgggtgtggctcagacaggcactggtaagacagctgcctatctcttgcctatcctctcccagctcgacgatggtggctatcccaaagatgccattaactgcatcatcatgtcacccacccgtgaactagcccagcagattgaccaggccatgcaaggttttggctattatcttgatggcgtcagcagtgtggccgtctatggcggtaatgatgcaggaagatatgatcaggaactgcgaggtatgcgtctgggggccgatgtgctcatcgccacacccggtcgtctgttgagtcatctgaaggtgggaaatctcgacctcagccgttgttcattctttgtactcgatgaggctgaccgtatgcttgatatgggatttatcgatgacatcatgaaactggtgcaggaactgcccgagagttgtcagcgcatcatgttctctgccaccatgcctaagaagatacgcgaattggcagttcagctgctgcacgatcccgtagaggtaaagattgccgtttccaagcctgcggagaaaatccagcagagtgcatatgtctgctacgacccccagaaactgaagatcatcaatcatatcttcaagcagggcgatctgaaacgcgtgatcatcttctctggcaagaaagaacgtgtgaaagagatcaatcgtagcctgaagtctatgcatatcaactgcgaccagatgcatagcgatctctctcagcaggaacgcgacgaggtcatgtatcgtttcaaggcaggacagacggatgtgcttgtggctacagatatcgtggcacgaggtattgatatcgacgatatccgtactgtcatcaactacgatgtgccccatgatgcagaggactatgtgcaccgtattggtcgtacagcccgtgctgatcgtgatggtgtcgccatcacctttgtcagcgaggcagacatctaccgattccagcagatagagcatttcctgggtaaggaagtcgaaaagatcgccttgccggaagggattggcgagggccccgaatatacaaaacgtgagaagaaacgttccaatacccgacgtcacggacgttggcacagtaaaggtaacggacgaaataaccaaaagagaaaaaagaataatcagtgatatgatgacagctcctatctgcaagattaatctcggactcaatgtcgtagagaagcgtcccgacggttatcacaatcttgagaccgtgttctatccagtacccatctgtgatgcgctggaggtattccccatggatccacagttcccctctgatgttgactgcgacctgaaagtcaccaatctccacatcgagggcgatgagcagaagaatctggtggtgaaggcctatcagcttctgaaacacgacttccccactctaccacgtattcacacacatctttataaaggtattcctacgcaggcaggcatgggcggaggttccagcgactgcggttttatgatcaccttactgaaccgccagttcaatctggggctctcagaacaacagatgatcgattatgcggccaagttaggtgccgactgtgctttcttcatcgtcaatcgtcctgtctatgcagaaggaatcggcgagaagatgcagcccatagatctcgatctgaaaggctggcatctggccattgtgcgccctgccatcccagtttctactaaagaggcattctcgctgatcactccttgtcatcctgcacacaactgccgcgacatcgtgatgcagcccgtggagacatggcgtggcttactcacaaacgactttgagaagagtgtctttgccatccatccggagataggtgccatcaaggatcgtctctacgacatgggagccgtctatgcggcgatgtctggatcaggcagcagtttgttcgggttgttccgttcaccggtagatctcagtgacttcaatgccgaaggcaccttcaagacctgcatctctttataacctcgactaagcgaagcgcatggagagatctctcgactacgctcgagatgacagagggcgcccagcggcaccatctataagcaggaaggcaagcccatcgagaagcctgtcggactcttcgagcattggagcaaagaccatcagtatacaaaaatagacctcaaatacaagaaactgtgatgatgaaaaggttcgtaagtatgatagctcttgcgctgctggctacaagtgtcaaggcgcaggtcagggatgcctttgacggtattctgcccgtgacagaccccaagatggagatgagtctgaacggtgagtggcaattgaaggtagtggaaggcatcaccgacgacaagaaggtgccagcaacagatggcacctggagacaaatccccgtaccgggttgttgggaggcttatggattctgtaaaccgaagtatgatagtccaaatgccttgacaggctattaccgaacgaccttttccataccagaagcatggcatggtcaacacattatcatccgattcgacggtgttctctatggttatgacctctggatcaacgacaaggctgtaggctcatggcgctcaggttataacacggcgatgtttgacattactccctatctgaataaaaagactcagcaacaggttatcgccttacgcgtcgtctcacagttccctggcagtgacttcgactacaatgacgactgggcacccaacggcatcttccgcgacgtgacactcatggccgtgcctaagacacatctgaaggacatcaccatacgaaccaagaacacaggcgaggtgtacgtgtctgccgatatcaccaatggtggcaagggcactcaagtaaaacatgagatattcgacaagcaaggtaaccttgtgggcacgacaaaagtagagcatccgcttctttggacagcagagacgcctcatctgtataccctgcggacaacgctgctgcagaatggcaaaaccctccagacatttgaacatcagtttggctttcgtgaactcactatcgatggcaatgtcctgaaactgaatggccagcccatcaaactgcgtggtgtaaccagccattcaacagatcccgtgacagtaaaggttatcgacgaagccagtatccttcgtgatatgcgactgatgaaagaggcatccatcaactatatccgtacatcgcactatccgcgtgaaccgcgtttttacgagctggccgactcactgggtttctatatcatcgacgaagtgccatttggctatggagacaagaatctctctgactccactttctaccctgttcttcagcaacgggcacaagccactatccgtcgtgacaagaaccatccttcggtgctgatctggagtcttggcaatgagaatccgctaactgatatctgtgtgaagttaggggattatgtaaagcgcgagctcgacccttcgcgccccatctgttatccgcaggtaggctcgtatttccgtcgctttaattacaacttccccaaagtggccgatatttatacacctcattacccctcaacggcacagattgcagatttctatcagcgggctgatcgtcctgtcatcttcacagagtattgccatacgctgggcatatcatttgaagaccacgaccgtcaatgggaaatcatagaacgcacaccaggtattgcaggcggcagtgtctgggaatgggttgatcagggaatgccgtttaataatgtaaaaattaagaaaatgtatggctatgaggagcgggtctttacttctgatgatgggggatttgagatgcatggtaataaaggtaccgatgggctgctctacgctgaccgtacacccctgcccaactattacgagcttcagcataactatgcccgcgccttcgtgtcggcgatcgatggcgatgtgctacaaatcgtgaatcgttacgacttcctgaatctgaaggaccacgtgaccttccactgggcactgaccaacaatcgcgatactgtgatgcgtggagcctttagtccggaatgtaagcctcgctgcactgtgccatacacgctgaacctaccggcacaaaacggactcagtattctgcattttgatattgaagatgctcagggccacgtattcctctaccagtcgtttgtgctaaacaagccacaaatcgcatggactgggcatggcagtggagccgtcatgaccaaggaagcaactatccgtacaggccgaaagcccactatgggtgaacgtctgactcagaaaggccgtttgcctgagaagtatctgctgccattagataaccatcaagtgagagctgacattcaaagccaccccatcgagggcggagaggaagtgacgttcacgctggctcctgacacggccgacgtctttcgctcagagttaggactggcctatctgctcgattccagcatcgaccgggtgcagtggattggatacggtccctttgccagttatcctggtcgccatcaggccaatcgctatggcttctgggcaaagcacatggacgacctttactttgaaggtaatcacagtggtatcgatgcggcattcctgtctgacaaggagggcaatggcgtcctgataacaggtgattcgctgtcgctgaattttgaacagacagaccgaggcatcgtactcactgtcaatgctgcggtcagcggacaagggccgaagtttgccaagacccacttccctggctggcggaaaggtgatcagcctgtaagcgcaaccttccgaagctactttatcaaggccgacgtgatgcctgaggtagtcagtcggatgtttgtaccagctgcagaagtgcccgttcctttccggccattcgtgactcagtatgacacctacttacagagatacattccctaaatacacatgacagatgccctcttcttcagcaatctgcttggctgcttttaacgtcaggacaggcgtgggatgaacagatccttgatatactcgtgaacaggtaggacaaactcagtcatttcgttgaaatctataaattaaaactggcaagttaggaacttgcgaaacttgaattagttttttcatatttgttttaggttattggttatttaatatttgtaataattagcatacggggttcgctgagatagcgagcccctttgctatttaatagatagatattaagaaaaaaacaagaatatttggtggtttcaattattcgctttatctttgcaccatcaaaatattgtcgaacttaaaaataatggtatgaacaacattgaatcaagcaaaggcgagatcgtgatgtaccaacccgatgaaactatcaggctggaagtaagaatgggtgaagaaactgtttggctcacacagcaacagatggcagaactatttgataaggacaggactgttatcagccggcatattcgcaacatctacaaagaggaagaacttgaggagaatatcacatgtgcaaaatttgcacatatggggtctgagggagatcaaacttacgaatatacagcctacaatcttgatgtaatcatttctgttggttacagagttaaatcaaagcgaggaaccaaattccgtcaatgggcaaatcgcatattgaaggaatatctattgaaaggatatgtggtaaacagccgaattgtagcattagaggaacatgtggccaaacaagattctcagatagaagagctcaaagacaaagttaatttcttcgtccgctcatccctacccccagtggaaggcatcttctacgacggacagatattcgatgcctacgcacagatcgtcaacctcatcaaacaggcgaagcattccatcatccttatcgataactatatcaatgtcgataccttgacgatgctcagcaatcgttcttctggcgtcactgccaccatctacacccgccagctgaaccagcaacagcagttggatctacagcgtcacaaccagcaatatccacctattgatatccacaccacgcaacgcaatcacgaccgcttcctgattatcgatgatgtggtatatctctttggggccagtctgaaagatgcaggaaagaaactcttcgcctacatcaaaatgcaggaacccccaatagcgcaactgctaaataatattcgataatagggttacaacctatttgaagacatcgagatgtcttttgtggtcgcaaattgcgacttcaagttgctattcttctcatttccaagctgttttgtggtcgcaaattgcgaccggttcttttaacttatcacatggcgactgccccctgttcagacaagcccatcagttataaaaacaaaaaaatccaccgttgaggacgatggatcaggacctaatgttttcacaacggaataatccttattgtgatttgctaaaaattagtgctgcaaatttaaagattttccagataaataccaaacttttcaaaagatatttgtacttttgtggcaaaataactaaaaaacgatagatatgaagaagattcttggtcttgatttaggaactacaagtataggatgggctcttgtcaacgagaaggaaaatgacaatgagaaatcagaaatcattcgtcttggagtgagagttaacccactaaccgttgatgaaaagtcaaactttgaaaagggaaagtcaattacgactaacgctgatcgacgcatgaaacgcagtatgcatcgaaacctccaacgctataaattgcgcagaaagaatcttatagaatgtttgttagagcaccatatcataacagatgaaacacctctgtttgagaaagggaacaataccactttccaaacttacagagcaagagcaaaggctgtaacagaggaaatttctttagaagacttcgctcgagttttgttgatgataaacaaaaagcgaggctataagagcagtcgtaaagtaaaagatggtgaagaaggagaactgatcgacggcatggagattgcaaaaagactctatgaagaaaatatcacgcctggtcagctattacttgatttatataataaaggcaagagaaataggcctactttctatcgttctgacttacaggctgaatttgataagatttgggcaatgcaatcaactttctatcctgagatcctgacagatgatttcaagtcgtcaattcgtggattcaacaagatgcagacttctggtgcattttatggtgttcatcagatttataccgctaagaatagtggaaaggaaggatatgcccaagcacttctatggcgaacggaagctctgaaacaccagatggatatcgaagaggtggcatatgctttggctgatataaacggagctatcaacaactccagcaaacgcctggcgatgattagtgacagaagcaaggagctgtactttgatcatctcacaattggccaatacttaatgaaacgtctggatgagaatccaaacaatagtctgacaaacattatattctatcgacaggactatatggatgaatttgaggctatttgggagaaacaagcacaatatcatcctgaattaactcaagaactaaaaaaggagattcgtgacattatcatcttctatcaacgcgatctgaagagctgcaagaatctggtaagctattgtgaacttgaacacacagaaagagaaattactattgatggcaagaaaaagaccattcttacaggctgcaaagtttgccccaagtcttctcccttattccaggacttcaagatatggcagattcttaataacttacaagtatctgttgtaggtcgccaacgcaagaaaatcaagaaggacaaaaaccagctctccttgtttgatgatgtagaaacaggtgctcttaatcggttcttaacccaagaagaaaaggacatcttgtataatgagctctctatcaaagaaaagcttagcaagaaagatgtcctgaaacttctatttgataatcacaatagtctcgaccttaattataaagaggttgaaggtaatcgcacgatggcagcactattcaaggcctatcaggatattatcagtctgacgggtaatggtgaatatgatttctcaaaaatgccgacagacgaagtgatgaatatcacctctgagatctttaaaggtttaggttacaagactgacttccttactttcaatcctctgctcgaaggaaaaagtttggagcagcaatcagtatacagactgtggcacctactctactcttatacaggcgataagtctgccacaggaaatgaagctttgctcaacaagattcaagacctttgtggcttcgaaaaggaatatgccgtcattctttcaaatatatcgtttgccctcgactatagcagtctgagtgctaaggctatcagaaagatactgccacacatgatgaaaggcttcgagtatagtgaagcatgcaaaatagcaggttataaccattcggaacgttcattaactaaagaggaacttgcccagaaagaatacaaatcacatcttgacgagattaaacgtaacagtctgcgcaaccctgtagttgagaagattctgaatcagatgatcaatgtcgtcaacgagattatcaaaacctatggcaaacctgatgagataagagttgagatggctcgcgaactgaagaagagtcaggaggaacgcgaactattggatgcagccatcagaaaaaacacagctgaaagcgagaagctgcgcaaagaactcgaagaggaatttggtatacaacacgttaccagaaacgatattcttcgttataaactctacaatgagttaaaacttaatggctacaagacgctctactctaacacctatatccctagagaagatcttttcagtaagcgcttcgatatagaacatatcatcccacaatcccgtctttttgacgattcattctcaaacaagacgttagaagttcgtgacatcaatatcgagaaaggcaataagactgcctatgattatgtgtcagagaagtacgacgaacagggggttacagattatgaaagccgagtggaagaactattcaacaacaaagttatttccagaactaaacgcaacaatctgttgatgaaagaggctgacataccatcagatttcttaaatcgtgacctacgcgactctcaatacattgcccgaaaggctcgggagattcttgaggagttagttccattcgttgttactactaccggagcagttacaagcagacttcgtgaagactggcagttagtcaatatcatgcaagagttgaactgggagaagtatgatgcattgggattaaccgaacaatataccgataagaatggcaacatcgtcaagcgcattaaggattggacaaagcgcaatgatcatcgccatcacgcgatggatgctcttactattgcattcaccaagcgtagtatcgttcaatacctcagcaacatgaatgctcggagtgacaagtcgggcagtatttatggaatagaacaaaaagaactccatcgggacgagaaagatcacaagctggttttcaatgccccaatgccattagacatattcagagctgaagctaagaaacatcttgaatgcatcttggtatccatcaaagcgaagaataaagttgttaccaaaaatatcaataagtccaagacgaaaaatggtcatcagcagaaagtacaacttacccctcgtggtgccttgcataatgaaaccgtttatggtaagattcagaattacgaggcagaatataaaaaggttgatggaaaatttacggaagatgtcatccttcgcgtatccagtcagaaacatcgtgaagcgttactaaaacgcttggctgaatatggcaatgatcctaagaaagcatttacagggaaaaacagcctggaaaagaatcctatttggttgaatgcagaccactcttatgcagtacctttgaaggttaagctttacaaaatagtagatgtgttcaccatcaagaaggccgttgataaagacctgaaacttgacaaggtcattgataataaggtgcgtgctatactgcaagctcgtctggatgaatttaacggtgatgcagctaaagcattctcaaaccttgacgagaatcctatctggctgaacaaagaaaaaggtattgctattaagagagtgaagatcaaagcaaaggtatcatcagatacttctgtacctctacatgtcaagaaagacctcattggaaatattcttaaagattccgatggtaaggctctacctaccgactacgttaataccgcaaataatcatcacgtagcaatctttgttgataatgatggtaactggcacgagcatgttgtttcattctatgaagctactgctagtgcacttctcggacttccaattgttgataagaattacaaaagcgaagaaggctggaagttcttattctctatgaagcaaaacgagtattttgtcttccctaatgaaaaaaccggttttgttccatccgaaatcgacttaacagatccaaagaactattctctgattagtcctaacctttatcgagttcaaaagttttccagtttattctatatttttaggcatcaccttgagacgaacgtagaagaaccaaatgaactaagagatatgacttggaagagcataagaagcgttaagaacttaaatggtgcgataaaagtcagagtcaatcatatcggctctatagttgccgtaggagaatattagcaatgataaagaagaccctatgttttaacaatcctgcctacctctcactacgagatgcacaactggttataaagatcccagaggtagaaaaagcggataacctcacagacgactttaagaagtcaactgaggttactcgccccattgaggatattggagtgttagttcttagtcacaaacaaattgtcataacctctggtgcccttgaggccttactcgaaaacaattgtgcagttataacatgcgattctaaatccatgcctactggattattgttaccacttgtaggtaatactgttcagaacgaacgtttcagagatcagttgaatgcttcgcaacctcttcgcaaacaactatggcaacagactattcaatataaaatccgtaatcaagctgctgtgctgaaacaatgcacctatacagaaacaaaatgcatgcaggtatgggctaataatgtacgaagtggtgaccctgacaatcttgaagctcgtgctgctgtatattactggaaagggttatttggcaaaataccagggtttatcagagacagagaaggtatagcgcctaacaaccttctaaactatggttatgcaatacttagagctgttatagcccgatcgcttgtagccagcgggctactcccgactcttggcatacaccaccacaatcgttataatgcctactgtttggcagatgacatcatggaaccatatcgcccttatgttgataggttggtttacgatattactgaacaatatggtgaagacattgagatatccaaagacatcaaatcagaactattatcaataccaactctcgatgtagtgattagtagtaagcgtagtccgctaatggtagcagcttcgcaaacctcagcatcactttataaatgttatagtggagaactaagaaaaatagcttatccagaactggaatgagatcaaaaagatttagtgaataccgagtaatgtggctattagtattgttcgatttgcccaccgaaacaaaaaaagacatcaaggaatacacaaaatttcgtaaacgtcttattcaagatggatttacaatgtttcagttttctatctatgtgcgtcattgcgccagtatggagaatgcagaggttcacaaaaaaagggttaaagccattcttcctgaatttggaaaagttggcatcatgtgtatcacagacaaacaatttggcaatatcgaattgtttttcggaactaaaccacaactacccaatgccccagggcaacagcttgaactattttagattttttaacttcagcatcgttatatattggcgttttattgacttaaactatgataatcactatcaaaacagaaaaggagatttccactatagaagtaaaaatctctctttcttaaacaacattttttatttctaaaaaacctcacaacaagttgattatcagcaaaataaaacaatcgtgttgtcaatgctgatgcaaagatactaattttttagcaaatcacaacgcgtcgatgttcctgttcaaagtgtggattgttgtcaatgctgatgcaaagatactaattttttagcaaatcacaactggacttccttagagatgtacttcgtgcgcgttgtcaatgctgatgcaaagatactaattttttagcaaatcacaacatgcctccgtgtggcttcgctaagcgcctagttgtcaatgctgatgcaaagatactaattttttagcaaatcacaactggcaaggattccttcaggcacagaacttgttgtcaatgctgatgcaaagatactaattttttagcaaatcacaacaagaggcagagcgtttgcttggtgaaggtggttgtcaatgctgatgcaaagatactaattttttagcaaatcacaacaacccgtaagtacagccagaagcgacaagggttgtcaatgctgatgcaaagatactaattttttagcaaatcacaactagttacttctcctttaatttatcaataagttgtcaatgctgatgcaaagatactaattttttagcaaatcacaactgccccctcgcggtgctgaagtcgcaacaggttgtcaatgctgatgcaaagatactaatttttaagcaaatcacaactattcaaccagacactctaccaactaagcgttgtcaatgctgatgcaaagatactaattttttagcaaatcacaactaatcttgatgattttattatcgagtgttggttgtgataggtaagcattgcaagacctgtaaacgcaaagacttctgcccagccctcaaagcaatcggtgggacaggtcattgatcttcctaaagaatcaatgacctctgtccccccgatctagggaaactactccctacacatcccccagcctctcagcatggcgaagtaatccaggctttcagttccattttcctgaatcgccatcgccataccaaccgccatccagcgctggggctgatccgatgggataccgatcgtttcatcgggcgcaatccccgtcaggcggctcacgttctggatatacgtctcagtgagattctcccggggcggtgcccacttgctgataatcatcctgatcgtatagagccgatacttatgataatacgtacgcgtgagtaggtaaaaggcagcccgccaaccatactccaaactctcaaattggcaaaaagccgaatctgtctgttgggctcgtaagccctgccactgatctttagaacgcctaatattcagtggattgttgtttcttattcctcttggtaacataactttttactttcttatttacattaattggtgtactgtttgggaatacgatcttgtaggcggcatcgagggctcggagattgatctggtagaaactcctacccgtcctgaccgctacgatggcccgcaggaactcccgatgcttgcgcggatagagcgatggcgacggcagttcgtcccagcccgcctgttcacacagattgcagacttcccacataaaggcattggtagcctcctgttcgaaccactctttcagcacattccggatacagaaacgtttatacttcctcctgaggaggtgcttcgtgggcaccagcatccgccagagcaacacgaagcattccttgttgttttcaatttccattttgactaatgactaaaatgactaatgactacgtttttctataattcgcatcttcagtctgaacgatgagtccttgtctgcgccaattcttcagcatttgctgtacacagttctgagtcacattagcccctttcacagccacagagtgctgcatggcctgttcgaacgaaaattgctgatccagacgctcaaagatcgaatcattcttaccacgcttcagcctttctccattcagattgcctacatagtttcgactattgacggcgttctcaatgcggtcacggaagaaaagcaaggcgttctccatcagcgagtcggctatcacttcatacaattccatcatctgtggtgtctgattctttagcaacatctccttccagagattaggatgctgtttcaactgagcctctgcaccgttcacgccgtgtttatggatcagtgtctcacacaccttacaaagcatcagacagcaggtcatacgctgtgctgtcacacagatacggagacgttgacgcgctttcgttcgatcgtcatttttcatggattccagacgaatcttctccaaccactgacgaccacactgttccagtttaggtaacacgatttcaccctgcatcaaggggagcagatgggctacttgctggatgcgctccgattgtcggctggtcaacacagacgggatatcctccaatggtgcaaaagtattgtcaggtgttcttgctactgcgatacggctctggaagccatccgtgtagttattcaccacacggtagagggcatcgggcgttccgcacatcgtgacattccataatagatgtttgatatgcacactcaccgcatccacactcttggcctcacggtcatatttggaaccatcgtaactctgacgtagcatcacagaaaagtcgctcattgtcgatttccacttctgcgccaccgtatcggcctcgggggtaaacgagaaggcgtgcttgccctcggtattagccagtcgctcagcgaggttggcaacggtgttgttcagcgtcagacagcgcacgggcaactttggttcctcgggctgatccttcttattctttgccgcccgtttcttggcgcgccattcgtcctcctgcttcaaatacatctcgtctaataacaacacctcactcatccacgcctctaccacaggatcgatcttaccctttccgctggcaaaatcaccagcaatataggcgatgagattcagtccccgtttctgaccgtgaacgtcgagctttacacctgttgccagcgccccgatacaaggacagactgccgtcactgtcggcattgccaactgaggccctacagcctctatcgactcctttaccccttgcggcatcttcttcaagcccatacttgtcatttcgagcccctcacttgtcatttcgagcgcagtcgagaaatctctttcgcacaaggggggtgtcgcagtcgagggatctctttccagcacattcagcgtgttgcggagacgctgcgggaaaccattgaactccgacgcaagggcattcttgatcttcgcacgtttctcttccaatgggaatccgtcataacaaggaatcacctggtcgagccactcgaaattcttaccacagatatgcctcaggtcacaagccaactgataggtcagtgtgtcgcggtcaccctcagtaggttcaaacccacgattattcacctcccagtacttcttgatgatgtccgtaaaaggtatgccgtgataatgcgtggggaaggtttttccctctgtcattccgagcgccccacttgtcatcccgagcgtagtcgagtactcggctttgccgcttgctaccgaagagacgcaagaatctcctgagatctctccatgcgctgcgcttagtcgagatgacacaggcggcgcttcgctgatctcaaaaaccccatcatcgagataaatcagttcggcttccgttgtggtgaaaaagaccctcgtgatgtccttggcatctttgtcgtattccacaccgagcagatcagaagcccatttcaagttgctctcctgactcatctcaggccgacgactgaacaccagatgataaccttctccgcgtgcactctcttccaacatccttagtcccagttcgtcctttttggcgaggatgcgctcacgaacagcctgcatctcatccttgggtatgtggtcgatgtccatcccgacagtggtgctcatcgtcttcgatcctttcagcgtaccatcttcatttggcagacacgagtagttcatctgaatcagacggttcttctgtcgggcatcgctttcgcgtaccgtttttaatatctggcgttgatgctcgctgttgcgcttactgagatactcctctctggtatggatggggcgcataaatttcaccccatcctgcttatagatttcaaatacactcatcgactttaatcctttaccagttctcgaatcaccttctgcgcaatctcactcgcctggctgatcagtttctcaggtagtaggctcaccagttcctcttcgagcataaacacgaaataatacataccgttagtccctttcgacagcgaactgttgtcttccctgaagattggtttgttcctcacgcgcttgggcaactcggtgatatacatgttaccgtctctcatcagctgtaccttgcatttggccgtaaagtcctccatcaccgcatcttcacagcattcaaagtcagctgtgtggagtccgttctccgacatgccgaaggtcatcagaccatccagcgttactggtctcttaattgttttcttgttgttccttttcattatttttgagttttgcgagaagaagtttcagaaatctgatggccatctttaatcacgtgaagacctcttccccttcaactcaagttaataattaatgtttaattagctccgttgctacgacatccataaacacttgcccgttgtactctcggacctgaaacttcagcgtggcaatcaccaaatcgccctcgctgaactggatcgtagccagattgcccaaagcactcaccacataggtcggctcatacttcccacccagctcctgaagcaccagcgttcgcttgttcagcacaccgccctcgctcttctcacttttcactgtaaagcactcaccgcacttcaccactcttaaaatcattgtttgcataatcttacttcatttttaattgttacttttttgttcgcgaatcgaagatcttcagatttctggtgcaaaagtagacacaacaaaaaactctggcaaagaattagtatgccagagtatgagttagtataacttagtatcaatttagtatggacgatactaaatcttagtaagaatctgcttgaaaataatgtcccatagtgtcttacagacctcctcaaacgggttgtgcttcatctcaaaatacggcttgtcctctataacaagcttggagaagttcgtcatcgtggtctgaccgattttcagactctcctgacaattctggggcgtaatctttggggcgtaatctgcaaatcccttttgagaacaacgcatgcccagccggtctcttaacaccagatagacgcccatccaatgttgtttctgccagaaaatggcttttccagtatgatctgttacgcccatcaatgctttcatggcctcatggagccacgcttgttgggtgcgatcatcctgcttattgaagaaatggcgaattttatcttcttgagattcagatgaaggcatgtaggcgctcgcagttggctcctcctgatgcaactcatccatatcctgatgcaactggttcatctgcacattataataatagagttggatgcgctggtcattggtcagtttgtcgaagatgcgatacaggtactgtttggccaaggggtagtcgatcatgaacttgttaccctcccaataagagtagcgcttgagtttggcggcggcttcgacgaagttatccgacaacaccttgccacgcttcatctccttcatgagaaggtcgagtctgacagcagcagtttcttcatccgttggctcatcgtcgtgatccataataccgaggttcaggatgtcggcggtcaattccgcctggtattgcttatatttcttcatcgtgagtctgagttgccgtgatttccaaatatcatagggcgttttctgacaggcttcgtaactcttcatgagtttcttgaaaaaggcctcactatggctctctcccaactggaatatcttcatcgccaactcagccatcagatccaccatctgccgtattttctttttcaaagcaacggaatcggccttcggcaggtcagcatacagtttgtgattcagccagtattgcggggcggtcatcgtgtcgtagttggcaatcagcacattcctgcaggtcaacgtccgctcgctgttcaccaggttcgtcaacttcacgcagatcgcatccgtcagatcactgacgctgcagccacatttcgcgatgccgtcttcgtcctgtttgttcagttcgtcgtacgacttcagcatattgtccaacgtgacgatataagccagtttcttaacttttcccagactatctttgtttttattgttattcattccttttagtaattattttatagttcaaatatttagtaaaaagcacacaccatcccatagacatcaaacacaggttcaatgcctaaaagactaactttgcactgatatatctcagtgcagataacaagaattcggggagttctcgcggagagagccgtcttttaagtatgcagcccagcaacaatcaccatgggcgcttttggtttcaggtttcatagaaatctcgttctattttcacatcgggtcacatcggggacagtcccttttgcaaatctgagtgcaaagatagtgtaaatcgaatgaaaaaccaaattaatttgagtttttctgagatgcagcctgtaacacttcagggaaacaaaagcctaatgtctgccgagcttgctcatcagaaagcagacaagcatctttgtgtggcactccgccacaaagtgcgtattaggctacacccttcaacggaaactctttgcagtatgtcaagcaaaaggaaataagaggcaacagctattgtggcatatgttcataaaaaactctaaaaaaagaactttcttctttgcaggatgaatagttttcactaactttacacccaaactaaaaatttgaaatgtatgcaagacgttaatcgcctgaaattagtgttagtggaacagaagaaaaccagtaaatggctttctgaggaacttggagtgagtccatctactgtttccaaatggtgcaccaactcttcacaacctgatatggaaaccttggcaagaatatcaaaactcttgaatgtcagtatcgaagatttgtataatcaacggttcataaaatctatgtaatatcactttgggagatcaaattatgaaagagctaatatgtgtattgattggaggttttctcttcctttcgtgtaacaatcagaacaagaacaaaacagcagaagatgatttgttacctgatagcattccatacgttgagtttgaatcatatgattgttctggggcgaacaataaaaatgaatgcgtaaaagcattcgatgcgttgggtgatactatttttggagaggtcttatatggcatggataagaaacaagcaattaatagcgttcggaagtttcaaaataagttagacgtatacaaatataaacgatataataagcctgacggaaatggttttatctatgctgatgtggaattcatggaaattgagattgttgatatagagaaagaagtattggacgtttccacgacacaaggtagatactattcgagttttacatggaagggcaaactctcccaaattgtatgggaatccttctatatatcaaaatttagtaagacggaagtgagtgctcaattagaggattttattggttattttgaaaagaaatatgggaaatgtacttctaaaggcgtatcctcagaaaactggttctatactgattatgaaaaacgtaaaaattacttccctggcggtactgtagccgaatggaaaacagacaataggttgttacaaatatccataaaaggaaaagagtgccccaactacggaaacgaaagaggagaatataaatataccatttatgttcgtttcttcgacaggtctaaagataaagaaatagaaaagtatattaaagagagagagagtatacaaaataatcggattaaagaacaacgacagaaatcgattaatgcattatagttattccccccacagctagaatataaaaatagaaacatataatcaaagaaaatatgaaaaagttttttcttattttgctaattaatgctccttttctattgaataatacaatcaaagcggacacatcacaattgtttactttgtttgatatccgagaagagaatagtgtagattctatatctaaaattttaatagacaaaggaatcctcaaatctgtattttcagataaaattgataatcctttctttgatattgcttttgagaaagaaggttgtcacattttgttaaattatactccaatagatcggtatgtatttaagtatcaggtttataaggattctttaaataaaaatgattttcttgatggaccaagacaagttttagaaactcttataagaaaatatggattacctgactatgccggtattccatatgagacagaggtaaaatatggaattagtgagtatgagttaagggacctaatctataataaagaacatgtattagatacattaagtcttcactattttgtaaaaaacatatattatcctgaatcatttcaatatgtttgggaaaaagaaaatcagaagatctcg

SEQ ID NO: 2196 - DNA, 24197 bp, synthetic construct
  misc_feature 1..24197: note = Synthetic
  source 1..24197: mol_type = other DNA
ttgagtttgaacagaacaagcagactcttaaccacaccgttctcttcaacatcagaaacgtgctttccaatattggatacgacatctatctcgtaacagctcctgccttggctaacgatagtaacgctacagaagtccagcgtctgccaatgaaactgaagtgttccatcaattaccacaatcaagagggtgaatcacaaaaggaactgctccagaacaacattatcacgactccagacgagattaactatttgttgcttgcagaagactataagttcccatgcggcacatttgggctgactgaggctgagccacaaatcagcttgttggtagaaaccaacgttactcctagagagcagagtatcaagaaatatactcgtacgatgatgattgactgtatcatgcttgtcccccacggcatctctattgtcgatgaggaaagattcacagtcagtcctcatggcgatggtgatacctattactggttgaagaagtaaggatttagttataaataagaactataagaatatgaagaaatatataatatttggactaacactgctgatggcctttcctttaagtgttgtggcccaggacgaggataccgaggaagaaagcctcattgaaacccttgcccgcaaactgacacctaagcaaaagcagtatcctacgagagaaatacgcggacgcgtcgtcaatgccactacggggcaacctattgcaggaacaattgtcagtgctgataacattgagggttacagtacactgacaagggaagatggtacgttcagcttaaaggtaccgacgttcacgacatcggtatacatcaatatgccagatttcaaccctgcacgtctgggtctgcaagctactgagatacagcaagaggtgaaactctatccacagactttctcaaaagactacgagaagcagatcaatgtgcgtaacgactattcagccgatgatttcgcttacaccaactctgtcaacatcaaggatgaggttcagaagcaacttggcgctcaggtttacaccattgcaagaaatggtactcctggtatcggcaatgtgatgttcgtacaaggtttgaactcactgaatgtcaatgcacagcctctgattgttgttgatgatgtcatcatcgaccagcagtacggacgcaccatgcttcatgatggattcttcaacgatgtgctgtcaaccatcaatcctaatgacatcgacaaggtgactgtcatgcgaaatggaacagccctctacggtgccaagggtgccaatggcgtcattctgatccagacacgccgcagcaaatcaatggctacccgtattacggctaacgtttctgcaggagtggtctttgaaccgaagttcatctctgttatggatgcagaacaatacagaagttacgcttccgagttgctgaaaacaaccaatactcgtaaccgcaccttcaagttcctgaaagaagatcctgagtactactattacacccagtaccaccagcaaaccgactggaaggactacgtgtatcatacagccatgactcagaattatggcattaacattgaaggtggtgataacgtagccgactataacctttctgtaggttatgtaaatcagcagagcacactgaaatacaatggcatgggcagattgaacatccgtttcaacaccgacatctcactcagtgagcgctttggtatccgcttcgacgcctctttcggcaatatcacccgtaacatccgtaacgacggtgcacctgcaggatatgacgaaggcactcccaccgcccctggattcctagcttatgtcaagagcccgttcttgagcccttatagctatggacgcggaagactctctgaaacccacttcgacatcgacgaagaatcgtacctttcggaggcattggccaattataagaactataactggcagttaggaaaccccgcagctatcaacgagtatggtgaggctgagaataagaaccgcttcgaaaactcaatgctgaacctgacagtgactcccaaatatcgtttcagccgtaacctgacgctttccgagcacttcagctacaatttggttaacaccaacgagaccttctatattcctgtcaacggaacaccgagctattatgtaagcagtattggtgcatatatgcagaatgaagtgcgctcgctggcttccaagcagaactccgtgttgagtgacacccgcttggattggagcaaccgttacaacgctcatttcatccatctcttcggtggcgcccgcatcaactgggaaagctattcgatgacctcactattaggatacaacacaggtaacgacaaacagccgttcttgaaaaaggaattggctaacaccaacgacttcggcaccagcgacaactggaactcattggcatggtatgcacaggccgaatatgacttcttaggccgttacttcttgcaggctaacctgactgttgaaggttcatcccgtttcggtagcgatggcggtaacatccgtatgtttgatgcagcatggggtgtcttcccaagcgtacaggcatcatgggttatcaccaacgagccttggatggcaaagatcaagcccatcaattatttgcgtctgaccgcaggattcgatgtcagtggtaacgacgatatcgactactatgctgctcgcagctatttcagcgcatcacaattcttgaacaccatcgcaggtctgtccttcgacggtatcggtaacacgaagatccagtgggagaccactcgccgcttcaatgtcggtttggagtcaaacctcttcgacaaccgcgtgagcctcagcatgaactacttccgttctaacacggataacctgctgacccgccagtcgttgggttatcttagcggacttaaagaaaactggactaacgatggtaagctgaagaaccaaggtttcgatgtcactgcagccgtcaaggttcttgctctgaagaacttgcaatgggaagttggtgccagtgttggtcactacaagaacgaaatcacccaactgcctgctggtcagaacttcatcgacaacgaaatctacggtgccaccatccgtacacaagtcggacagagcgccaaccagttctatggttacaagactctcggtgtcttctcgtcagctgctgaagcagatgctgcaggtctcttcatccttggagagaacggtatcgaccgcacctattacaaagctggtgacatgcactttgccgacctgaacggtgaccaccaaattacagaggccgaccgtttgtttatcggtgaccccaacccggacatctatggtaacatcttcacgggtatcacctacaagcacctcaagcttgacttgcggttcaactactctttgggtaacgatgtctacaactaccaacgttcgcaattggagggcggaagccgcttcatgaaccagtctacaacaatggttcgccgttggcaggttgaaggacagcataccgatgtgccccaaatcaccttccaggatcctctcggaaactcacgtttcagcgaccgttggattgaggatggcagctatctccgcctgaagagtgcaaccttgagctacgacttgcctttgaacagtgagtacctgcaaggtctgcaattctgggtacaagccaacaatttgttcacactgaccaaatatctcggcagcgatcccgaattcaccatgacctccagcgtcctcggacagggtatcgacctcggacagctcagccagagccgttcaattgtggctggtatcaagattaaactgtaattaataatcaagaatcaacaattaagaattatgattactaagatatataaatacatcctcggtatcagcgtcatctgcggaatggcttcctgctcggatttcttcgaccagcagtcagaacacgttgtcttcgctgagaaagaccatctgaacaatgccactgactctatctatagcgtcatcggcatcctcaacaaactacaggccatcggagaccgtaccatcttgttaggagaggtacgcggagacctcgtagacatcaccaattcagccaatagcgacctgcgcgacatggcaacgttcaacattggtgacgaaaaccgttataatcagccacgcgactactatgcggtcatcaacaactgcaactatttcattgcaaaagttgacacctcattgaagaacaaccgaaacgagtatatcttcatgaaagagtataccgctgtgaaggccatccgtgcatggacctatctgcaattggttctgaactatggcaaggtgccttttgttacggagcctatcctgaccaaactggatgcagaaaaggattatccgcgctacgacttgcaagctgtttgcgagtacttcatcaacgatctcgctcccctgacagaccgttgggctaacgaatatcctggttatggaacaatcagagacttggctagtgcatcttcaaggcttctctatttcccagtgaacgttgttcttggcgacctgaatctctggttagccagcaccacaggcaacaagtcgacctatcgtgaagccgccatacgctactacaagtacattagcgagcgcaatggccagaactcctcctaccccatcggaatcacttacaacgcttgggtaccaggttcaaccacttggaactctttcaggtacagccagtctggaagtctcactaccgagacctacgccacgaattcagagctcatcaccatcattgccggtgactccatcccagctgagggtaattacagccagttgcgcaacctcttctattcgaatgcggataatgaatatcgggtgagcatcgttccgtccaacaatatgtttaacctctcagagagtcaagctaactgctgtttgggaacaacaggtgcgacaacctactatgcacccgaaggactgtccgagcatctgtctggtgaccttcgcctttacaactggtatagctatggcacaacaaccgaccgcctcacaggagatcgtattgaaacttcgtacattgagaagtacacttcgcagcatgttcatatctatcgccgtgcaatggtatacctgcgtctggccgaagccttaaatggtgcaggtttcccccgcgctgcctttagcatgttgtcaacaggtctgaacaaccaggttctacgtgaagctgtatatccctactgctcagagagcgactccgcatggattagccaaatagacttccccgaggagcgttacgtcatctataccgcccaagcatttgccactggacgttatacaggaagtacagagcccaataccatgggcctccacacccgtggttctggctggacgccaatgaacgagttctatgtgctgcctgaagctcccaagccagtagtcgaggaacctgaggaaggcgaagaaggcgaaggcgagggtgaaggcgaagaagaaatcatcatcattgagaaagacacgcctgaacttacccaaaagcaaatggcctttgtcgatagtttgctgctcaatgaatgtggtttggaactggccttcgaaggcacacgtttctacgacatcatgcgcttcgcttaccgtcagccaaatcctgggcagttccttgccgagaagatttatgcacgtcgtggtaaggagaatagcgcaactatgcgcagtgagattaagaaagacctctcagaccagcgcaattggtatctcaattggaatggccagataggcttctaataattgacgaataaaaatagtcgtcactccatcaaatactgaaagcagtatacgaaaggagtgacgactatttttatgtgcttttttattttgcttcaagcgtctgggtgatgttctgttcacgatggcagatacgcacttccacaccgaatttctcatgaatgtgctctgccagatgctgtgcgctatagacactacgatgctgtccgcccgtgcaaccaaacgagaacatcagcgatgtgaagccacgttggatgtaacgggccacatgaacatcagccaactcatagacattatccaagaatgtcagtatctcgccatcgtcctccaagaaacggatgacaggttcatcgagccccgttagctttttgtaaggttcatagcgccctggattgtgcgtcgaacggcagtcaaacacgtaccctcccccatttccgctctcgtcttcaggaatccccttgcgataagagaaactatacacccgcaccaccaacgggcccttgccatcgtattttgaaaaagttgcaggaccgtcttgaggatgcgtcttatagatgttcgagtctgtggtcttatagccgtcagccctgttgatggcaggttcttcaatatgcgcaaactgcggcaactccgtcagtcgtttgagcatatccatcatgtagggataagggaatatgtcaggattcatctgcaacagcccccgcagattgtccatcgcaggaggaatgctgtcgaggaagtgtttcttgcgttcaaaataccctctaaagccgtatgcacccagcacttgcaagatgcggaacaagacaaacaggctcaaacgtcccacgaaatggcgttcagatggaacttcagtatagttcttcagcgaatcataatactcataaatcaattcgcggcgtagtttttggggatatttggctgatgcctgccataagaaagacgccaagtcataatagaaaggaccgcgccgtccaccttgataatcaataaagaaaggttcaagacgctgcccgtcggatgtcggaaccagcatcacattgcgtgcctgaaaatcacgataaaggaaactctcgctcttttctgccgtaaggtccttggcaaacattctgaagttggcctccagtttgagttcatggaaatccagttctgtggctttcaagaagcagtatttgaaatagttcaaatcgaaaagcacgccatcttgatcgaactctggttgcgggtaacaattctcccactccaatccacgcgccccacgaatctggatgttgggcaaggccctaatggtgtctaccaacaattgcttttccctttgattatatcgaccgccagcctcgcgtccaccacgaatagcatcgaaaagcgacagtgcccccaagtctgtttgcagatacctgacctcgtcgctgctgacagccaatatctcgggaacaggcaactgacgttgagtgaagtggtgtgtcagatagatgaatgcatgattctcgtcgcgactcgtacccaccacaccaatcacagtggcaggtacaccattgtcctcttgtgcagcaatgctgtccgagctgtaaaaacgataatattcgcgattactaccagcgccagccagacgttccacacgagcaggctcagccccactccaattgcgataaagttcaatgagttgtttcatgactgcaaagataataattaaaatggagataacaaaaaaaatcggatgtctcacgacaaccgattttcaaaaacaaactacttaaaaactaatctactaaaacaaatcaaaaaatatctctttcggagtcgctttgcatacgaaacatccgatattcttctaatttcgttacaaaggtagacatttttctataattgagcaaatattttcatctatttttttacaaatccgtagtaaaacatgaaaaaaatggggatggccgatttcgccacccccattttgctttgtatagtttgcaattcagccacttaacggtttacatcatgccacccattcctggtgcaccgcccatcggcatagcaggctccttctcgggcttgtcaacgatgaggcattcggtggtgaggaacatgcctgcaatcgaagcggcattctcaagagccacacgggcaacctttgccggatcaatcacaccagcctcacgcaggtcttcatatttgtcgagacgggcattgtaaccgaagtcacccttaccctcgcgcaccttctgaacgaccacagcaccttcgccaccgccgttgatggcaatctggcgaagcggctcttcgatggcacgctcaacgatgttgataccagtctgctcgtcggcattgtcacccttcaggccggccaaagcttcgatggcacggatgtaggttgtaccaccaccagctacgacaccttcctcgatggcagcacgagtagcgcagagtgcatcgtcaacgcggtctttcttctccttcatttcaacctcagagttagcaccgacataaagcactgccacaccacctgccaatttggcgagacgctcctgcagtttctccttgtcgtactgactcttcgtattctgaatctcgttcttaatctgagccacacggtccttgatggcctccttctggccagctccattgacgatagtcgtattgtccttgtcaacagtcactttgtcacaagtacccaacatctcgagtgtagcctgttccagtttcaaacctttctcctcgctgataacagtaccaccagtcagcacggcaatgtcttcgagcatagccttgcggcggtcgccaaagccaggagccttcacggcgcaaatcttcaaaccaccgcgcagacggttcaccacgagtgtggtaagagcctcagagtccacatcctcagcaatcacgagcaacggacgtccactctcggctgcaggctgcagaataggcaggaaatccttgatgttagaaatcttcttgtcgtaaatcaggatatacggattctccatcacgcactccatcttgtcgctgtcggtgatgaagtaagctgaaagataaccacggtcgaactgcataccctcaaccacaccgatgtgtgtgtcgcggctcttcgactcctcaatggtaatcacaccgtccttcgacaccttgcgcatagcgtcagccagcagtttaccaatctcgggatcgttgttggcactcaccgtagccacctgctcaatcttgtcgtagttgtcgtccaccttctctgcactcttggcaatgaagtcagtaacagccttcacagccttgtcaacaccacgcttcaagtccataggattggcaccagcggtaacattcttcaaaccctcggtgatgatggactgagccagaatggtagcggtcgttgttccgtcaccagcgtcgtcgccagtcttcgaagccacgctcttcacgagctgtgcgccagtgttctcaaacttgtcctccaactcgatttccttggctacggtcacaccgtccttggtaatctggggagcaccaaacttcttttcaataaccacgttacggcctttagggccaagcgtcaccttcactgcatttgccaactggtcgacacccttcttcaagaggtcgcgggcatccatatcgaatttaatatcttttgccatgatttaatttttctatttgactatttactactttactatttaattgtgaaattgtccaattgtcatattcggttattatccaataaccgctaagacatcgctctgacgcatgatgaggaacttctcgccgtcgagttcaatctcggtgcctgcatatttgccatagagcacctcgtcgccctctttcaagaccatttcctcgtcttttgtaccacatccagctgccacgatcttaccgcgcaggggtttctcttttgctgtgtcggggatgatgattccgccaaccttctcttctgccggtgctggtgccaccaacacacggtctgctaatggtttaatgttcatgattgatgaatttaataatttatatttaatgtttaatctttcatctttaatctaaatattcctcctcccgccctcttttctacgaaaaacgtgccaaacatgtcagactgacagaatggcacaccaatatacacatttattaaataaaaagaagtccaccgttgaaggacgatggactcaggacctaatgttttcacaacggaataatccttattgtgatttgcttaaaattagtgatgcaaagataaagttttttcatgaaagttccaaaggtttcaaaagaaatttatatatttgtggcaaaataactaaaacccattaacatgaaaaagatattaggtctcgacttgggcacaaccagcattggttgggcaattgtcaatgaaaaagaaaatgataatgaagcatcatctatcattagacttggtgtcagagtaaacccattgaccgttgacgaaaagactaactatgagaaaggaaaatctatcactaccaatgcagacagacgcgcaaagcgtagtatgcatcgtaatcttcaacgatacaagttacgcagaacgaatctcatagaatgtctttgtcaatacaaccttataacaaaggaaactccattatttgaacaaggcaactactcaaccttaagtacatacagagcaagagcaaaggcagtcacagaagaaatctcattggaagaattagcaaaagtattgctgatgattaacaaaaaacgcggttacaagagctgtcgcaaggtgaaagatggagaagaaggcgaactcatcgatggcatggaaatcgctaagaggctctatgaagaaaacctcactccagggcaactgcttcttgaattgtcacagaacggaaagaggaatcgccctactttctatcgttcagaccttcaagcagagtttgacaaagtctgggatatacaatccgctttttatcccgacatattgaccgatgacttcaagcattccctacatggattcaacaagacacaaacatcaggagcattttatgctgtccataacatcagtacagccaaaaatagcggaaaagaaggatatctccaatcacttatttggcgagctgatgctttgcgatataaaatgggaattgaagaggtggcttacatccttgctgacattaatggcgctatcaacaactccagcaaacgcttggctatgattagcgatagaagcaaagaactctatttcaatcaccaaactatagggcaatacttaatgcaacgcctgaatgagaatcctaacgccagcctcaagaatatcatcttttatcgtcaagattatatggacgaatttgaggctatatgggaaaaacaaaaacaatatcaccctgaactcactcccgagttaaagaaagagatacgcgacattatcattttctaccaacgtgatttgaagagttgtaagaatctggtcaactattgcgaacttgaacacgaagaaagagaaattctcgttgatggtaagaaaaagacaatcatgacgggttgcaaagtatgccccaagtcctcaccattattccaatgtttcaaaatctggcaaatactgaataacatccaagtttctgtagttggccataaacggaaaagaatcaagaaagacaaagaccaaccatctttatttgaggacacacaagtggaatccttgcaacgctttttagaccaagaagaaaaggacattttatacaaagaactgtctatcaaggagaaaatgagcaaaaaggagattcttaagctattgttcgagaatcccaacaatcttgacctcaactataaagaggtggagggaaacaagacaatggcagctcttttcaaatcctttcaagacattatcagttcgacaggtaatggagaatatgactttaccaagatgccggcagatgaagtaatgtcaatcacttctgaaatcttcacaggattaggctataagaccgacttcctcacattcaatcctttgcttgaaggcaaagcatttgagcaacaaccagccttccgcttgtggcatctgctttattcctattcaggcgacaattccacaacaggcaacgaagccttgtacaataagattcaggaaatctgtggctttgataaagaatatgctactatacttgctaacgtttcaatgccactcgactatggaagcctcagcgcaaaagccattcgtaaagttctcccccatatgatgaaaggctacgaatatagtgaagcctgcaatatggctggctacaaccactctacccgttctttaacaaaagatgatttggccaacaaggaatacaagtcacatatagactctatcaaacgcaacagccttcgcaatccagtggttgagaaaatccttaaccagatgataaatgtagtgaacgagattgtagcgacttatggaaagcccgatgaaataagaattgagatggctcgggaattgaaaaagagccaagaagaacgtcagttattagacgcagccatcagaaaaaacacaacagaaagtgagaaactacgcaaagagttagaagaagaattcggcatcaaacatgtcaccaaaaacgacatccttcgccttaaactttataacgaactgaaaccgaatggattcaaaaccctctactctaatacctatatcccacgagaagaactcttcagtaaacggtttgatattgagcacatcatacctaaagcccgccttttcgatgactcgttttccaataagactcttgaagtacgcgacatcaacatcgaaaagggagaccttaccgcttacgactacatcgcaggcaaatatgatgatgactatctagctgaatacgaaagccgcatagaagacttgtatgtgcaaaaagcgatttcaaagacaaagcgcaacaacctccttatgaaagaatctgacataccatccgactttttggaacgagatttgcgcgattcacagtatatagcaagaaaagcctgtgagattttagaagagttggttccgttcgttgtcacaaccacaggtgccgttaccaaccgtttgcgtgaagattggcaactggtcaatctcatgcaagaactgaattgggaaaaatacgatgcgctaggcatgacagatagttatacagacaagaatggtaatatagtaaaacgcatcaaagattggacaaaacgaaacgatcaccgccatcatgcaatggatgcactaacaattgccttcacaaagcgaagcattgtccaatacctgagtaacttgaatgcacgtagcgacaaatcgggcagcatttacggcattgaacagaaagaactacatcgtgacgaaaaaggccacaaacttgtcttcaatgcaccaatgccattaaacgagttcagagccgaagcacggaagcatctcgaaagtgtccttgtttccgttaaggccaaaaacaaagttactacgaagaacatcaacaaggcaaaaaacaaagacggacatcagttgaaagtacagttgactccacgcggtgcattgcataatgaaactgtatatggaaagatttgcaacttcgaagcagaatacaagaatgtggatggcaaatttaccgaagaaaccatattacgcgtatccaatcagaaataccgccaagccctgttagaacgtctttccgcatttgacaatgaccccaagaaagcattcacaggaaagaacagtttagacaaaaatcccatttggctcaacgcagaacattcacattgtgttcctctgaaagtgaaactctataagataatagatgtctttaccatcaagaaggctgtcgacaaagacttgaagatagacaaagtgatagatagaagggtacgcgaaattctacaacaaagacttgacgagtttagaggtgttgccgctaaggctttctctaaccttgacgacaatcccatttggctgaacaaggagaaaggaatttctattaagagggttaaaatcaaagcaaaggtttctacagaaacgtcagtccccttgcatatgaagagagacctttgggggaacattctgaaagacaaagaaggaaaagctattcctaccgactatgttaacacagctagcaaccatcatgttgccatctttgttgacgccgaaggaaactggcacgaacatgtagtttcattcttcgaagcaaccgcaagcgcattgttgggactacctatcgttgataagaattacaaaagagatgaaggctggaaattcctgttctccatgaagcaaaatgaatatttcgtttttccaaatgaaaagacgggattcaatccttctgatattgatatgatggacccaaacaactatacacttattagccctaatcttttccgagttcaaaagttttcaagttcattctatgttttcaggcaccatttagaaaccaatgttgaagaacaaaatgaacttaaagatacaacatggaagagtataaggagtgtaaaaaaactagaaggagccataaaagtacgtgtcaaccatattggtgctattgttgccataggtgaatattaatctatgattaagaaaactctatgtttcagcaatcccgcctatctctcactacgtgattcacaattggttatcaaactaccagaggtagaaagggcagctaacctcacagaagatttcaagaaatctgctgaggtgacacgtcccatcgaagatatcggagtggtggtgctcgaccacaagcagataaccatcacttcgggtgcgctcgaagcattattggagaataattgtgctgtcatcacttgcgattcccgttctatgcccgtgggtcttttgcttccattagttggtaacaccactcagaatgaacgcttccgcaaccaacttgatgcatcacaacctttgcgaaaacaattatggcagcaaacaattcaacacaaaatcaagaaccaagcagcagtgctctcccaatgcactgaggcagaaacaagatgcatgcatatatggctgttgctgatgatgcaaagatactaatttttaagcaaatcacaaccactaggtgcacgttcctttcatcctaacgctgttgctgatgatgcaaagatactaatttttaagcaaatcacaactcgacggcccttcttggtacaccccctacaactgttgttgatgatgcaaagatactaatttttaagcaaatcacaacagtgagttattaatttcttccattcgttgtgctgttgctgatgatgcaaagatactaatttttaagcaaatcacaacagatcctgataggcagcgagaaggagtcgagctgttgccgatgatgcaaagatactaatttttaagcaaatcacaactggctcacaactttcacctcgaagcctttcactgttgctgatgatgcaaagatactaatttttaagcaaatcacaaccaacagacgtaagtctctttggagttcttcgctgttgccgatgatgcaaagatactaatttttaagcaaatcacaacagtggttcgctgttcctattgagcagcttggctgttgccgatgatgcaaagatactaatttttaagcaaatcacaacaaagataagatatacggatactatagatgtgctgttgctgatgatgcaaagatactaatttttaagcaaatcacaacccgtagtcatagatattggagaaatttgcgctgttgctgatgatgcaaagatacaaatttttaagcaaatcacaacccctcgtagctgtcgtcctttgtctggctgctgttgctgatgatgcaaagatactaatttttcagcaaatcacaacgcgctgtcgtgacttgttgctcgtttcgaagctgttgccgatgatgcaaagatactaatttttaagcaaatcacaacagtgagttattaatttcttccattcgttgtgctgttgccgatgatgcaaagatactaatttttaagcaaatcacaactgatgggtatttattccgctgagccgttgagctgttgccgatgatgcaaagatactaatttttaagcaaatcacaacgcatctttcttcttggtgctgatgaaggtggctgttgccgatgatgcaaagatactaatttttcagcaaatcacaacactttattttaggaaatcacgcctaacttatagaactattctaataatagaacacctttgtacatgtacaagaagcatagaaaaaaagtgtatttatttttcctaatttattttacaaaaccttgtcaagtgcatcattcaatctagagtggaaataagggtgaaaaagcgattttcatgctcttttccctccacttttgaagagtggatttgtcacttgtggcttttgaggttgtcatttgtggcctttgaccttgtcatttgtggcatctgaggcgctcatttgccacaagtgagaggctcaaagcatagctttgacaatcgaaaagcatcgttttggcagggtgtaaaaatgtaagaaaaacggaaaatgttgattatcaacgacttgcaaaaatatcgattttttgcgttttttcggccaatctcccgttcgctctaaacaatggcctgtttttaggggtcaaaattcggaattaattttacaaatcgcttctatctcccgcccaaaaggagtgacaagaaaaccttttgggttggctattagatttatgttaaagataaaacaaaagattgcagaacaaaacttggatatgtcttcaataatcagtatctttgccatatgaaacaaaacaaagcaaacttcgcacactacgagagcccactcggcggcatcacgatggcttgcgatgaagatggtttggtcggcctatggttcgacaggcagaaatactttggacagaccgcctcgtcccctctgccagaaatgacggtcgggcaaaaagccaaattcgatacaataagcttttgtcccattttcgaacagacaaaagaatggctcgacgtctatttcacaggacgccaaccatcgttcacgcccccactccatctcaacggctcacccttccggctggccgtttggcagatgttgctggacattcccttcgggcagacaacgacttacggtgaactcgcacgccgtatagcatgcgagcaaggacgcacgacgatgtcggctcaggctgtgggcggtgctgtaggacacaaccccatcgggctcatcgtcccctgccatcgcgtcataggggcagacggaagtctgacaggctatgcggctggagtggagaagaaacgatggctgttggaaatggagggcaccctctaaagattgttaatcgtttggcggattgaacaaaaagccttacctttgtgaaacaattaagaatgaacaaccaacacgtatcaactaattatttatcacaagaaaaatgaaaagaaccattatttcggctgttgtggcactgatgtgcatcgcagccaccgcacaagagagaaaacaactgcctgcaccacaacccgcaaagttgacgaagatgacgctgatggacgcgctgaagatgcgccagtcgattcgtgaattcgtgccgagccaactgtcggacgaacaactgtcaatcatcctgtgggccgcttgtggcatcaaccgtcccgagtcagggaagttgaccaatcctacggcaatgaacatgcaggacatcaaggtctacgtctgccgcgctgacggcgcatggctctacgacgccaaggggaacgccctcgtgaaagtgctggacaaagaccttcgtgccatcattgctggtggtcagacatcggtgaaggaagcacccgtcacattactgctcgtgagcgaccagaagaacgcacgccgcccgagccgcgactttgcttattgcgatgcgggctacgtgtcgcagaacatctatctggcctgcacagcactcggcatgggcaccgttgcacgcgctatgatggacaaggatgccctacaaaaagaattcggtttcgacgagaaccagttcatcgttctcaaccatcccatcggattcgccaaataatgaagaaaccgcccattgagaagcccgaagatgctcagcaggtgctgctgcatgcttgctgtgcgccctgttcgtcggccattgtcgaatggatgatggccaacggagtgcgcccgacgattttctacttcaatccgaacatctatccgcgcgaggaatacgaaatcaggaaagaagagagcaaacgccacgccgagagtctggagctgcaatggattgacggcgactacaaccacgaacaatggagggcggcagtctgcggattggaaaacgagcccgagagagggcgacgttgcgagcaatgcttcactctccggctggtggaggccgcccgaaaagcaaagatgctagggttgaagtatttcactacaaccttagcatcatcacgttggaaaagcatcgagcaaatcaatcgcgccgggatggcggcgcaagaggcagtacctggtaccgtgttttgggcacagaactggcgcaaaggcgggctaagcgaccgccgcaaccaactgttgaaggaattcggattctacaaccagcaatactgcggttgcgaattctcacaacgttaatcaatcagtttctcacttgccacccaacgcattcacgatctggtcggcaatctgctgcatccccttcacgttgggatgcccattctgcttgtcgatatctttcagttgaatcatctgtatgccgtagtggctgcaaatggtcttcatcgagcctgtgatttcatctttcaactcagagttggagatgacgaatatgtcggctgttggatagcgctccttcaagccatcgagcagacaagccattgctgggcggaagcaatagaggtcggcacgacgccaatcagcatatttgaactcgcctatcggcgcattcgcccatgagtcgttggtacctccgagaagcagaatcacgtcgggcgaacccagattgtccatgcgtgtgaggaacgagcgatgggtatagtcggcatcattatagcccgagttgcagatggtggcacccgaccacgagttgttacgctccagtttccaccccatccgcgtgatgacctgatgccaccacgtctggctgacgcgcgagacatcggtgcgtcgggtgtcgagcgtcttgaagtaccaggtctccattgtgtcgggagtgagccaaccttcgaaggtggaataggagtcgccgaagatggtcaccgtgggatgtgccttgcccacagggtttcctgcccacatggtgccaacgctcaatgccaagcacacgacgcccatgaggagcatccgcacaatagcagatggcatctggcttgcgcttgataagcttctctgtttcattttctgattatttataggtccaattatctttatatttctgctttttaatgttccctattgtcaccctttttctctaattgattttcggtttcagttcatcgggtgagtcgttggtgaacatatttaccggtggtgccgtacgctcgaagagatgcgtgatggtctcgggatgcaacgtgatttgcggttggaaatccgaactgtgcatataggcgagtatagactgccgcaattggcgggcaacagggcgacgagtgagggcggacgtgatgtcgagtgtggtcatgagaagccgccctttcagcacacgcgcctcgatgagcatgcccaacttgcggctgacatgccacgtgtcgatgggctggacgatgggctggtagtcagcggggaactccgagaggttcatcacctgcgccctattcaccagctcccaccactgcaggtcttgccagtcgtcggtggggaactcgcggaaaacgggatgatggctctggatgtaggcgcccgtagtgtgaggcggccgcatcttgaaccaactggtgttccagaagacgggcaggaacgtatggcgcacatcgttaccgtagtgcacctttccagctgcacacaacagtacgtcgccacctttctccaataccgccaatgctttttcgtcaagtgtgtcagtgatgagaaggttctccccactcacgaacgaaggcatttttctctcctctccatcccgagcgaagctccaccccccgttgccttccccctctcctctctcctctaaaccaggatacacccaaaagtcccaatggttttgggccgtctttccgtcagcatcaagaagtgacacggtcatcgtgaccttgcaaggagcatcgaatttatccaatgcgaaaacaacttcacccacttcgttgttcttaccaacgggaatgtccttttgggtaagaagttgacggacgacaggtgacagattgcggctgtcgctcaactcatacgttacgcgagtgtcgcgcaatgctcccgaactggcgttatacacctcaactggaacgcgcaaggtctcgtttgaggtgtaaacaaacttagggaatcgggccaacggtacaacgggcgaacaaaactcaaaccactcacgggcatccacatagcctttctcacgccagaagacattgagtggacctacgagtgccgtaccctggccgctatagtcgttcagcgacagcaattggaagcctgcatagtcgggggttcgaagatttcgttccatctcgtatttgtaggccaacgtctgtagtttaccacttgcgtgcaggaacttttcggcttgcgacgccataccattgtcgtgcaacaggtcgcggaatatctcgaaattctttgccttataggcacagttgtcatattgctgtatctccttgaaatcggggaaggcacaccactgaccttgctcgtgggctatgataggcgtctggttaggctctttgtccttatagttgcgcgggaaggcgatgccttcggaatagtcgtcatcggacgatggcgccttgcggtcccattcgagaccgcgtgctccacctttcacatggtattcgctaccgaagtcccatgcccatccgccaccaaccgatgcaccacaatagactttcgtggagtcgtagtcatgcatcgccactacccagtcgcgacaatagggaacccagtcaccagcaggctcattacccgctgccatcatcgtgaacgatgggtggttgccgtaacggtcgagcattgccttgcattcgtccatcaaatattggtcgatgctcataccccgacgcaatctcacgccatgattcggccacgacggaccttcgggttgcagatagatacccacctggtcggcagcctcaaaagcggcctcgggcggacaataagaatggaagcgaacgtgattgagaccatactccttgcacttacggaacacgcgaagccacgagtctacgtcggtaggtggatagcccgtttcggggaagcaacagttctcaactgttccacgcatccagatggggccaccgttcagatagaactggcgtccttcaatcttaatatcgcgcatgccaaacgtggtgcgcacggtgtcgccagcatatactgcggtcagttcgtaatatgcaggattaaactcactccacagttcacaactatcagtcatgtcgagctcaacctctagatatttaccttcatcaatctcccctctcttatcccttctctttagctccaccacatgatgccgacggctgttcttcaactcagccttcaaaaacaatggacgagatgaatgcgatgatagaggagtggagaaatgcaagcgaacgcgcgctttatgatgagtcacatcagcatacacacggatgttttctataaagtccatcggacgcgactgcaattccatgcgtcctatgatgccgttccagttgccttgcgtctggtcggtcacgctatgcgaatcttgtcctacacaaacattctcaataccgttatagactttgatggcaatcgtattctcaccgccatacacaatctgaggagtcagatcgtattcgtgaggcaccgacagcgacttcctgtgccccacctccacaccatttacgtaaacggtggtctcaatgtgcggccgttcgaggaacaacacaacgcgacgccgtttccacgacttgggcacaacaactttcttctgataccaagcgacgcccacgtaatgcttttcgggagtgaggaagaacgggaatttcatttgcccttccacccgatacttctccatgtatgggttgaaatagaacgaagaatcgtaaagcgaacccgtccattgcgtctttatagacaccacgtcacccttcccgttcgtcagcatagaaccaggaagggtcaccacatcatcatatgaaactggtggaacggcagtcccttgatggaactgccactttccccgcaagtctatcgtaggctgagcgactgacatcaagcaacagatacttgcaaatgcgctcaataacacttttctcattcttatatttttctcttatgtcttatcacttggttaaacagattgcacggatgaatttattgcatcctaccatgaaacgagttgccagatgttcggcttttcgtattcagcacatcggcgacttatcatttgacgtaacgcaggaacttgccatcctccgtcattccagccacgctgaccgcaaccctcgtttcgcgtgagttgttgtaaaaatcaatgtggaaagtaccgtcagcatccaacctggcattcggattccaatagagcgtacgccgataatccgtagggacgggaggttgctgcttgctgtagtcaggcctgtagaagtcttcgggataggcaaagccatcgaacacataccggcggtcgcgataggtatagcgttttccatcgtcggccacagcctcatacaccagcgtgatgtcatcgcggttttcactctctgacaatcgctggtcggcattgcgaggttcataatcggtatagaaacggaaattctgaatacgacgcagatgcaaggcatcaaacacaaacgccgtactgcgatgcttgacttcaggaagcatcccttgataattcttatagaacgtgtaaccgtcgtcgagattagcccttacattatatgaattataacgattcatgttgccatacaccgtgtaacaggcaatgggagggaatgtgcccatattcaccacgccccacgacagaccacggtcggttgcctcgttataaaggtcgtaggcatctatcacaaaagccggcttcgtaaagtcaatgccccgacgtccacgccgacgggcctcaacgttcaccgtctcaagcgtgtggtcgccctccaacttgctagatgttggtttcttttccaactcctcattatcagaaggaatgaatcgagaatcattgacaggctgatgagtctggtagaaatcataaggatgactgaacacaggatagaacaggtcacgcttcacataaaagtctggataactttcctcgtccatcaccttcttgtccttacgcgacatcatgtttcgcttgaccgaatctttttcatgataagctttcataaagaggatagccttaccatagaaaggtggaatctggaaaaggaaacggccaccatcgtgcgtcttctgaacaacgcccgccgtctctgttcccgttgtaacttcggcctcaacaagcacttctttgcgcaacgagccgtgattcacgcccaattcgccatcccacacttcttcaccttcatacacaggctcagacgattccttttctgcagcatcgtccccctgagcagagtcgaccgactgagctccctgaatggtctccatcatttccatcatctcctccgccaccgattgacgagcgttcaagccttccacatcggtcagcaagagcagaggcaccgacaacatcttgttcacgctgccctccacggtcaacgtcacctctggagtgtagcgcaactgctcaacagccttatagcgccgccaaccttgcaccatcatgagcaggtcgagcgccgcacgatgctcggcgtcatctcgttcgaaataatacgcaggatgagccacaaagccttttaagtcgctcgtcagcagcatctcactcagcatgtctccatctgcatacgttgcctcgtcggtctgtgcatcgtgtacggaaagcgaaaaagatactgacaatttctcttcttctgttccctccgatttaactgtcactcctattttctcatacggcatgaagtcggttttcccaccaaggtcaacattcacgggcaacgccctgttttctccgttcacaaatatcaaccgagaggccagcgtattgccttccgcatccacgatctgaacatcgttcactcccgtaggaagatctttcgggagagccacctcacgtctgcctccgtttagtgtcactttctcgaagctcacaagacgtccacgacaaagaacggcaacgcccacaggttggccttccatatccgtcgaatgagagagggaagcggtccaaactgaagaggaagaaggactttgagaggaaagagtgagcaccaatcccttttctcttgcctttggcaagtcaaatgaacgagtttttcccttccattcaaatgtcaactggcctcgtttcttcgtgggcaaataatcgaagacgccgcgcccttcgcgc

SEQ ID NO: 2197 - DNA, 24194 bp, synthetic construct
  source 1..24194: mol_type = other DNA
  misc_feature 1..24194: note = Synthetic
catttacctcattagcctgtatttcacatacaggttgtaaatcatagttatatgaaaacaataccatacataagggttggtactacattttataaattggtgaaagcacccacaatagcaggacattttgatgaattacttgtcccctggaatgagcattccattttttaaagaaccgtaaacttcaaaatagtcaaacaactcggatgtggtttacaccaaaggatatttacacccctgcgcttcataggttgattaagcataacagaaacagagtagaaaaagaattggcgagtattcttttaagcgccatggataagtatgaactcgattccattgctatatgtcctattgatgccttgcacatgttaaacaagacaagagtaagaacagatcttacacaattaaggaggttgcttaaaagagagtggaaactggagaaccagaaaaattccaatagctatcaaagaattaccatttggagcaatggcgatatcaatatggaagatgcaaaaggaaggtacttcacggtggaaaaagaatttttaattaaaaattttgatgatttgatgacagaataagcgaatgtcaggtttcataagggctacggctgtcatcaaattgtcatcattctttcatcaaaataaaaagtgatgacaggaatttaggtattacaattaaaaatgatgaaatgatgaaaaattgatgaagctgtgaggtcaatctattaaagggatgaacgtgttttttcatcaaatcatcaaaaaaacttacaaaataaagcatatgaaaaaagaactattgaattgtgaaacagcccgcaatatttgcattgttcaaacattggcaaaactaggacattttcccactcggaagtcggagaaagaagcttggtttttaagtccttttcggtctgaatcaaaagcctcttttaaagtgtctttacgtttaaaccgatggtatgatcatggagctggtattggaggcaatgttattgaccttatctgtctgataaaacaatgttcggttaaagaagctttggagttattggatcatgaagcttttaatttttcttttcatcagccgcctcgtctagaaaaagagtctggaattgaagttgttcaagtgaagcccatccaccaccctgccctactcgattatcttaaatcacgaagaattaaaccgtcagcagcacggtgttattgtaaagaagttcattataagctggaggataaaaagcactttgccattggactcaaaaatgtttctgggggttatgagcttcgaaacaaattatataaaagcagcgtttctcccaaagatattacccttatcaaaaatcaacagtccaaactcctcatatgtgaaggtatgtttgatttgctttccctggcttgttatgaccctaccctttctaaaaaagcagacctccttgttttaaactcggtggcatttgttaaaagagctgctgattacttgaaagattacaagcaagtagccctctatttggatcgggataaggcaggtaaaaaagctaccgaatttttattgggtgcgcattcaagagctgtcaataaatctgaattatataaaggctatgaagatgtaaaccagtggtggataactaaagcggatgggtaattgcgaagcaatttcaagatgtgtttttgttgccacaaaaaccatcttgctttactcccgaaggtcgcaaagggtgcagcattaaaaagtgaaatactccctcatataaataattaaatcatggcaaaagccaaagtaaaaataaaagcaacctatatcaaatttcggtgtacccgatttgaaaagagattgttacaggtcaaagcaaaaagagcgaacctcagtttgagttcttattgtcggatgacggctttggatgacaagatcattgagcgatttaccgaagaacaaatagaggtttataaaacccttattcagtaccatcatcattttaaacgcattgggaacatgtttaaaaaaaggaatcccaagctaaccgatgaagtttaccaactcgctgaagaaatcaaaaaccatttgcaaaattttaaaaaatgataggaaaaggaatggctatagcacatacaggggcttccatgcgttacggaatgaatcaggaaaaaatgtcagaagtggtctataaagcacacttagctggagagactccttcagcggtaactcaggaatttaagattatacaagataccaattcccgttgccagaaaaacaccttgagttttgtgctcagtccaactgtggaagatggaaagaaattgagtgtaaaaaagctagaagagctcaccgataggtttgtaaaacaaatgaaactacaacagcatcaagcaatggcttttgtacaccgagataaaaaacaccttcatgttcacctgtatgtaaatcgtattgggtttgatggaaaggcttataatgacagttatataggaaagcacagtcaattggcagcagagaaagtggctaaagaaatgcatttaaccaccactagagaggtgcaacaagtaaaacaacaatcgctattacacattcgggcacttatcaaacaacaacacttaaaaactttacaaaccagacccaaaaccgtagatcagtatataaaacgcatgcagaaacaaggagttaaagtgattcctgtgattaataaatccaagcaactgcagggatttcgatttacctataaatcgcataacctaaaaggaagtgctgtccatagagaaatgtcaggaggtaaaatactacaagcgatttcttataacaatgcaaaaggattaaaactatcaaaagagaacacccttaaaatagtaaatcaaacagtaacccttaatgctaatcttgcagcatccatcgctaaaaaagtggcaaaacatgttattaaaaaagctattgacacggggattgggattggttattaaaatagaaaacaatggcaaaattagaagaaatagcagctttgctgacggaggaaattgaagaatttaatgtatcggtagctaaattagaggggctgtcaaaaaaacttcgtgaagtaaaagtgaaagctgatacttcacaaattgaagatctgttggaaacacatctaaaaaggcaagcgcaatttgaaaaggtgcaggctacaaatacaagagacttaattcatagtatggataagtccaagctatttccgaaatggatagtagtatgtagtattatatacatcgtgcttttattagtattgggttttagtacgctaagttaccgacatacgaatcagcaattaaaagataaaaacgaacgtataaaaagacattatcaaagttttataaaggcatctcctgaagttgaagcacactacttgaattggatgaaccctcctgaaaaccaagcgaaatagtattagttctggtaagatttgggggtatgataggtttattaatgatgctatgtaatctgtagttttgaaatgaaaataggtgtactcttttaaggtagctatatgcaaatacatatagttttattgcaatcgccgttattatatgcctatgcatataatatcaaaaaaatgcgattatttgatatgtgtcctagaaatgaggttgacgataactttaatcatcatatccttttcatttgggttactttccgctattaataacgttaatgccaccaatgcattatcgggaatgattttgctaccatatttcgtaaataatatattgttcctatccaaaaaccatacaaatagataggcagcaattcttttattgccatcggaaaaagaatggtttttcactacaaaatagagtaagtgtgcagctttttcttcagtagttgggtacaaatcttctccaccaaacgtctgataaatattttccagagaacctttaaaggagtcgtctttttcccttccaaaaagtccttcgaacttagtttgtcttcctaattcatcaattgcttttcgggcttcctcataagtaatcttatacacctcataacttccctgttctggcaaactcaagcgttgatggtcgtaatcatccaacaaatctagcgccctagaatactgtgctatgatttttataagacccgctgattcatcagtattaagcggatattcagaaattactttttcctgtaactgcaccacatttttaagttcttgtaactgttgggttcgctcctgaagtagtttttcattaatggcaaacccttgtaataaatactcttttaatatttttgtagcccattgtctaaataaaattcctcttttggaattgactctatagcctacggatataatcatatcaagattataatgaagcctgcttctagttacttcgcgattcccctctttttgaactgttcggaatttccgaacagttgccgcttcctctagttcactggagcttaaaatatgtttaatatgctcactaatatttgctttactagagtcaaatagtgttatcatttgtgtctgagttaaccatactgtttccgcttttaacgtaacatctatctgtgtttgaccattttcagtctcgtatataagtatttgttcttttgccatcgtaaatacaatattataaaatataaataagatgtggacttatttcatatcccagtaattaaaggttatcaaaataaagaaagcccacgccattgcatatgctataaacatttagtgagcgctttagataaacctcacccctacgggtgtacaagcaccctctaaattaaataattaagctgtaataagctcaatacctgccttatcgcttcacctaatcgtaactcgctctattgtattatcatcaatatccattgaaagtatatttaagtttccacttccctcattatgtacaaaatctcctccacctccatcagcagtaaactcaaaatcaaattgaacttcatgatgcgttttacttaaagagataacgtaatcggatccatcataatatgtttcagtaaaagattggctaaacacttttgtcaatccaataaataaaaataacagaaaaagtaaatacttgattttgggacagtaatattgatccataatagttgatacgttagttggttttctaggttaggagatatttagtagttcaaacttaaaatggatttttttttgatttattaaacttcaacatttgatgcttcatttatagataaatagacacatttattcgttctataactaaaaaaagaggatttaatcagtgctgattactgctttttaaattcattccaatcatgcatctttatacaatatctaattttcatttattaagaaaaagaaggacatgatttatcctttacatattttataattgaatttttagtttaaatttgcctctctaaaccttaataaatttactatgtttaaaaaattactatttgtaggtactttattaactgcgatggcatcttttggtcaagaagtaagctttggtgttcaggccggttataccaatctggaaggaaaatcttctaattcttttgaagatgtctcttattccggaaattcatctggcttttatgttggagctttagctgactttaccttatcagagagctttcatttacaaccttccgtaaactatgccaatgcagaggaaacaaattttctgattgttcctgtgatggctcaatatcacattgaaaattcaggtttttatctgcaagcaggaccgcaggcaacctttatgttggaagatacctcaatacaaggaatagacgtcatgaatacctttggtctggacttggctttcgggctaggctatgcgattaattctaatttctttgtggaagcaagatatagctttgagctgaccaacaggtactcaaaagatatcaaagatgctgctgatgcccaggacatagacgtagattcacatattaacgccttaagtattggattgggatataaattctaatgtatatatgcaattgatttaaagggaagcaaatcgcttcccttttttatgtctttaaatgatatccatactaatatcatcaaaaaagcttactgcatacactaattgaacttaaagagtcacctcaataatttttttttaaaaaaacataatgaaagtagtttatctgattacagaaaatataatttctcgagagtggagggaagtgtcaaatttcagttatttacttttctttctttcagggttttgccaagtgttgaatactgaatatataatcactttatcttttgaagtttcataaatgattaagaatggaaaacgttttataaatgcttctcgataaggcttacgctttgaggagagtgttttggattcgctgtaatcctatcaaaataagtgtcaagatgctttaaaaattcttctcccaatccaacacgttttaattcgtaataaagataagcttcaatgatttctatattggcttcgtccttaacttctaagatatatgccatctattaaccggcgtttcttgcattttgttttacttgttcccaagtaaaggatttgctttctccttttaaatgggcttctctgcgtttatcgatcttacgatattgttcttcgcttaacataagctcctgctcgtcgttctgataactttcagccaacgcctttatcatttttaaaagtcttatatctgcagtatctatgtattccttgacggtatttcttagatctaccgttgccataatattttccttgttcttattgtaaatatacaatttctgttgcataaattttgtttttaggtggtcgaaatttgtggcattccagtttttaagatacattttatgaactagatattgtctctgaatcacattgaccatgagtcatatatgctatttctgcatatttacccttataagaaataatagaatctaatttagaacataacttccgaactatatataattatttgttcttgttcttttgccatcgtaaatacaatattataaaatataaatcagatgtggacttatttcatatcccagtaattaaaggttatcaaaataaagaaagcccacgccgttgtatatgctataagcatttagtgagcgctttagataaacctcaccctacgggtgtacaagcaccctctaaattaaatcattaagctgtaataagctcaatacctgctttatcggctttgtattttattttagtcattaactcataataactccaattcctaaggacaaagtcttcctttttagcaatctcgattttgtcctcttgatttattaaaatcagtgttcccgcttgattttttacacaaaaatcaatcagttttctactgtataaatgtaagcgatgggatacataattagtttctgcatctcgaagcttctccacagcctttaattttcgcttcctcccttttcctgatttacaataagtaattccttcttgtgttcttttataggcggcttgtatagctagccttcggtataaaaattcttctcgacttccaatagttagttttgttttgcctgttttaaccactataggatactcaagagaaagcgaagcttctgcgataacttcaggtttaagagcatgctcttctttctcaatttcaaataccgctagccaaaagattttaccatcctttaatttaatctttgaagtacacagtttcatatctccttcaaccaaacgctctaataattttcgtttatcagtatagtcttttcctaaatacgttttaaacggtatggaaaacaaacggaaacaaaatgcctttttatcaggattataggagattcgactcattgttttcgcagggaacggaaatgccatgtccctcttgaaatttcgaagggaacagagccctttccagtaatccgatttgttcttgttaaaagtggacaacaaggtattgttcaggctcgatagaatatcggttggtatttctcctttaaacttgtcacacaccactcggaaagttgtattcatacgagaacgctgcaaaataccatctttatcttttttctcatctgctagtttatacttaattccttcggagaggtaaaaaaagtctttaatcatttcctgcacatacatatgagacatcataatattcgctgctctaaagcaccgattctggtattgatataatttgtctagtttctccttccgctcttctttggttggtaggtctactagtatctgaatttttcgagtgagtttcagtgttgatttccccataactatgctgattttaattgctgcttatgttgctcttgcattaacttataggcggtcacaaattctttgtggacttccttttgggatagtttaagttcattggcaataaatgcaaaagattgtttctctttacatcgtaactccaatactcttttttgttcttcggtcattacaccttgcatctttatcccaatagctggtcttttcttaactgccttcatacctccctgatggatgatggtttttaaatcttctatggctctttttacctcattactggtctctgtaatacctttccccatcaccgcaccaattgctttatattgaaaaccgtattttaaacagagttctattaggtgttttctctcattacttaataggggtaatacttttttgagcttttcaaactgctgctgatcgaattgctgatcttgaagatgcgtatcaactttttctggatcatagcctaccatataatcttggtaattattgaaattatctaaggaataagtttttctataaaatttatttctgggcttgctatagtaggagatacattctcttttcatcacaaattttaagaaaaagtaaatatgttttggcgtttctatcctgtctctacaaacccacagttttaaaaaaacattttgaaccaaggtcgctatcacaaattcatcattgagccatcgttttcccacccagaagatactcctgttatattgcgcatgaattttaaccaaagcagcgggatcattattttttaataattcaaagtttgtgtgtggcataatagattttgttttattaaatgctaaacccacttgaaattatcaaagccatgcaattgcctagccttctaaagacaagaaagaatccacattaaatctttattaatagaagcatggccggataccatgaaaaatgaagtatgtgaattataggattaaaattatcgattaccggaattaaaaaagtgcaactgggtatcctataattaaaaatatcatattgggttctttggttttttcttaaatagaatgtcaaatacagttactccatccccataacggaaaaaaccaaacattttaatttctctcttaaatatcctaaaaagcatttgttatagataactttttatatggggtctatatttattagtatgccctaaaacaatgttaagcacaatgattttaatgctaattcattaattgatagtcaaatataacaaaaaaaaacatctgtaatccaaatggcttacataaaatataataaatatgtgaaaattgcagtatggcaaagctttcgaaagaagatatagagttaaatattaaaatcgcaaaaaggattaaaatccttcgcatggatattagttctaagccttcacaatttgctaaagaacatatgattgatcgtcaagtcctacatcgttgggaaagcactaccgataatcgtggaatctcaattcatactatatacaaattcaccaaattaattgggatttctttaaaagatttttttgacgatcctctatttaaataataatatatactttgaaactccataacttctcttaagatggagttaagggttagacttcctttaaaataaagaaggcgacacaagtgccgccttaaatgttttcacaacggaataatccttattgtgaattgctttcagtactacaaatatatataatccaaatttaatctcattacggttttcctcatcgaggttagataaaatccttgtatatttattttttcgacatcaataatagcattatgaaaaaagttttaggtttagatttaggtacaaatagtattgggtgggcgctggtcaacgaagccacgaaagaagaaaaaaaagaagggaaatcctctgaaattataaaacttggagttcgggtaaacccgttaactgttgatgaaaaaacaaattttgaaaaaggtcgtccactttccactaatgccgatagaaccttaaaacgatcagctcgaagaaatctacaacgttataaattaagaaggagaaatctcatcgagattctgataaaaaatggtttcattacaaaagacactccgctaacagaaactggtaaagacactacacatcaaaccttaaaattaagagctaaatcagctaaagaaaaagttgatttaaaagattttgctaaaattttattgacaatcaacaaaaaaagaggatataaaagcagtcgtaaagtaaatagtgatgaagatggtctagccatagacgggatggccgtggcaaaacatttatatgaacagaatttaacaccaggacaatatgtgcttaatttgcttcaaaagaataaaaaatatgttccagatttttatcgttctgatttacaagaagaatttaaaaacatctggaacaatcaaaaaacatattatttcgatattttaaccgatactctttttgaagagctaaaagacaaaaacaaaagtcaaacttgggcaatctgcaaaaaaccttttgatattgcaggaattaaacaaattggaaaagcttccgataaacggttagaacgctataaatggcggacagaaggcttaacccaaaaacttaatttagagtacttagccattgctttacaagaaatcaataacgatatcaacaaatcgagcggttaccttggagcaatatctgaccgaagtaaagaactatttttcaataaagaaacggtaggcgaaaacttgtataggcaactagtaaaaaccccacatacttcacttagaaatcaagtattttatcgccaagattatttagatgaatttgaaaccatatgggaaacccaagccaaattttatccacaattaacccatacattaaaagaagaaattagagatgttatcattttttaccaacgaaaattaaaatctcaaaaaagcttaattagtttttgtcagtttgaaagttgggaacaaacgtatatagagaaagaaactggaaagtctaaaacaagaactgttggcagaaaagtaattccaaaatcgtctccattatttcaagagtttaaaatatggcaaaatttaaacagtttagaatttagaaattctgatgaaggcgaaattattgaatttataaagcttgacgaagacattcgacaaactgtttttgaagaattgaacttacgtggtaatttaaaaccaaatgatgttttaaaaatattaggtaattacatctctttaggtaaagtttctcaatggaaatgcaattttgaagaaattgaaggcaaccgaaccaatgcagcactttataatgtctatcaaatcattgctgaaaatgaaggttacggatttgactgggcaaagaaaactgccagcgaaattaacaaagaacttaaaaacatttttcctcaactaggtattgatgcttccattttagattttgattttacccaagctaattttgacaaacaaaccagttaccaactgtggcacttactatattccgctgaagaagattttaaaatttcagaagaagataaagtgttatatgggaattcaagcgtatcgttgaagaaaaaactacatcagaaatacggatttaaacctgaatacacaaaactactcacaaacataagcttacagcccgattatggtaatttatctgcaaaagctatctgcaatatacttccttatttaaaagaaaacaatgtatattctgaggcttgcgatttaacaggctacaaccactccaattttttaaccgccgaagagcaagccaaaaggccattaaaacctatacttgaacttctaaaaaagaatagtttacgaaatccagtagttgaaaaaatccttaatcaaatggtcaatgtagttaatcaagttattgaaacctacggaaagccagatgaaataagaatagaacttactagagaactcaaaaaatcagcaaaggaacgtgccaatatgaccaaaagcattgctgatgccactaggcgaaatgacgattatagaaaaaccattattaaagaatttggaattccaaatcctaccaaaagtgatgtggttcgttatcgattatggcaagaattagcatctcgaggatataaagatatttttacggatacagaaataaaacctcaagaattattcagcaacaaaatagatatcgagcatattattcctaaagcattgttgtttgatgattcgttttctaacaaaaccttggcgtttaaaaaagataatcttaaaaaagccaatcgaactgcttacgattttatagccaacgattatgcacctaatttagaaaattatatcgaaagggttgaatcactgcataaagatagaaaaattacaagagccaaacgcaacaagctcctaatgctgcaaagtaagttacccgacggctttattgaacgtgatttgcgaaacagtcaatacatcactaaagaagctaaaaaaatgctttatgaagtatgtagaactgttgtttctacttctggaagcatcacagataaacttcgtgaagactgggatttaattaatgtaatgaaagagctaaattttccaaaatataaagctcttggtcttactgaaaaaattgaacgctatgatattggtgccgaaaaaatgaaagaagttgaaataattgaagattggaacaaacgaaacgaccatcgtcatcacgcaatagatgcattaacggttgctttctctacacatagtcacattcaatacctaaatcatttgaatgcacgaagagatgaaggccataaaaaacacgctgccattattgccatagaaagtaccattaccgaaaaagagggtaataaaaaacgacggtttattgctcctttgccaaactttagattgcaagcaaaagagcatatcgaatcaattttggtttcttttaagaataaaaataaggtagttactaataatattaacaaaaccaagcgtataaaaaaagacaaatttaatactaaagtacaactcactcctcgcgggcagcttcataaagaaactatttatggtaaaataaagcaaccgttggagaaacacattaagcttaataaaagctttacacttgagcaagccaagttaattattgacaaacgacaaagagaaaaagttttaaatcacttagaaaaatatgcccataatagtgacattgcttttaacagtaaaacgctaaaaaaaaatcctctactgattagtgatgaaccgcttaaagaagtactttgttttgaagaggtttttactattagaaaagacatttcatacgataattttaaaaacgaaaaacagttagataaagtaattgacgaaaaggtaaaacaagctctcaaagagcgaatcaatcaatacaatggcgattttagagaagccttttccgatatagagagaaaccccatttggctaaataaagctaaaggaatatgtgtaaaacgagcaaccataaaaggggtaagcaatgcagaacccctgcatacagcaaaaaatcatttaggcgaagaggttttaactgaaaataaagaacaaatccctgtagattatgttagtacaggaaacaaccatcatgttgctatttatgaagatgaagatggcaacctacaagaaaaagtggtttctttctatgaagcggtcattcgagtcaatgaaggcttacctattatcgataaagagtataataaaagcttgggttggacatttaaatttacaatgaagcaaaatgaaatgtttgtctttccttcagaagattttaatccgactgaaatagatttacttgaccaaaaaaatgcttctttaatttcaccaaatttatttagagttcagaaattcaccattaaggactatttttttagacaccacctagaaactactgttgaaaataacaatacattaaaaaatactacatggagaagagagggattgtctggtatatatggtattataaaaatacgcttaaatcatttaggtgaaattgttcaagttggcgaatattaaattttaaaagatgattaaacgcaccctatttttcggtaatccagcctatttaagcaccaaaaacgaacaattggtggtcaatttccctgaggaagaaaaagaagaaaaaaccgtacctattgaagacttggggtttgtggtgcttgaaaatccacaaattactattaccaatggtttgctaatgaaattggtgcaaaacaaaaccgccgtaattacttgcgataaacaacatttaccctgctcttttgtacaacccttggtaggtcatacagagcaaaccgtacgttaccgataccaattagatgctagtgttcctttaaaaaagaacctttggcaacaaaccgtaagtgctaaaatatacaatcaggcattacatttaaaatcaagaggtaaatacagcttaaaattagagcgttggagcaaagaagtaaaaagtggcgacactcaaaatcacgaagccattgctgctgctcattattttcaaaacctgtttaaaaacttagacggttttagtcgaaaccaaaaaggtttacctcccaataatcttttaaattatggctatgctattttacgagctataaccgcccgtgccattgtaagcagcggtatgctgccatcggtaggtatttttcatcataacaaatataacgccttttcgttggcagacgatgtaatggaaccttaccgcccttatgtagatgcattagtatatgatattgtagaaagcggatgtaatatagaagaactaaccacaaatattaaagcagaattattaatgattcctgctttagatgtggtcattgatgataaacaaagccccttgatggttgcgatgagtcgaacaaccaatagtttatacgagtgttttgaaggaattagcagaaaaatactgtatccagaatttgagtaattcgcgacttcaatacgctcattaatgtgaacattcagtaaccttgtatttaagtagtcgtggcggtagttgactgatttcgacttaaggagaaccgtatcgaagccatgctattactaaaattaactaactatggaaaattcacgtttttcccgattaaaccaataccgaagtatgtgggtacttgttttttttgacttaccaaccgaaaccaaaaccgaacgaaaagcagccagtcgttttcggaaacaactattagacgatggctttgcgatgtttcaattttctatttacagccgtttttgcgccagtcgagaaaatgcagctgtacatattaaacgaacaaaaataaatttacctaaaaaaggaaaagtagctgtaatgcaaataaccgacaaacaatttgggatgatcgagttatttcacggacaaaaagaaatagaacccgaaaccccaacccaacaattagaacttttctaggaaaagaaaagtttgatatcctctatacgaacacattaaaatcgcttctgtttttttatcctacaaagctacttaaaaaacagcataccaacctgttagggctggtatgctgtaaatcatgattaaaaatacaattctgaaagcaattcacaacctataaagtgttttgcctgcggatgattaagctgtaaatcatgattaaaaatacaattctgaaagcaattcacaacattgaatatagatcgatattatgaaagtagctgtaaatcatgattaaaaatacaattctgaaagcaattcacaacagaaaagaaatggttgcctactaatgatgcgctgtaaatcatgattaaaaatacaattctgaaagcaattcacaactacttccagctgcatccgtcaacgctccccgctgtaaatcatgattaaaaatacaattctgaaagcaattcacaacgcgccatcatacacaaatcgttcaattgagctgtaaatcatgattaaaaatacaattctgaaagcaattcacaacgctataacatttaactgcattcctaacaggctgtaaatcatgattaaaaatacaattctgaaagcaattcacaaccatgctgtagtattgctttaatctctgcgagctgtaaatcatgattaaaaatacaattctgaaagcaattcacaaccgtactgataagcaaatacagaaaatgcagctgtaaatcatgattaaaaatacaattctgaaagcaattcacaaccttcttccatcattctagccaattcctgttgctgtaaatcatgattaaaaatacaatactgaaagcaattcacaactagctgttctatagggctaacctaaataagactataaatctcgtttaaaatacatacttgcacccatattttaagaagtataaagttaaataattgttaaaatttttaattcggatgcactcctaaattgaagctttaaaaccattattaattccgagctttctagaataccctaactaccacctcgagtacataaaacctctgtaaaacaccgtttttacaggggttttttattttttacttacagatttactgacaattttataattcagaaactctctaaaattatctcgattgacaatttgaatctcggtattataagtttccataaatttctttggtagttttactttcgcttttgaattcaattttatctcaaagccataaatttttcctgaattatcctctacataatcaatctcctgttgctgcactgttctccaaaaataaggttttgccaaactgccttgatattctatttgtttaatacgttcagctattaaaaaattctcccatagtctgcctttatcctgacgcacttctaatggattgaaatcacctattaacatattccgaacccctgtatcgtagaaatatattttctgatttgtttttatttcattccgtagatttctgctaaaactcggaagtttaaaaactacatatgcctgaataagaatatcgatataacttgaaatggtatttttatcaacccctactagttgagcgagttcgttataacttacttcacttcctatctgaaaagctaacgctcgcaacaatttctctaaaatttcaggttttctaatacctccaaaagcaagaatatctttatatagataactatcagtaagttgttttaaaacagcctgctcttctctaaagctattaattatatctggatacatcccataaagaactcttagctccaattgttgttccgcctttaaataccctacatgattctcgaattcaccccatgagattgggaataacttatactcccatttccttccagttaaaggctcttgaatatgattacttaattcgaaagcagacgaaccactaataagaagctgaacctcctttatttgatctgttatcaactttaaggtgaggcctatattttcaatccgctgtgcttcatctataaatacaatcgtatgttttccgattatatttttaagctgttcgatattaggactcgttaggattattcgaactgttggatcatctccattcaaaaacaaaaaatccttcccgtctaatatttgattgaataaagtagtctttcctacttgccgaggaccaataagaaatatagcttttccttttccaaatcgcttttctatagattttttaatggatctttcaatcatattaagtgaatgtattcaccaaatataatgtttttcagtgaatgtattcaccaaatattaaaaataattactatgcatcaaagcttcgtgatgatgttcaaaaattgaaaaaggtttatgatgaaggagaaagtctaaaagaaacaaaattgcggtaaaaatttacggatagtagttttacaaggttttttgaaacagaattacaactctactattgcctacaacataaaaaagtatctgaagttcatccagaaacatgctaaaagtggaatgggaagcttaaaagtcttgtctcctttaataaaaaccttacttaaacacattttatgctgtttttagaaaactaaaggcttgtgcaacgattaccagcttagatacaattttttttgtttttcaaactaattatatttcggataatcataattataaaacttaagttccataagtaaaatccgatttcatatcctgtgatttctccatagtgccctgcttcatttattataatttcatcaaaaaataaaaaacttatcccaaaagagaaggcaaggatactcattattagagaaaatttagtttttctatatgtcagccaagaaataaagattagaggatttgcgagccaagttatacaagctccaccaataaaaactccaaatatcccagaaattaaaacagccaatccactccaattttctccgcaattgccatttgtacaatatattctttggctacaagctataatgaaaattaatatactaataagtattaaggtattccgacttttcagtttcaaattcaattcagttttattttcttcttttcaaaatatgagtgagtaattgtagttaacgtctttgtagtcgagtaggaaaaggggagttccaaccttcccctctcacaaaaccgtacgagatagtctcccatcatacggctcttattatacaaatctaatatactaatttaccaaacacatcccatttgccaatggtaaaataagttagaataaagtcttgtctcctttaataaaaaccttagttaaacatattttatgctgttttaagttcccctaattttaacgtacaacttaattaaatcgtaaaataaaagctcttaaaagggcataaatctatcttatttttataaaattaatggcttgtgcaacggttaccggtgttgcccacagtacttttccattatgctatttcaatattcaaatgtttgccaagtcctaactcaattaacttgtaataagtcgaaacttgaatatcacttaatccacgttcaattcgtgaaatgtagctttttttcgttccagttttttcggcaagttcctcttgagttaaatttgcttctttacgagcttcttttagcataacacctaatcgaaatgcaagagagtcagcgtcatatttgtcacgcttttcagttcctttttttccgtatgttccgatgaggatgtcctcaaaatctgttacatttttcatatcagttatttttgtcttttagatattcttttttcagtttctccgcaagtttaatttctttttttgatgtcttttgagttttctttacaaagcaatttgcaagaacaattaagtcaccatcatcaaaaaagcataaaattcgaatgcttttaaaggtagtaatcacacgtacttcataaattccgtctgtgttttcgagatacttgaagaattttttcgagacttgtctttcaaatctaaccaagtccaaaacgtatcctattttttctcgtactttttcgtcttgagctttataaaagtccgcgaaatattctttatatactattactttccttatcacccgacaaagttaactaattagtgtacaaattccaataaaacttacaaaattttgtcgatttcacgatttttcacgtattgagggcaacggtctcgtagtcgagtagacaagggaagttccaaccttcccctctcacagaacagtacgtaatggtctcctatcatacggctcttattatatatatctatatatgctaatttaccaaacatatcccatttaccaatggtaaaataagttagaataaagtctcgtcttcttttttaaaagcccttcaaaaacatattttatgctgttttaagttctctaattttaacgtacaacttaattaaatcgtaaaataaaagctcttaaaagggcataaatctatcttatttttataaaattaatggcttgtgcaacggttaccggtgttatctacaggcttttatgttctgtttctaataattttagttttcacttttgtatcattttcaagatatgtaaagtcactttcccactttaaatcgtcaaggtcaacatctttatttactaatattccaaaaattaaaactcggatatttgggtgttgtttataaaagtcttttaagccacctagaatttttacaatatttcttttgtcagtatcgtttttgatatgttttaattcaattacgatttggttattaaacaagttaaagtcagacacttttttatttccatcgtatgtgagttctacttcttcacgtcctaatcctggtaaccaaggtctggtcgttatccaaaataagttttgaaaatcatattcattgattaagttatttgtccaaccagttttagcttgtccgtgacctgtaactctttcgcttgaatctataagtctctccattactgaaatcaacatttcagatgcttcgtcagcatcttgtcctatgtatggtttcgtaggaagtccttttctgtcggccgtttcaaaatacttaattaaagcttgaatttcatatccgtcattcggtaaattaggaagagtagatagtttatgattaactctactatccaatggcattattgcgaaatctttcatttcatctgtaaaaccagtgtttctttcgtatagttttactgcatttagtttatcaagtaatttgagttgagtatcatcatcaatataactttcattggctatactaatagctttattatcgtcaagtatgaataaatctaacgctgtacaactttctaaagtgtggtctcttaatacagactgttttattctttttgtagttgttataagtaagtcaatatctgaccttgtgctttccgttttatatcttcttgaaccaaaaatatatactgtatcaatatcggaaaatttcccagcaagtacagaaattgcagtttttaaatctatgttgtctgttgttggcatttcgtttttttagcttgtagataacggccttggctatggtttgttgcgtaaaaatccgcaaggattttctgttataaaccaaatatagtaaaagtacaaggaattttcggtagaaaattccggagcaatgaactatagccgttgctacctaaagtaccgaaacatcctgcttggtacgttttgctattcattccgtggtttttccgctcagtttttttccgttagttagaattatagagtttaaacgggacttttagtcatcgaaaaaatcagcgtattgcttttaaaagaaaaattagccgttgtgcttttcaatcggcagagtgcttttctaatctttttttctttttctttaattttctaagtttagtttaaattgattttaggagtaggagtttttttatttattcgctctgcaattcaatccgttttattttaaactaaattttcggattttgctgtaatttttattctaaacccaagccaattttatccgctctgtaaatcagtccgctactttttttaaagaaacccaaacattaattttttaactttagtgtttattgaaagtcgtatcaattcttatccgctgtggtttttatgaggtattttaggtaacatgtggtatgttcattttcattatatacattcaaatatacagaaatacacagaaacctcatgggtttatagaattgtagctattacagattcttgaaaatagtattggttgaactatatcgtacaggtgaatttcctatcctgaatcatggttttatataaattatacttactttccaccaaatagactcaatatgcttgtttaaagaaacttgcgaataaaaacttctgttttacaaagtttacttcatctttatttctacttttatttcaagaattcaattaaaaaaataaagcgctttgttaattactaatctttaaaacagatatagttaaaagtacaaaacatacaagccccaaaaataagaaccatttacaatgccaaatcctcttcatcctttctttttgttagtttgtttcttcttgccaaaatagctagtccgaaggtgagtatcccaagtctccctacaaacattacaaatatgagtaccatttttccaaaagatgataaatctgctgtaataccagtgcttaaaccaactgttccaatagccgatgttatttcaaatagaatttgttgtagtgagaaatcttcagacattgctaaaagtatggttgacacaaaaattaccaatgcataaagcataaaaatggaagtcgctacataaagtcgctctaaaggaattgattttcctaaaaatgtaacacgtttgttattacgaatcctattccacattatagcaattaaggcggtaagggttgttgttttcattcctccacctgtacctgaaggcgatgccccaacgtacattaaaaaaataataaccaacaaaacagccagtgaaaaacctcctaaaggaactgtattaaaacccaccgtagtaagtgctgtcattgcctgaaaaaaggaaatcattaatttatgttcccctaattgattcacagagggttcaaaaaaataaatcataaatgtcccaacagttagcaatagtatcattgaccctaatataatttttgtggtataggtaacctgctttgtttttcccgaaagtctgttccagaagtcagtaaccacaataaaacccaaagaaccacaaatagccaatactgaaataattgtgttaatagctgtattacctgcaaactgctcaaaactattgttatacaacccaaaacccgcagtacaaaatgctgaaacactatgaaaaatactactccaaatagcaaaattatgttctactcctgcattggtaaacgctatataaaagcacaaagctcccaacgtttcaatagtaaatgtaaaaatgataacagattttagaaaatctttaatctgaaagccttttggcattgtaaactctgcattaagaattcgttgatgccagtgggttagatcacttttctttgagagcagtataaaagatgtaaacgtcatataaccaatcccacctatttgaaacagaagcatcacaataaattgcccaaatctattgtacgtatcaaatatgcttactgttactagccctgtggtagaaatagcagaagtagcaataaacaaattatctaataagggaaccatttgcttttgtactataggcatgcacaataaaagccaccctaataaggtataaattaaaaacccgtaaagtaagttttgttgtggtgataaagaaagttgaaactttctgtatttttttattatctttttcattttaatatttataattgatgggaaataagtttccccaatatttttaaccgattttcaataactttaagagtctgcagtgtttggcctctgcctccataatctattgggagcactttatacagctttaaagaactttttgtaaatccttgtaattctttaattttaataagcattactctcgtgtttgtcgctcttaatatttcatccattttattctttatatcctcatagtttttaaaacaaatgtgtttctctttatcatgagacttacaatacttttttaattcattgatactaagacataattttataataagattagctatttctttgtttagctttattccactttccatttactgaaagattaaatgaaaatgaatttgaagaatctaaaaaagaggattccaaatagaactattaaaaggaaaggatatcttaagtgcttgatttcattataccaatcttgtatcgattgataaggttttccactactttcatcataaaaaaaatcccacttcatctgtaatttttatttacatattagctatgaaacacacgaaagtgcatttcatcttataattttttaaccgtacaaaggtctgatgaaatggatatgtaaaaaatcaagaactatagagaaaggataaatattttataaagaaaaaagaggcttactctggaaaattatttgattgccaagtttttaattttccatccttttgaaatattaaaaaaccctctatttctggtgtttcttcaataaatgtcatggcctgttttatgcccatcgacatgcaggcagtagccaaagcatctgcagtagttgaagattttga

SEQ ID NO: 2198 - DNA, 24194 bp, synthetic construct
  misc_feature 1..24194: note = Synthetic
  source 1..24194: mol_type = other DNA
taatagggaacctcctgtattggaattggtcgtattggaaaaccactgataacttggagtccccaatccgttagcaacagcaacggttagtgtggtagcattagctccttgacattgggtttgggtaagtaatggttgtgttgttaccacaggatctgctataacattaatagtcgctacattagaagcaacacctccacaaccagtcccatcataggtagcgaccgcgtaataatagaatgttccgacagttggaaaagttggtggtgtgtaagtagcttgtgtagccccaggtagggaagttcctcctgtattagcattagaagtgtttgaaaaccattgataagaaaggttgcctgtcccaccagtagcttgtacatttaaatcgacagcatttccaccttcgcaaatatcttgactgttaataggatctgttatggtcggtaatggtgaaatagaaactctggcggtgttggtaagaattgatgtacaaccacccgaagaaaaggtaatttcacaataataaaaaacggtacccaccacagtattatttggtgtaaatgacaccgaagtcgctcctgcaattgcattgccgctagtagtattatcatttgcattacggtaccattgaaacgtgggtgttcctacgacatttgcaatgctaaaagtaagcggatttaaaaccccaccggtacaaatttcttgaggagttaagggttggttagaaacgatgggagctgggactacatcaaaacttatggaatcggtacatccattgttgtctgtaaaagtaatagtagcatttcccgcgtttccacccgtaacaagaccgcttgaattaacagtagctaccgaagagttggaagatgtccagttgctacctgtagtactcgcagtcaactgtgatgtttgacccgcgcaagcggtcagttcacctgtaatttctggttctggaaagatttcaaatgtttgatttaatgcagtaacaggaccacattcattagtcactacaagagaaaccgtataaattccaggagttgaataggtaatatttgttgggtttgcttgggaagaagtcgctggagaaccatttggaaaactccatgcataagtaacattattagagttaggtgcgcacggatccaccacagcggtaggagaaatggtgttatttgtgccgttttgacaaaagtctgcgatgttgttgatgctggctgtaggaggctttttaacaattatatcttgaggtaccgacattaccgtaccacagctgcttccagaaattgtagcttgcaccgtataaatacccggtgttacaaagttaaattgaggtgcttcagaagtagcactcgtccccgcaacataactccaattctctggagccattccacaatacgcatcttggtaggcgacatcccaagaataacttaaagggctgcaattaaaagtgaggtcggtattgttggttgtcgttacatttaaaggcgtacaaccttctacagtactgaaggcaaagtcaggagttaaaggttcttctatacatatttgttgtgtgaacatatcgttaccacaagtagctcctaccagggataaggttactgtgtaggttccgggagctgtataggtatgcatgccatttacagggaagtttgaaagttcggtagacgtactgccatctccgtaatcccaattgtatcttatttgagtggaacaatcgttaccaaaaccagtttctgaattattaaaaaaagtaactgctgtattgatacattccacctctggggcggcaaaagctgcagtcgcctcttctaaaattctaatattacctacagatcccggggtgttaccacaggcatttgtgatgtttatggtaacgtcataagtagatggacaactcgtctctgtatattcatgcggaacaggaaaagggtctgttaagttggacgatgcagatatgagctgctgctgtgtataagtagccgttcctccatcaccataatcaatatcataaacagtgtccagagaattccctccccaaccattaatagtaaaagcaatagctccagtaggaatacataaattttgtgttcctcctggactacttatccctccactcggatttgaaatattgcgtacttgaaaagtcttactaggatcacaaccatttgtcaaagtcgattgtgcagaaacaaccattgtaaacaccccattattcacatagttgtgcattactggaaagctaactgatgttgcaagaggagagccgtcaccccaatcgatggtataagagtttgggtctacatttgcgggagcgccaccttgacttaaggttatcgtataaggcataccattacctgcattgccacaattattaaaatcgtcacctgctgcagtcggatcaaaaagattgagatctggctctgcttgaatcgtaactgatctcgttgtggtgttggaacatccatttgatgaagtcaccgtcaagctaactgtgaaggtctgtgaagcggctcctaaaacttcataaataaaactgggattctgtaatgtcgaggtggaattatttgaatctccaaactcccattcataactcaatgtaccactaccagaagaagaattattgaaatttatagcttctccagaacactgattgttattgacgacattaaaattaggatttatattgttggaagatacctctacagttgcggtctctccgctaatgcttgtaggacttctagatataaagtcttctacagttaataaggtatacacattggacccgaccgtatttgtaggcaccatgatagtgaccgaatcattggtccctgttgtagaaacagtttgaactgctccggttcccaatctataagtaaaggtatatggcctagccccattacttcctgtaaaggtgattggaaccattcctgagtttaaacacacttgaacagaaccagatatagcagccgaaggaacaaacatagtttctatcagtcgctcaccgtctttagagaaactaaatgaagaactaggtatcaggcaaatgaatgcactccataacagcaggaaatagtattttttaatcatggtcaaatgttttaattctaaacaaaacatttgatcaaaaacgcatcattcagagccttggatggacccgcaatcatttgatatagaggtgcacaaacaaagaaaaaatataaaagcagacaatttattccttttatttttttttatgatcattgaagattgattttttgaaaatataccctttagagggtagatgaataaaagcctatttattaccatgattctctttcgctaaagcgatctaagtcattcatttaaaacacactagcccaattataaatacattccaaatctgtattttatgcatctcatcaaattatgcattacagcgaccaaaatgcgctgttaaacgataatcacttaaaatacctgcaaataaaaccatagaagatagctgatttagatgaatcattttttaaaaaacgattccattgatcgtgtaaaaacagaaaacataggagtcgcctattttaagttttctaaactgttgaaagtagcctatcgtttaccacgtattcctaaataagctgcaagacttcatctttaaaatacaaatgcgcatcagccacttttgtaattgcaacaattcaaaaagagcaaatccttttgtaatacctatgaattgggattccgctttcgcgaaagcgaaacaattccttccatccattcatttaaaagattctagctcatttataaacctatcccaaggaagtgttttttttatctgatcaacttaagcgttcaagcgaccaaaacgcacatttgaacgatgcctatttagataaccttaacaaagcaccatattagatagataatttagggttagccactttattaaaactccgtaccactggtgatttaaacaagccctaagaagattcaattatggataagaattctataggatttctaaacctgttgatcttctttttgttttgcggagttttaagcgctactcaagaagaggataaagaaaaatcgccagtacaactgagtggtagtattggattttatgatgacttttactctttttctcaagaaaattattccgacttcagagctcgttatactgataaccttttaaaacttaatgctccaatgagtttgaaattagggaaacactttagtacccctatctgtatgaatgtaacccatcaaagagtactatataatttacctggtgcaccaaaaggaagcgctttagattaccttcaaaatccagctaataatatcagtgtcaacctaaagtacaaatggggacaagccttacttaagatctaagaaaaataaaaaaggtcaactcgttcagcaaggcaggtctttggagttaagctttcgcgccatgcctgccggcagaagggaaagcagaaacaaaaacgatacctatgccataaaagtatttacaaaagatggtgggcagtctaagctaagtaaagaaatagtcgtaaaatagtgtcatgattaaaaaatatgtggtcttcttgttctttatctggactttatcaagtccagcacaggaatacaccaactattctgaaaaagatggattgcctagtaataatgtgtacaaggttacacaagatataaacggctttatatggatggccacaaatgaaggcgttgtaaaatttaacggtagcgaattcaaaattttcactactaaagatggtttacctactaacgatgtttggaatctattccctgctcgtgatggtaaaatgtggtacggtgcaaagagcaaaagtatggggtatatttttgaggataaagtgtacaacttcccttcggcaaatgatcaaatcatgagcgctacaaatgcaagttttgatggtgacgagatacttgccataggctccacaaatgcctatcagctaaaaggtgacctttggcaaattgttagcctgcgtccctcctacgatttttctgttcctttattaggtgacaaatttaaatctatcaatgaaaacgctgaagaaaattttattcttaccgataaaaataataaaacctatacattaaaaggttctaacatattacacaataattaccatcgaggtcagcttaccgatagcctttattttacgttcaaagaatatttctacaacttattgaatttaaattcaaaagaaataaaaagctttcgttatgaagatgaactgggtgtgcagaggctggagcgggcaaggatgaatttggtaaatgaccagattcaaattacaggggaccatgttgtgggcattttagatagcgatttgagcattaaaacagcctatcatataccttcctttatcgcctcacacaattcctttattgataaagaaaacaacatatgggctgccactttctccaacggagtttacaaatacaatgtcaatgacctagatatcaaaaaagaatattccaattatcaaatcaatgatattaaaaacataaatgggactacctacgcgattataaacgatcaaggattctacagctatgataaagcaaaaaatgaatttatccttgatttaaagaaaactgattatttatacgatcttacctatatacaagaaacggacactaagtattacatgagtaactacgacatccaaacagttcataaaaatcaaaaaacaggtatcacctttccacttaaaaatgagctggcacgctcgctcgtctattttaatgatttgttatacggttacaataccattggggttagttccataaatcctaaaaatcttgattttataaaagcatttccgcaacctggaacccgatgtttaagtgtttttaaacagcagctcatcataggaacctctacaggtttaaaaagacttgtagatggaaaaattgaagacctaaatactattcacaaagaattttcatatcccgtaaatggaatcactatcattagtaatgatcaaattttacttactacagacggctatggagcgtaccttactgatttaacaaacatccaccttttagagaaaagtgagtttctctcttgtgatcacgctttttttgaaaatcaagaactgtacttacctactaataacggggtctatcagtacacctatgctaatgagtcctttcaactccagcgtacttggaatagaagcaacggattgccaactaataaaattaatggggtagaaaaagtaggtgatgttttgttagtcgctacgaaccaaggcatcattcacctgcctatagactataaagtaacctcaagcctggtaaatatatttatagaagaagcggtctataatggacaggcggtatgcgctggacaaggtgagctctattccagaagtaataccttgagttttacagtcaactctattgattatagaccctattcaaaactttcttatcaattcaaactctctcctagtcaaaaagaatggaccaccacaacttcaaaaaacattactttttctgatttaagtccagaagaataccagctagaaataagaagtggcgatctgataaaatcatttgatttcaaagtacttcctcgatggtatcaaagttggatcttttatatcgcattactgcttctgttagtggcgctcattatttatattactaaatatctggcaggaaaatcagagatcaaacgcaatgaagagctgttgcgttctaaagaattatctgagctgcaattaaaagcactgcgctcgcaaatgaatccgcattttgtttttaattctctaacggccattcagtactatattaatgagaatgattttgaaacatcagacaggtatttggtaaagttttctcgattgatcagagagttttttgaactttctaaagaacaattggtaagtgtcaatagagaaatacagttgttgagtaattacctagctttggagcaattgcgctttaaagggaaactcaactatatttttgaaatagatccagaactcgatagaacagatcaattgcctagtatgttgctacaacctattgtagaaaacgcagtgaatcatggcgttttcaataaagaatccacaggaactgtcctcataaaattccaacgtatcagcaaggaaaagattcaaataagtattcaagacgacggtaaaggttatgaaaacagcaaggaagacgaccggttcaaatctacttctgtactggaagaccggttgaaatatttaagagaatctggggtatgggaaataaacgtagaacgcaaggatgcctttccagataagaaagacaaagggcataaagtttccttcttgcttaaaagactgacagatgaaaaaatataaagcgatactggtagatgacgaattttcggcattgcaaaacctacataaaaaagtgcttaaagtaggaaatcaaatagaggtcatagccacctttcaagatcctaaaaaagcaatagctgccatcgtagaacataccccagaccttttgtttttagatattcaaatgcccggaatgacgggctttgaactgctacaacagctgactcatttaagtgcacaagtgattttttcaacggcttataatgaatacgctttggaggctttaaaaaataatgcggtagattatgtattgaaacccgtggataacgaagagcttaaaagagctatagataaagccattacaaatattgaaaaagaagctaccgattctaatgcaaatctagtagcattgctcaacaaaattatagatcgggatcacaagttaaaagtgccgactcaaaaaggaatctcttttatacctcaagaagaggtcatccatttagaaggttatgaaggctatacaaaaattcatttagtcgatggtaaaaccttaatcagctcctacagcttaggaaagtttagcgactacttagacgactattttttcaagtgtcataaatcgcatatagttaatattaaagccgtaagagccttcgaaaatgaaggttatgtggttataggagaagattaccgagtacccattaccaagacgtataaacaggcttttctggatttatttagttagtgcgtcaggctttcaattcaacaagctcgacgcatcgcgaaaaagcagaactctatacctactatacctaacagttacaaatcttaagatcctaccaagtacgaattaaaatagacttaaaatgatttgaatattggactagttctagtctgctttttgtccatccggccaaatattctatatttgatttatttacgaactaccatgtccaaacgcctaccataccctaccaaaatactgctgtcaatttgagaaaagcaacttacctagacaaaaagctagtatcagaaatattagtttctgcctttttaccattgaaagaagaaaactctataaatcttatcgtaaaacaagaccgaaaaagaacagagcgtatgcaggtgttaatggaatacttatttgaaagagccctactttttggagaagtttatatatcagataatgacaaagcctgtatcttattaaaattccctcaccaagaaagaattacgccgagaaccctacttctagacattcaaatggcatttaaatgcataggcatagaacgtatttttggtgtgataaaaaggcaacaactagcgcataaaaactatccaaaagacgaacatataagacctgtgatactaggagttaaaaaagaatctgacggcaaggggactgctgctcgtttaatgatagaagtcagaaataagtttaagaacaatcagctgccagtaataatagatacggcctctgaagctcacgcaaaaatgtatcagaaatttgggtttaaaatcgttaaaaaggaagaaaaccttggctttccagtttactttttacggttaaattaatggttgatataaatgtcaaaacagtataagagggagaataaactttgggtataggtaaacgttttataaacttcggcaagcctgtgctgagtttatcgaagtgctcaacgcatcgctctcgctctatcaatcattttttttgatcattttactgcaaaagatgatcgcttggaactgtctcgatgctatttaacttgtcatacccttgcatagaggtatcgcttggaatctttctcgatgtttgttgaaatggtctttctcgcaataactatcgggattgggaaaaatgccaacctctgcttagcttacttatacggagtatcgaaatgtctaagtaaggaaaatggggatgcgattctgaaactgacttgattttaggttcattattaaaattttaatttccttcttagcttctagcttctgttactttttcgcattgctccaaaaagtaaccaaaaagatataacctgtggtacccctgcctaaaaatttcattcattgcgctaaataaaattaaaacttcatagaaagtatgaacttgacgaccgcttaacccaatctttaaagagagtcatcctatttcgttttcaacaaattttatttttaacgcttcattcttctcatttttcacaacagactttccaatgccttttctaaaaaaacaactttttcatttgtcataccatttcatagtagaatcggctagcactctctcaaaagttattagtacaagtctttcccttcttgcatccgacgagtgcaacgagaggaatgtttaacgtccacaggcaaaagggtgtttgcagtgctggatcttcttattcgttctccatttgtaacctgtacgtttataaaattggtacttacttggttagtatttcaatagtttagatccaaaaccattaataaaaaaaacgatgcacctagggtgcaccgctttgaatgttttcacaacggaataatccttattgtgaattgctttcagactgtaaatgtaagaattctttcattaatgaacattacgggaaacagtaagaattctatttttcttattaatatatttagggcttagattataaaatgagtttatgaaaaaaatattaggattggatttaggcacaacaagtataggatgggcactaattgaagaagctgagaagagagaaaactcaaaaatcattaagcttggcgtaagggtcaatccacttacggtagatgaaaaaatcaactttgaaggaggaaaacctatttcaactaatgctgatagaactttaaagcgaggtgctcgaagaaatctagatcgctttcaactacgtagagataatttaatagaaatattaaaagagcataattttataaatgatgacactgccttgactgaaataggtaagaacacaacttatgaaactttgtttataagagctaaagcggctagagaaaagataacgttagaagatctctcaaaagtgcttcttgccatcaataaaaaacgaggctataaaagtagtagaaaaacaaaagaggaaagtgatggcgttgcggtagacggaatggcggtagcaaaaatattatatgaatatgaacttacaccaggtgaatacacttttagtttactaaaaaacaagaaaaaacacataccagatttttatccatctgatcttaaagccgagtttttagcgatttgggaaaatcagaaaaattactatccagaattactgacacaggcactttttctagaattaaaagataagaagagtggtcagacatggactatttgttccaaaccttttgaaatagaaggtaaatacttgaaaggttctaacgacgaacagcgtttactaaagtaccaatttagaaatgatggacttaaggaacagctggatctagaacaacttgccattgcgctacaagaaatcaacaacgatattgatggaacaagcggctatctaggaaaaattagtgatcgtagtaaaatattgattacagataaaattacagttggtgagtttatgtatgatcagatcaaaaaagatccacatacatcacttaaaaaccaagtgttttatagacaagattaccttgatgaatttgagctcatttggaatactcaagctgcgtttcacaaacagctttctgatgaattaaagtcagaaatcagggatgtcgttatcttttatcaaagaccccttaaatcacaaaaaggacttttaagtcattgtatatttgagagttgggaacaggaatactatgatcaaattaaagaaaaaactagaaaaagaaccgtgggtcatagagtaattcctaaatcctcaccccttttccagcaatttaaaatctggcaaaacatcaatgaccttgagttcaaatatatcggtaaaaacattgatgaattaaaaaaagaagatctcattattgataaaaaattagtcactctaaaaatagatcaagaagacagagaacttttgtttaacgaagcaaattctaaagcaaactcaaaaggtaaaataagtacaacagaagtattaaaactactagggctttcttcaaaggactggaaatgtaatttcgaggagggtatcaatgcaaatacaaccaatcaaaagctactcgatgtgtatcaaaccattgctaaccgagaaggttatggtcacgactggagcaaaaaaactggatcagagatttgggaagaactacaggttgtctttaacgatataggaatagacaatggcatattaggttttgaccctttaatagaggggaatgaatacagcagtcagaagagtctggagttatggcacttactctacgctgcaggagatggaggtaaagtacaagaagaggaccaacttatttatggaaatcaagatgttgcattgagaaaaaaactacatcttaaatatggttttaagccagaatacgcaaaaatgttaagcaatatttcttttcctaacgattatggaagtctttcttctagagctattaggaagatcatgccacatcttattgaaggtcacgattattatgaggcttgtgatcttgcgggttataatcattctaacagcttaaataaagaagaaaacgataatagagaattagcagaccatttagatctcataagtaaaaatagcctgcgcaatcctgtagtagagaaaatacttaaccaggtagttaacctagtcaatcaagttatagacacctatggaaaaccagatgagatacggattgaactagcgcgcgaactcaaaaaatctaccgaagagcgtaaaaaaatgacccagtacatcaatacagcgacaaaactaaatctagacattgccaaaaccattcaaaaagattttgggttcacacctactaaaagtgatgtcgtgaagtataaactttgggaagaactctctacgagaggatataaatcacttttttctgacacgtatattgcaaaggaagatttattcagtaaaaaaattgacatagagcatattatccccaaagccctagtctatgacgattccttttcaaataaaacactggcatatcgcgaggttaatttaaaaaaagctaatcgtactgccatggactttataagtcaagataaaagtaaggatatcgaggtttataaggaaagggttgaagccctttatgataaaggaaaaggtgctattactaaggcaaaacgagataaactactcaaggctgctggagatattaatgaaggttttatagaacgtgaccttagaaacagccagtatatcgcaaaaaaatctagaacacttttagaaaaagtttgtaaaaccgttactcctaccacaggtatgattactgataaattacgagaggaatggggaattatcaatgtgttaaaagaacttaatctagataagtacaaagctttaggtcttgtagaagtggagcaacgcaagcatggcaaggaagtagagaaaattaaagattggactaagagaaatgaccaccgccaccacgcgatggacgctcttgcggtagcatttaccacagtaagtcatattcaatacatcaataacctgaacgctagaagaaacacgcttcatgaaaaacacaagcttatattaggaatagaaaataagattacagagatggtcttaaataagaatggtaaaaacaaaagagtatatataaaacccttccctaactttagaagccatgcaaaaaagaatttagaagaaatactcatctcctttaaggcaaagaataaagtcgttaccaaaaacattaataaaacaaaaaaagaaggtggttacaacaggacaaaatctcttacccctaggggacaattgcacaaagaaactatttacggtaaatctttgactccagaagtcaaaactactaaacttaataaaagatttgctttcgcgaaagcggaacatgttattgatcaaaaacaaaaaattatcgttttagaatatttaaaaaaatacaaggatgatcccgagctagcatttgatggtaaaaccttgaaaaaagacccacttttatggcacgataaaccattaacagaagtactgtgttataaagaaatctataccataagaaaagatgtttcacccgatttaaaaattgacaaggttatagataacggaaccaaagaaatactaagaaagaggttaagtgaatatggcaacaatgcaaaagaagctttttcaaaccttgaaaacaatcctatttggcaaaataaagaaagaggtattgctattaaaaaagtcaccatcacaggagtttcaaatgctgtacccctgcacaccgctaaagatcacttaggtactgatttaatagatgaaaacaacaacaaaatccctgtggactatgtaagcttaggaaataatcatcatgtagctatatataaagatccaaaagacaaattgcaagaaaaagtagtttctctttacgaggctgtgaccaggtccaaccaagacttgcctattattgataaaacttataatcaagaactgggatgggaatttctatttactatgaaacaaaacgagatgtttgtattcccaagtgaagaatttgatccaaaggaaattgatttaatggatgagaaaaatagacaattgatcagtcctcatttatttagagttcaaaagatcgcaaataaaaactatatgtttaggcatcatttagaaagtacgataaattataacctagactttacctataaacattatcaatcgttggggctcctagaaggtttgattaaagttcgtctgaatcatattggtcaaattgttcatgtaggagaatattaaaataaagtgaaatgataaaacgaactctatttttcggtaaccctgcttacctcagcactaaaagcgaacagctggtcgttaattttcctgataaagagcaggaagagaaacgcatccctattgaagatctagggtacattgttttagaacatcctcaaattaccattactacaggattgattagaaaattggtagataataaaacggcagtaattacttgtaatgcgcagcacttacctactggttttttacaacctttacaaggtcatagtgagcaaacagagcgctaccggcatcaattaaatgccagtatcccgcttaaaaagaatttatggcaacaaacggtgatgaccaaaatagaaaaccaagccaaacattttaaaaagatagggaagaatccgctacgtttagaacgctatgccaaagaagtaaaaacagctgatcatgataaccaagaagcactggctgcggctttttattttcaaaatttatttgatcttcctgaatttagtagaaaccagaaaggagtggcacctaatggcttattgaattatggctatgcgattttaagagccattaccgcaagagctttgatctctagcggcttgttacccagtataggaatctttcattcaaataagtacaatgcgtttaccctagcagatgatattatggagccttaccgcccatttgtagaccacatcgtttgggaaatggtaacacgtggtgaggatatagaagaagtttctacaactcttaaagcgcaattattgatgattcctgccatagatgtttttatagatggtagaaacagtcctttaatgaacgcgatgagccgcacgaccaactcattatgggaatgcttttatggcagcagtcgcaagatcaaatatccagaatttcaaggtaattttttgaataggtaaaaaatgagacagcatgaaccatctagaaacgctcaatcaataccgatctatgtgggtgctcgtattttttgatcttcctacagaaacacgactcgaacgcaaagttgccagtggttttagaaaacgactgctagacgatggttttaatatgtttcagttttctatttacatacgcttctgccctagtcgagaaaacagcggcgtgcatattaagcgaactaaaaacaacttacctaaaaagggaaaggtatgcattatgcaaattactgataaacaatttggtatgatggaattatttcatggaaaaaaggaaatagaaaaagattttggggatcaacagctagaacttttttaagattaccgcagaaggtattaaactggattcatttgctatctatacgataagaatcaatcattttatactattctaaagcgcactataaaacacagatacccagcaaaatatgccgggtatactgtgaattatcctataaagataatgcctgaaagcaattcacaactaaatatacataaaaaaaccttaccgattaactgtgaattatcctataaagataatgcctgaaagcaattcacaacaccatttatgtaggacctagagtaaagggaactgtgaattatcctataaagataatgcctgaaagcaattcacaactaaacacagataataaactatatgcagacaactgtgaattatcctataaagataatgcctgaaagcaattcacaacgcctaggaataattcaataagcgactgtctactgtgaattatcctataaagataatgcctgaaagcaattcacaacgcaagcagcggataaacttataaaaaatgactgtgaattatcctataaagataatgcctgaaagcaattcacaactttgggaagatataacattaggtaattttactgtgaattatcctataaagataatgcctgaaagcaattcacaaccagatatacgtagtactttccttgatcttcactgtgaattatcctataaagataatgcctgaaagcaattcacaacgtaaagggaagtaagttaacacttgcagaaactgtgaattatcctataaagataatgcctgaaagcaattcacaacttcagctagtatactttgttggtctttatactgtgaattatcctataaagataatgcctgaaagcaattcacaacttgaaatactttgtttcgccttgtggagaactgtgaattatcctataaagataatgcctgaaagcaattcacaactaagttcaagcgagaaaatattaccgataaactgtgaattatcctataaagataatgcctgaaagcaattcacaacaaaatcactccatttaacttcttcccctagactgtgaattatcctataaagataatgcctgaaagcaattcacaacgcgttaacttgctttttaaatatcatacgtactgtgaattatcctataaagataatgcctgaaagcaattcacaacacatgagatagaagaaggagtaatagatacactgtgaattatcctataaagataatgcctgaaagcaattcacaacgtgtaaagcaagatcacgccacagtgttaactgtgaattatcctataaagataatgcctgaaagcaattcacaactgacattcaagacaaaacaaaaccttagcactgtgaattatcctataaagataatgcctgaaagcaattcacaactgggctggtaagatcaaatccataacctttactgtgaattatcctataaagataatgcctgaaagcaattcacaacgcctgctgctttacctgcgtagttacttccactgtgaattatcctataaagataatgcctgaaagcaattcacaacacttcagctcttaataccgcggtaaatttaactgtgaattatcctataaagataatgcctgaaagcaattcacaacactatctctcacgtaaatcaagaatacggtactgtgaattatcctataaagataatgcctgaaagcaattcacaacgcgttacctaacggaggatgggacatagcactgtgaattatcctataaagataatgcctgaaagcaattcacaacatgcagacgatggaacgttcacagaaaacaactgtgaattatcctataaagataatgcctgaaagcaattcacaacgttgcctatttgaattatcttgctgatgacactgtgaattatcctataaagataatgcctgaaagcaattcacaactatcaagcatggtataaaactacgcttttcactgtgaattatcctataaagataatgcctgaaagcaattcacaacttaacttctattaataatcaaattttaaaaactgtgaattatcctataaagataatgcctgaaagcaattcacaacgccatcacttaacgcattattccaaaagtgactgtgaattatcctataaagataatgcctgaaagcaattcacaacagcgcctcactcattgtcatttgacgaatgactgtgaattatcctataaagataatgcctgaaagcaattcacaacaactacggcctaactacaggggactatgaactgtgaattatcctataaagataatgcctgaaagcaattcacaaagacctgtcaaaaaatacttgacagttcggtactgtaaattatcctataaaaataaacattgttaaaagtaagaatagcattcgttttttaggaataattccataattttggaacatttccaaataaaagcaacttagtgaattttaaagaacagtattatagtgttatcgatgtagagactacaggcaatagaatgagtaataatcgcatgaccgaaatctgtattgtacgcatgctgggaagcgaagtgattgaaaaatacaccagccttattgatccagagagtttgattcccgattttattaccggcttaactgggattgataatgaaatggtcgctgctgcacctcttttttctgaagtggctgaagaaatagaacgcatgacgcgagattctatttttgtggcgcataatgtcaactttgattacaatatcatacgcaacgaattcaaacgtttaggttttgattttaaacgtaaaaagttgtgtaccgtaaggctttctagagaattgattcctggaatgaattcttatagtttgggaaagttgtgtcattctttgggaatctccctagaaaacagacaccgcgcagaaggtgataccgacgctacagtcaccttgtttcagaggttattagaaatagatcaggatggtgaagaatttgcaaagtttctaaaaggaagcaataaagaaggaacttttccgccgcatttagaccgatctcaatttcacgagttaccagaaactccaggtgtctatttatttaaaaatcaggctcgcaaggttgtttacgtcggtaaagccatcaatattaagaaacgagtgctgtcgcatttttactctaaagcgagcaagtcttatctgatgtgtcaggagatcttttatatagagcacattcctacgggcaatgaattggtcgccttattacaagaagcagaccttatcaaacaatactaccccaaattcaatagcgcccaaaaaaaaccacgagcagcttatcaaatcctacattacaaaaaccaattaggagttattcaatttgccgtggggctcgtgaagtcttatgactattcggtagtcactcattacgatcgagcacatgcggtagaacaattagaacaactctgtgccgactttaatctctgtccgcgatattgtagttttaaaactccggtagattgcacggctcactacaaactcaaaaattgtaaaggcgtctgtaaaaaagaagaactggtagcactttataacattagagccacccaagcaatagcctctttacataatcaaaaccctaattacatcattaaacaaccaggtcgcacaaccgaagaaacttgttttataatggttaaagacggagcttatcaaggttatggatttgttgatcaatacgcttctatagctactatggccgattgtgaggactatatcgatcgcaaaacagcaaactaccataccaatcagatcatacgctcctacttgaaaaaatatggagagcaaaatgtggtctttgatcaacaagtagccgtttgatgtcagttacttagactatcaaaaattaggaattctttagaacttactatgcgcgcatagtagtatctttacaaaaaaagtgatggacttaataatttctcccaacggatatagcgattacaagcgtaaagtattagaagataaggaggaatttaatgaaaaacctaaggaagagaagtatagtattcctttgcagagtcatttgtaataaaaaatgccgacccttagatcagcattttttctatttaaaagatatttttcatcattgcttttaaataaggaatcaacttctggattcattattagatgttgacattgttcgtacagtatctgaactgtttaccattgttatcgtttacagttttagacttccagaaactcccacttctgtctcgtcgccagtggcttttgtgtaagctaattttgccaaagtgatcaaagcattggttttgttatcccaataatgtccctcttgcggactaaaaattagaacggttaaggttgggtcatttttactttcaaaccagttgtcgtctaagttatcgtagtacttatcaattaattccctgttttttgatacctcagttgtaccgtatacacttaaaaattctttggacttcacatctccaaaaatcagttgtgtctctttatttttttcgatattagcattgtgctcactggtagatttactaaagaaaatgacatccccattatcgagtatttctttagatcccataggaatagctgggactggtgcttttcttagtcctgtcagcatcatggctgttttaacatttctagaaagttctaggtatttttctattgcttctctttggataaggttatctgtactcataatttttatcttaatataataaaaacagctggtctttttcttaataaaagatgaattaacgagacttttagaattgaacaacagccatatacgcgttatcttttgatgattctaatgtagttaagaaccaagtcaggcattcccttctttaccaagtgcaaactagaaaacctaatgagctgcttaaaaggtagaatttcctacaacagaagaaatacgtctcttaagtaggtactaaaatctaatctgaggaaagagacttacaactaacgatcctcaccgtccttagtagtatcgtcaacacttagaatatcttccatatccttatcagttacctcttctcctttatctgtgaatatgaccttttccttatactttaatgctttagaactaggtttgattccgttatcatatcgatttacgtaaaccaaaatgaactctgctccataaaaaagtatcaaacaagaataagaaacccataacaataacaaaacgataagtcctgcagcgccataagcactagctggtgatgattgtgtgaaataaatccctaataaaaatttacctgtttcaaataaaagtcctgtgagcaaagcacctggccataccatcttccattgcagccttgcatctggaaggtatctaaacatcaatccaaataaaatggagataattcctaaggaaactaagaagttaatagccatggctagttttcccaagtaatcagcaacatgaagctggatccagtcttgtaaaatggctattacagcagataagacaaaactaatcaagatcaaaaatccaagaactaaaataaatccaaagctttttacccggtctgtaagaattttccaccaaggtgttttgggattgatttttaatttccagattttattgagagctagctgtagttggtaaaaaactccagtggcagcaaatacaagagtcaccaaacctatcacatttgcaaaccaactctcattatctaaacgtgctgcttgcagtatgttgttgagatctgaggcggcatcataaccgatgaaggatgttaagccatttgtcaagcgtcctgtagcaatttcatcactccataccgtactgatgatattgatgataatgacaaggagaccaggtagggctaaaatagcataataagcaatgctggcactcaattgccatacatcatcttcattccacctttttgcactgctccataaaagtgaaggcacatgtttccatttaaaagattctaatgcagtttgttcgttcatataattctaaataaagtagaaaagtcttaaatcaccactaaaattaattatagtttaacgattataaaactataaaatcaatctgatttcccactctcttttgagcgcaactggatatagaagcttcctccaattgcaatactcgaggatatcctcctgtggtttgagcatctcgcatcaataggataagttggccatttgcagtaagctgcaccgttcccggaagtacaggactgctttttagttggtccagactattggagattttttcttctaattggaacgccatacggttccaattctttgaaatagtaaaactagtattcagtaatttctcttgctgctttctatccagtaaatgaaattctggacctgcatagcatcgtaaagcactttcttgtgccacaggtttgcaatgagcctttgtcgcttggggttccgtttgtgaatcgtaatccaagtcatagcccttttctaatttccccattaaagtaataccagaataaaaggatttactccccaatacttcttctgttttaaaaccaccgcatatagaaacataaataaaattacctgttgttgttgctcctatttttaatacatctccagaatgtatctctagcaacttgttttgttctaccaccatatcatttaccatcactatagcttttgctccggtaatggctatacaagtaggtaatgaaaataaatatttgcctccatttaaaactacctccagcactgcagcatttaaagggttattcaataaagagtttcctaaatctgccgctttttgatccatagcaccactgtgtggcacacctaaatgacggtattttttcctgccattatcttgtatagaatcatagaaaccagcattaagtatggttattctagccatggcttttaaagttttctagttctaatacacccgtctctcgatgtgtgataagttggtcgtgttcttcctgagaaactgcataaaattgtacctgatctccagattgaagcaagctaggtggaactctatgaacatccaaaataggcagtgggcagtttcccaacacatgccagcctcctggacttgtagacgggtaaatcccacaatacgcattagaaacagcaacagatcctgctgcaacttttaaagatggtgttgtttttctgggcagttgcaaacggctgtccagtcctttcaaatatggaaaaccaggtaaaaaccctataaagtctaccacataaatagaagaactatgaatgctgatgatctcgttaaaactgcaggtaggctctaaagcttcggtcagacttttttctatatcatagaaaataggcaacttccataacctagtggtttgttctaaaacctttttactttgtaggcgtttatcaatgaggtgttccatctttttgtgatccatctccagttccgatataactaaaatagaataggcaccgtgattgatctgtacttcttttggaaagagttttttaatctggagcgcggcaatggttcttttagaaatcatgtcaggcgtttgctcatcccatgaaatcaacagggcattttcactgtaagcgtgatatgtaattggagctttaggcaatggaaattccttctgtttttaattccttgacaaggtattctaaactggttgttaatcctaaattatctccatgaatacaaatcgtatctgcttccagttgatttgaaacaccttctatggaggttactttttgttccttgaccagtgccgctatttgccacgccgctattttataatcggtaatcaatgcgttaggctcagacctggctaccagctttccttgtgcatcgtaataacgatctgcaaatgcttctcgcctatagggaatttcattggtcctacattttttttctaataaggattgaggtggcacataaagaatggtctcgctgtaaaagtcctttatccattctatcaaccagtcagaaaagtcttcccgataagcggtggcatgatacagggcaccatgcatttttatatggtgcaggtctactcctacttgctgtgctgttttggtaaagagctgcatttgttgggtgacgctttcgcgaaagcgagatctagaaagatccataaacacacgaccgaaattctcttgatcatcaaaagatgggtgcgcacctgcttttactccatgactcaaagccagttgcaaggccgttctaaccgactcgccatcgccataatgacctccacaagcaatattgcaagagctgataaatgacatgatgtgcttgtcatttgacattccttctcctagatcacaattgatatcgatgcttttcatgttatacgagttcaaatacttttaaaattgttttggctcctaaaattacagcaattagaataactataaccgccatgatattttgccagattttattttgaaaggggcccaacaacttctgattcactagccaaagtaacaaaatagcgatgataggaagtaacaatccattagctatttgagcaaatatgatgatgtcaagcggctttaaacctatactagaaaagacgataccaatgaccaaaataaagatccataccgatctaaacgaccagcttttcatgtttcccttccagcccaaacagccttttactacataagcagcagcaagaggtgcggtaatcgcactagtgattcctgccgcaagaatacctatagaaaacacataagtcgcccatgatccataaacaggctctagtgctgaggcaagcgcag

SEQ ID NO: 2199 - DNA, 24191 bp, synthetic construct
  misc_feature 1..24191: note = Synthetic
  source 1..24191: mol_type = other DNA
gagtcgatcaccgggcggccgccgttgagcttgtgccacgacagtccgtcgttgctaagggcgaagcagatggcctcctggcttatgtcgttgcctgtgaaataaacaaaaagatagccggccatatccttttcctcaacggctgccgtgcgtgcggtggccgttgtcagagagatgatggccgcaattattacaaatagtcttttcctcattatatgctgtttttggttgttttagtttcatgtatggccgcatgtgtacggccatattccgttgtcaatatacgaatatgcggtagtccttggtcagtccggcggcgtcctgtcctgtggcgggcagatactccagcgcgccgatggtctgttcggcacccatgtcgatgacgagcagatgaggcatggatgcgccgtaggtggtgctccaccatgtggattcctgaaggtcgaacgccttgtcgcccgtgtggttgccgttgtcggcgtcctcactgtcggcatacttcgtgctccatgagctgcggtcgatgcgtcgtccgtcggtgtccagcacgtagatttcggctattgccgccatctcgctgccgtcgtgggttgacgaacactcaatggccagatagcgtccgcgtgccggcgcattgaattttacggtctgccatgcgcggctctgtgcgaaccggcccgtcgctgcgggcgttgccgagttgaggtcggggcggtcgcccggattgttgtggcggttgctcttctccagttgcagcttgtcgagctcgggacggtcctgtccccatgtctcaggcttggacggtccggtaacgtcgagcaccaatatctcgttgcgtcctttcttcagccagcatcccggcacgtagagagtctgttgcggaccgatgctccagaagcggccgatggcgtgtccgttcacatagacgaggcctttgccccacatttccatgttgatgaacgtgtcgccggtcttcttcagattgaagaatccgcggtagtatccggcacgcgaatcgagcttcagtcccatcgactcaccgttattgcagcgcgtgaaggcgcgcagggcgtggttgtaggagtcgggcagggtgcgcatggtccagtcgttcagcttccacgtcacgtcgtcaccatcgacgttggccatgagtgtcacttcgccggtgagtcccttgaagtcttttatggcgcggccgaagttgatgcgtcccatgccttcgacaacgatgtcgagccgactgccacggcttactggcggcagactgactgtcgtctcgttgcgcacgcggtcggtgcggcctatgtagcggccgtccacataaaccatggcatagtcgtgagcgtctttcatggcgagcgtggacggtgtgtttatctcaggcagagaggtggagtagatgactgttccccatcccatgtcaagctcttcgaaggtcagcggactgcgtgctacgcgcatactgtcggtgccgaacaccaggggtgcgtattcgttgaggctgaagcgcggaatgcttatcagctctgcggcaggtcgtggtacggcaggcagacgcttgtcggagtatttctccatcgtgcggcgcagctcgtagtattttggtgtggcctgtccgtattcgttgattggtgcgtcgtagtcgtaggatgtcacgtcaggagcgaatcccggtgagtttgcgcctgcccagtggccgaacgatgtgccgccgtgggtcatgtatagcgagaacgaaatgcctttggacaacatctcgtctatgcctgccaccattgccgaggcggggcgggtctcgtggcgggcgccccatttgtcgaaccatccgctccagaactccgagcacataagcggcgactcaggccgcagttcgcgcagacggctgaactgactgtcgatgtctgagcccgtgccgaagttcattgtccacaccagatcgtccagtccgttgagtgtgaagttgctcgcccagtcgcattggaaaagcgtgaccttgtcgaatcccgacctgcgcactatgtcgcgtatggcactcacgtaagccttgtcctcgccgtaggagccatattcgttctccacctgcaccatgattatcggtcctccgttctgaatggtgagcggagcgagctgttcgcccaccttcgccatgaacttggatacgcggtccatgaagtaagggtcctgctcgcgcagacgtatatccttcttcttgagcagccaccagggcagtccgcccatctcccactcggcgcacacgtaaggtccggggcgcacaatgacgtacatgccgttcttctgtgccaggcggcagaaggccgcgatgtcgttctgtccggtgaagtcgaactcgccctcacgctgttcgtgtatgttccaaaacacgtaaaggcatatggtgttcatgccgagcgcgcgacacatcctgatgcggtgctcccagtaagggcgcggaatgcgcggatagtgcagctcggcagccttcaccacgaagggcctgccgttgagcagaaatgtcttgttgccggctgtgaacgtaccgccattgttgtcagcggcgcatgtcgtgcgacccgcgagcgccattaaggccgcgagtagcagtgtgcgtagaaaggatggtttcatcatgtcagtattcagattttgtatttctgtgtcaaatggtgtttatatatgttttccggaggtttaaggatgagtcccggaaagcgcgtcacgacgtgccgcaatgagtgttaccgctgttggcggacgaaacgacgtgattgctgcaaagttagtgttttattttaaaatacacaaaccggctttttcactcacgatttcctgcgtgcggttctgtggcagtggagtatcacgcatggcggcaatggaattgtgacatcacatcgtggacatgacatgaggcgtgtttgccggtcgcagtcggcggaagataataaagcgcaaacgataccggaaactgtatatttatacatctccggcggtaaaatattttgacaataaaaattctcaaaatagaaagcggagctcagcgaaatgggctttatcagacagatgtctctttagcaaaccgtgatattatccttcccgaatgacataaaagataagacgactttgcgaaacgggctttatcgcggtctgatatgggctttgtcagggcacgatattggacatatcagtgcatgaaatgggcaatatcggaggctgaaacgggccatatcgcaacgcggtacgaagactataggattgctggaaagtgcaagtgactgacattcaatatgatgcgtaaccctctcaaaactcgcaaatttgcgagcgaggaggcagttgctcgaaaaaaacgccgtattttcgggttacggtgaatattcatacattttgcgatgtgcattattgcatatttatgcaaaaacattaatggatgatgaggtgtatattcaaggcgcaggatgtcgtattaaggatattgtaaaaggtggattgcaccagtgtcagacgtccttaatattctccgtgtcaagtgttaatgactgtcccggacggtgccgtcgtcatcggaaaaacatagcttcaggaccgaaacggataagacaaaagcaggaggaaaacactgatcgtttccctcctgccatgaccgtgtatgacattacatcacgccagatgcagtcatttctttattatcttcgacgtctttgtttcgttctgtgtctccacagtgagcagatatattccctttcctatggaagatatgtcgaacgtgtcgctgttgtttccggcggtcttcacaaggttgcccgccatatcgttgagcgtgaggctcaccaccggctcgctgcttttgatgtggagcagtccgtcggttggattgggatacactttgattccggagtcttctgctacctcgtctatcttggtggagatgttagtgctgaacgagtactgacccgaaccgagcgtgaatacggccttgccgtcggcagtgccctcatacttgacaccttcggcctcttcggccggtatctcaccttcatacaccgtgttgccgtcggctacaggcatgagcagttgggcggtggtgttggccggaacggtgactttgtatgtgaatgatccgtcggctccgagctgccatgcgctctttatgctgccgtagtttgaagccactgtcgtatcgacgctggtgatgcggtcctgtccctgaggcagtgtggtgcgggtgtcgggatagggctgtaatatgatgtgcttgaagcccacattctgctcgtcggcctctatgccggccatgtatctgtacatccactcggccacggctccgtaggagtagtggttgaaggagttcatggatatgtctttatggaatccagtctctttggtgtaggagttccagcgctcccatattgttgtggcaccctgatccacgctgtagagccatgacggacagttgcgctggagcagcaggttgtatgccttgtctatgagtcccacctgtgagagtgtggtgttgatgatgcccgtacctacgaatccggtgttgagcgtctcgttgttggagcttatggcacgtgcgagtgccttgatggtggcctcttcagatgtctcgtcgggcagcagaccgaagcgcagtgcgagcagataaccagtctgagtgcgctgtgtgggcatgttgttgctgatgtagcgtgtggcgaactctttctttatgttgttgtagagttcctcatattcggctgccttgatggcatattcgtcgcctggtgccgtgctgagagcctgcgacatcttgctcatgagcattgcgtcgtaagcatagtagcatacgctgacatagcgtgagtcggtcggaacgaacgatacccagtcgccgtatgatgtgccggcaccctgatacttgtagccgtcgccggcctgtgctgccagccagtccatgtatttctccatcgactcatagttctcctcgatgatgctcttgtcgccgtgcatgagataagtggtccatggtacgatgatgcctgcgtcgccccatgcgccgttgccgtagcccacccaggctattggagccacgtcgggataggcaccgtccgaacgctggctgtcgcgcatgtcgcccatgaacttgtggtagaaggcggcggtgttggcgttgtaggcagccgtgcggcagaatatctgcgtgtcgcctgtccatccgagtcgttcgtcgcgctgcgggcagtctgtcggcacgctcatgaagttgccgcgctgtccccagatgacgttgctgtagagctggttcacggcgtcgtggcttgttgtgagcgacgagccttcctcgttgtcggcacctacgacaagtccctcgatgccggttatctcgatgtcgtcgcccgcggtgagctcacagtagcggaatccgtagtaggtgttggtcgggctgtaggtctcgccttcctcgtcgccgcggagcgtgtagtacatcgaggcctttgccgtgcgcaggttgatgagatacagactgccgccggggccgtcgtcgccacggttggtgtcgcccttgtcgttgagcatctcgctgaagcgtccgcgcagagtgcagccggccttacccttgacgttcactctcacccaacctaccatgttctgtccgaagtcgtagattacggtctgtcctttcttcagtgtgactggcgagttgccgcttatctctgacactacgttcaccatgccataggcagtgcctgtctgtttcacgccttcgtagattgtgatgtgttccggctgacgtgtcagcgatgtgcgtatgcgtgccgccggaccttcgaatgcgcatatctcgccggtgaagtcgcggctcgacgccgtggcgtgccatgccgactggtcgtatccggcctctttccaaccgtcctcgagagtggcgttgtaggtctcgccgttgtatatgtcgcccttgcgcagcgctccgttgtttgatgtcgcccatgagttgtcggtcacgatggcctccttcgagccgtcggcatattcgatgacgagcttcgccatgaatgccacaggcttgtcgccgtattgtccgtgggcgatgcctccggcccagtagccagacgttacggtcgctccgatggcgttgtcgccttctttgacgagtgtggtgacgtcgtgtgtgttgtagaataccttctttgcatagtcggtccatcccggtttcagctcgtcgtagatggttgttccgtcgtcctgaacgtggcctacgcgggtgccgttgatatatacgtcgtatatgccgagggcagagctgtagagcttggccgactttatgggtgccttggccgtgaactctttcctgaacatcgaggccgctcccatggtgctctccatgaatctctgctcgccgcttgctacggccacatagagctgtttggagccgtcgtgctcctcaatggtgccgtcgaacaacggagcgtcgccctcgaagtcctcagacagacgcacggtctcggtgccgtcggcattgattgtcgtcactaccacattgtcggcataggccggaccttcgtcatctacgtgtgcgcggaagcctacgtagccatcgacaatcttctcagatgcggtgtatgtatcgacaagctgtttgtcgatgtaggtgttcaccacgtttcctgtcacctcaatgcgcatgcggtgaggcttgccgagtatctcgtccttggtgaacgcgtctatgcgtgtgtcgctgtatgaaggtgtagagctgttgttgtacacatggcggcgtattgccggatagtcgtagtccttgcagttgagcgcccacatgtagtagttgttcgaggcggtgtatgcgaacaccacagctacgttgcccttcatgagagtgatgtcagactctatggcgtagccgctgttgtcgtctgatgtcgtctctttctgccatgcgaacacagagttcaccacaccctccatgcgcagttgtccgtctgtcactgtgccattgtcgaaagcgtagttgtcggcgttggcaaagtcctcgctgaagagggtctttccgttggctgtaaccttgatgttgtcccacagcgcaatctccggatcgctgttcttctcgcccatgtcggcgcgcaagccgagcttgccataggcgaagtcgccctcgcggtcgtctatgagtatgtcgttgatataggtgcgggcacgtttgcagttgtcgtaaacctctatgcgcagatggtatgtctcgttgttcttcagatcgacgatgcctgtcaggtccttgttctcaagacactcgccgcccggattccagcggtgagggcggaaacggggataatcgccctcggtgttgaactgccacatgtagaagtgtgactggtctgtcgcggcgaagcacagaccggctgccacttgcgagatgttgaagtcggcggttatggtgtattccgttatgtcggcggtgtcggtatctttctgccagcaatattgttctgtaccatatccctcgaagtagagacggccgtctcttacaacgcctgccgtgaaggtggtgttgccttctgagaagtcttcggagaagacagacacgccatcgacgctcacgttgaagtcgtcgtagtaggcagcctcatacagattgtcggtatattcggagcgtgcggcacggaaaccgagacgtccgaaggggaagtcgccgcggcgctcgtctatcagtatgtcgttgatataagtctttgcgagcatgccgttttcggttatgtcgatgcggagggtgtattcctcgttgttcttcaggtcgattatgcccgtcaggtcaacgtcctcaagacacgtcggagtgttgttcacccagcggtgaggacggaagcgtggatagtcgccctcggtgttgaactgccacatgtagtagttgttctcgtcggtcatgccgaaacacagtccggcagccacctgggcaatctcgaacttgcagcttatggaatagtcggaaatctcgtcctcgtctatgtatccgagcggattgttggagtattttatccatttcgctccgtcccatcctgtgctcatgagtccggtttcgaagtaagccttctctgtagaggtggcttcgttgcctttgttgtcggtcactgtcaccttccaatagtagcgcgttgacggcgcgaaggtgtagtcgggactgatcatcaccgactggtctgactcaacgatgcctgagtcccacacgatgttggagcagtcgctgtcgctgcacaccatgatgcggtagctcttctgcatcactccgcgctcgtccgagttcaatatccagctgaacgtcggcgtcttgtctatgcccacgggattggtgagcgacagggtgcgcagcttttccacagtaagagcttgagccacccctgcgaataatacactcagtagaagcaaccatagtcttgggttgcttgatgagaaaacggttcgtctcatagttgtttgtttagtgaataatatgaaagtgaataataagtttattgtcgtcagtatatgtgtatatgcgtttcatgcaccgtgtgccgtcgtcataccacatcagtatagtcttcgtaggttcttcctcccgtggtcttttaccgttccgggtggcaggatagtgtttctgtgtcttttttacgcgccacatgcgcaacggcatagtggctgtatgtcagattagtagttcttctcaaataataatatcagtcctataagaaagaacaaacgacatattcatcaatttgaatcattccttatttttttatattttttcacatttggcggagtggtgtccttgacatgacaacgtaagtccggcggattcacaaccacgcgggaatgggtttatacgtgaaatgtcatagaatatgatttatatgatgcgggagaggtttttatatgatgtggaaaaaggtttttatatggtgtaggagaggtttatatatgatatgtgaatggtttatatatgatgctggaaaagtttatatatgatgtgtgagaggtttatatatgacgtatgaaaggtttatatatggtgcgtaaaaagtttatatatgatgtatgaaaagttttttatatagtgtatggaacgtttatataatgctgaaacgtttttatattatgcgtgaaaggcagtggcgatgcaggcctgcaagattcacggctgcacggtgatatagtgatgataaactctccctgccgcaaccggtaaaccatctttgcaatcgcggtatatgcttacggcctgccggacgaatgtttcccgtgcctctccttcttcttgatttcagcgttttcaggcaaaacccgcatggcgtgcttacaatttttcttgactaaattttgacaaaataaattcgcaaaagaggtgtgaacgaatgttaaatcatgcataatacagcccgtttcgtgtcttatagcactttgatataccccataacgtagtccggaaaagtccgtttcgctttccgatattgcccatttcacattacgataaagcccgtttcagggtgcaatatggcctatttcagcacccaatatgggccatttcgcaagccgaaatggtgctttttgcaatgcgggggaatgcctcttaaacataaatagttgatattcaatatattatgaaagcctctcataactcgcgtatttgcgcccgccgaagagtccgcccgcaaatactcgcttatttttcggggtagaacaggaaactgaggccgaaaaaccgaaatccgcttacaatctgaaagtgccacgtaccggcatcccctcaactgaaggaaagacgccgtctcagacttaatcacaaaccgtcatcagaccgcaggcctttgtccccgtattgaaactggtccctttttctttctcacggccccgatataaaccttaaatctacgtttccggcttcggtaaatacagatgcctcgtgcttgtagttgctgttatttttcctatatttgcaatataatattgttgcaatctattgttcggacatgaaaaaacataaattatgaaaaagatattaggactggatctgggaacgaacagcatcggttgggctgtggtgaatgagaaagaagatgatagagaaaaatcatctattacaaaagttggtacaagaaaagtatcccttacttctgaagaacagaataattttaataaaggaaagtctgccggaacaaatgcaaaaaggacattaaaacacggcgcgcgtataaacttacagagatacaagctgcgtagagatgcccttataagggttttaaaagagaataattttataacagatgatacattattatctgaaaatggcaataatactactttcgagacatatcgtttcagagcacaggccgcagacagtgaagtgacattggaacagcttgcccgtgtgttgcttatgataaacaagaagcgcggttataagagtaatcgtaaagcaaaatccaaagatgaaagtgggcaattaatagatggaatggatattgcaaggcaattgtatgatgagaatcttacgcctggtcagtacactctatcattaattaagcaaggaaaaaagaaagttcccgatttttatacatccgatctcaacaacgaatttgaaagaatatggagctttcagaagcaattttatcctgatttgcttaccgatgaccttaagacagagttgaatggtaaggacgaaaagggagtaggaacaatatgtttagacaaatttggaatcgtcggtattaaacgtaatacaaaaggttgggaacagaaaaaggaggattacgtatggcgtgcggagagtttggaaaagaaaatggatttagaaagattgaccattgtctttcagaaaatatgtgggcagataaaaaatgcaggcggatatctcggttcaataagtgatagaagtaaggaactgtatttcagtggccagactgtggggcaatataagatgtctgagcttataaataatccgaaccgtagtatcaagaatcaggtgttttatcgtcaggattatcttgacgaatttgaacgtatatgggaaacacaggccactttccataaagagctcacacctgagctaaaacatgagatacgcgatatcatcatattctatcagcgacctttgaagtcacagaaaaaacttgtcgcttattgtgagctggaaagcaaacaggttgaagtagaagtgaatggtaaaaagaagaaagttacgattgggcagcgtgtatgtccaaagtcgtctccattgtttcaggagttcagaatatggcagcagataaacaatattcaggtgtcaggatatattatacctgaatctcagacagatctgtttggaaatacaccagccaataaaaaaggcagacgttttcttttgcaggatgaaaaggaaatcctttttaaggaattgaatttaaaggagaagatgtctaagacagagatattgaagttgttgtttgataattacaaagagcttgatctaaactataaggaagtaaaaggtaacactactttagcaaaactgtttcaggcttataagacaataatagagcagagcgggcacgaattgaacaacctgtccaataagtctgccggtgatatcatagacataatacacaagatatttgatggtcttggattcaatacggatattcttgcttttgattcatcgattcaaggaaaggcttttgagaagcaaccgctttatagactgtggcatttactctattcttttgaaggagataaatcaaagacaggtaatgagaaactaataaagaagatatcagacctttatggctttgataaagaatatgcgtcaattcttgcaggtatagtgttcgagccggaatacggaaacctcagtgctaaggctataagaaaaatattgccgtttatgaaggacggtttggagtatagtgatgcttgtctgtatgcaggctatcgtcattcaaagcgttctttgacaaaagaggaaatcaactcaaaacagcttgcagaccatatagaactcctgccacgtaatagtcttcgcaatcctgtcgttgagaaaatattgaatcagatgattaatgtcgtgaacgcagtcattgtagaatacggacgtcctgacgaaatacgtgtggagatggcacgtgagttgaagttgaataacgtacgacgggaagaatgtataagaacaataaacaagtcaacatccgagaacgagtcgtatcgcaagaaattacagacagagcttgaaggaatggaatatgtaagccgtaaagatataattaaatacagattgtatcttgaacttgagtcaaatggatttcatacgttatattcaaatacattcataccgttagagaagttatttaccagggagtttgatgtagaacacatactaccacaggctaaactgtttgacaattcttttgccaacaaaaccattgagaaaagaagcgtaaatcaggaaaagggtgacagaactgcgtatgactatgtttacagcaaatatcacgaaaaaggactcgaagactacaagaaacgtgtggaagacttgtataaaaaaggaaaaataagtaaaacaaaaaggaatcgtctgcttacacaggagcaggacattcctaaagatttccttaaccgcgatcttagcaacacgcaatatatagcccgtaaagcctgtgagatattggaaagcgttgtaaaaaccgttactacaactacaggatcaatcacaagtaagttgcgtgaagactggcagttggtggatgtactgaaagaattgaattgggacaaatatgataaacttgggttgaccgagatcataaaaggcagggacggacaacgcatcagacatataaaagactggacaaaacgtaatgatcatcgtaatcatgcaatggatgcattgaccatagcatttactaagccaagtttcatacaatatcttaacaaccgtagcgcacgcagtgataaaaacagcataatatctaagatagaacagaaggaactatacaggacagctgatggaaagacaaaattccttccgcctatgcctattgatgagttccgtgctgaggctaagcgtcaccttgagaatattcttgtatctacaaaggcaaaaaataaggttgtgacacggaatgtcaatgttacaaagacaaagcgtacagaaaccaacaaacgggagcaggtgcagttgactccacgtggagaacttcacaatgataccatctacggacgtaggaagttttatgatacagataatgaaaaagtgaatgcttcgtttgatgtgtcgaagattatgactgttgcggacaaacgttaccgtgaagcattgctcaaaagattggaacagtttgatggcgatgccgagaaagcgtttactgggaaaaacagtcttgagcaaaatccgttatacgtagatgaacttcatacaaagaaagtgcctgatatggtgaaaaccgtaaagtttaaaaccatttatacacaacgtaagggaatatctgatgaattgaaaatagacaaagttcttgataagagaataagaacgattcttgaagaaaggcttgctgaatttaatggtgatgcgaaaaaagcattctcaaatcttgacgagaatcctatatggcttaataaagaaaaaggtataagcattaagcgtgtcacaataaacagtggtctgaaagaccttatagctttgcatgacaaacatgacaacaatggccggcttatactcgacaaagctggaaggaaacagccgtctgactttatatatacggacggtaatcatcatgtagccattttctgcgacagtgaaggaaatatacaggaacatcttgtttctttctatgaggctgtggcgcgtgctgtgcaacatcttccggtaatagacaaaaattataacaaagataaaggctggcaattcatgttcactatgaaacagaacgaatattttgtattcccgaataaagaaaccggattcgatcctaaagagattgatttgtttaatccggataattatgaagtcataagccgtaacctgtatagagtacagaaattatcttctaaagattatgttttcaggcatcatctggaaacaactgttaactataagaaagaattgcggggaattacatggaaacgtatacgatctttggagcatattaggaatattgttaaggtccgtataaaccatcttggacagattgtcgatgttggagaatattgaattttatatgaataaataaaagcattatgataaaacgcacactgtgtttcacatccccggcttacctgtcgctgaaggatggtcagatggtggttaggctgccggaagttgagaagagcgatatgcccgagagtctgaaacgtgatagcataagaaccataccggtggaagacatcggcgtggttgtgctcgacaacagacagataaccattacgcatggtctgctcgaggcgttgctcgagaacaactgtgccgtggtgacgtgcgacgcacgcggcatgcctgtcggactgatgctgccgctgtgcggcaatacggtgcagagcgagcgtttccgccttcagaccgatgccacgcttccgttgaaaaaacagttgtggcagcagacggtgcgggcaaagatagctaaccaggcggctgtgctgcgcttgctcaccaatgctgatacggggtgtatgactcgttggatagacgatgtgcgcagcggcgacgccgacaatctggagggccgtgccgccgcttattactggaagatgttgtttgccgctatccccggactcgaatccttcacccgtggccgcgatggcatgccgcccaacaatctgctcaattacgggtatgcgatactgcgtgccgtggttgcgcgggcattggtgtcgagcggtatgctgcccactttcggcatacaccatcacaaccgctacaatgcctattgtctggccgacgacataatggagccttaccggccgtatgtagatcgtcttgtgtatgatattgttagagaaaacggcatcgacggacttgaactcaccaggcaacacaaggcccggcttctcaccattcctacgctcgacgtctgtatatcaggcaagcgcagtccgctcatggtgggtgtcactcagaccacggcgtcgctctaccgttgcttcagcggcgagtcgaggcgcatagcctatccggaaatagattgaatgtttcgggcgctgtaccgctctgccatttatatgaattattatttattatggaccgctttagtgaatatcgcgttatgtgggtgcttgttttctttgatttgcctaccgagacaaaaaaagacaagaaggcttacgctctttttcgtaagaatctgcagcgtgacggtttcaccatgttccagttctccatctacgttagacattgtgcgagtatggagaacgcgcaggtgcacattaagcgtgtcaaatcgttcttacccgaatatggcaatgtgggagtgatgtgtatcacagacaaacagttcggagcgatagagttgttctatggcaaaaagtcgaagccacctaatgctccaggtcagcagctcgagctattctgaatatacagatttattgttttttaactttatagcaagtctgcacactttaatcattccatacaataatgttgtctttcggaatataacagaaataaggaaacaccgtcttgtttgcgatgtttccttatttctatatcagttttatgtttctgatacatcacataatcctttgctgctcagcttgttatggataatgtgctgttgcttatatagcaaaggtaagaattttagagcaaatcacaacgcggtgataccatttttcacgtgttcgaggctgttgcttatatagcaaaggtaagaattttagagcaaatcacaactgctgatgataagaatcttgtcccacaatcgctgttgcttatatagcaaaggtaagaattttagagcaaatcacaacgggggctttacgcggattttccgcagaattgctgttgcttatatagcaaaggtaagaattttagagcaaatcacaacgccgggcggcctgttaacataattcaacaagctgttgcttatatagcaaaggtaagaattttagagcaaatcacaacagttccacaacatcatgcaaaacctcagcagctgttgcttatatagcaaaggtaagaattttagagcaaatcacaacgccccctgatgcttctggaactccattaatgctgttgcttatatagcaaaggtaagaattttagagcaaatcacaaccgcgcctcgttccacggagaagcgtcaagcgctgttgcttatatagcaaaggtaagaattttagagcaaatcacaactgctggtggtgctaagtatatttgcaaatagctgttgcttatatagcaaaggtaagaattttagagcaaatcacaactcaatgcctcctacaactcgtccagaactgctgttgcttatatagcaaaggtaagaattttagagcaaatcacaacccattgcgtacttcagacttcaatacaacagctgttgcttatatagcaaaggtaagaattttagagcaaatcacaacttgtcgtgcttggcatagacgaactcgccggctgttgcttatatcgcaaaggtaagaattttagagcaaatcacaacactctgtctataaggctgctacattcccatgctgttgcttatatcgcaaaggtaatgattttcaaagcaaatgtccataatcaatcccgattatttttattctgaaaaaccattggacaatattttctgatcaacttatttcgtgtcacttctccattctgttgggctctgtttttctatttcgcgaatagtgtttgttaaaagtcttacttttcatgttgcgtgaatatatggttatgaggaagaaaagcattgttccgcatcattccaatcgctacgcgttcgggcctgtttctgccgacagttccggtttcgtgtgcctatgctttatggatcggtaggcaagtttttgccacattattatatatgatgcgtcgttttattatatgcgttgcattgctttcgccccttccatgcccgccacttgtatttcgattgttgccattatcgctccgcaataggttttattccgcgcccggcagttattattcctgtcgctcgtaattgtgcagtccgtccgtacacgtccggctcatggccgttccatccaccgtattatggtctcaggagagcattccgcagttgtcggttttatatcatattacgatgaataatttattattatacagtcattatgcgtaatctgacactgacgatatgcggtttatgtcactttttatatatccgactgccgtaccgtttcatgctacgtgccactgcgaagacgactttttgcgggcgtatcgcgcctgttttatgcgtattgtgacactttcgggagcggttcacacattaatatatgactttctgtgtggccttttcagtgttgtatcaaaatgcgaatgttttcagtcaaaaaatatatctgcattactgtatgttattactatatttgccatgtcaataaaagtctaaactattaataaccggatgagcaacaagaaagagtgtttcttcgcaatcgacctcggagcaacgagcggccgtaccataataggcagtttccaatcatcgggactggagctggaggaggtgaaccgttttcccaaccatctcattgagaacggcggacgcttctattgggacatatacgagctgttccgcaatgttgtcgaggggttgaggctggttgctcgccgtgacgactgtgagatatgctccataggcgttgacacgtggggcgttgatttcgtgtgtgtgggcagcgacggagctttcctgcgccttccgcgtgcctatcgcgacccgttcaccgcgggtgctgccgagcgtttcttcgcttcggttccacgcgaaacggtttacagacagaccggcatacaggtgatggacttcaatactctgttccagctcgatgccatgcgtcgctcgtcagacagtgcgctggctgccgctgacagattgttgttcatgcccgatgctatgacatatatgcttacgggcgagatggtgaccgaatataccattgcctccacgtcgcagttgctcaatgcatccacccgacggtttgagccttcgctgctcgctgctgtcggactgacggaggacagtttcggacgtttcgtccttcccggccggcaggtgggcgtgctcacgcccgaggtgcagcgccagacagggctcggccccgtgcctgtgatagctgttgccggtcatgacacagcgtcggcagtagccgccgtaccggccgccgaccgcgattttgcttatctcagcagcggcacatggtcgttgatgggcatcgagaccgacgcgcccgtcataagtgccgacactcaaaggctcaacttcaccaacgagggcggtgtcaacggcaccatccgtctgctgaagaacatttgcggcttgtggattcttgagcgctgccgtgcccaatggggagcagtgccctacgacgtgcttatagacgaggcacgtgccgccgagccgttccgtagtttgataaatcccgacgaagcttctttttcaaatccgtccgacatggtagagaccatacggacatcctgccgcagtcacagacaacctgtgcccgatacgcgcggacgtctggtgcgttgcatattcgagagcctcgccttgcgctaccgtcatgtcttcgacagcctgcgcgggctctcagagcgaccactcagcgtgctgcacgttatcggcggtggcagttgcaacgagctgttgaaccaatggacggccaatgccaccggagtgccggtggttgcaggaccgtccgaggccacagccataggcaacataatgttgtaggccatggctgccggtcatactgccgacctggcgtcgatgcgccgacaggtgcgcggttcggtaaatctgaaaacctacatgcctgccgacaccgccgtgtgggacgaggcctaccgcaaggctccgttcgccgtctgagtgcgtcggggctgtgatgtacggcgcatgaacagggcgcgacaccggttgccgcgccacgagaaacgataatttacacataaccataaaaatacaaaaacctgattatgaaagaacaactgataaacaaagcctacgagatagccaaggaacgctatgccgttctgggcatcgatacagacaaggcgatggatgccttgcagaatatttcattgtcaatgcattgctggcaggccgacgacgtcactggattcgagtcgggcggcgcgctcacgggcggcatacaggccacgggcaattatcccggcaaggcgcgcaacatggaggaagtgcgcatggacatactgaaagccatgtcgttcattcccggccgtcaccgtctgagcctgcacgagatatacggtgacttcggcggacagtttgttgaccgcgatcaggttgagccgtcacacttcgagagctggatgcagtgggctgccgaaaacggcataaagctcgacttcaattccacctctttctctcatcccaagagcggaaacctctcgctggcaaatcccgacaaggccatacgcgacttctgggtggagcacacggtgcgctgccgcgccatcgcggaggagatgggacgccgccagaatgacccctgcataatgaacctatggatacacgacggcagcaaggacataacggtgaaccgcatgatgtatcgcgaactgctcaaggattcgctcgaccgcatcttcgcaaccgaatacaaacacatgaaggacagtatagaatctaaggtgttcggcataggtcttgagagctacaccgtgggttcaaacgatttctatataggttacggcgtgcagcatcagaagctcgtcacgctcgacacaggccacttccatccgacggagagcgtggccgacaaactatcttcgctcctgctgttcgtgccggaggtgctgctccacgtgagccgccccgtgcgctgggacagcgatcacgttacgataatgaacgatgacacgctcgacctctgcaaggagattgtgcgttgcaatgccctcaaccgcgtgcacataggtctcgactacttcgacgcctccatcaaccgcatcggagcctatgtcataggaagccgcgccacacagaaatgtctgcttcaggcgctgctcgaaccgctcgacacgctgcgccgctacgaggctgaggacaagggcttcgagcgtctggcactgctcgaggagtgcaagtcgctgccatggaacgccgtgtgggatatgttctgtctgcgcaacggtgtgcctgtgggcgaggaattcatagctggagttgatgaatatgaggcagaagtgacctcaaagcgtaaatagtttaaggttgttttgtcatggacattttgttagggttatttataattgcagtcggcagtttcggtcagagcagctcgtatgtgcccataaacaaggttaaggaatggtcgtgggagagcttctggttggttcagggcatctttgcatggcttgtgttccccttgcttggcgcgttgctcgccgttcctgcggacggcagtctgtggcagttatggagttcgggcggagcgcttcaggccgtcatctatggtgttctctggggtgttggcggcctgacgttcggcctctccatgcgctatctcggcgtcgctttgggtcagagcatagctctcggcacgtgtgcggcgtttggaactctctttccggcgctcttcgcaggcaccgacctgctccgcggcgacggtctgatgttgctctgcggcgtgtgcatcaccattgcaggcattgccgtgataggctatgcaggcagtctgcgctcggccaatatgagtgaggaagagaagaaggcggcagtaaaagatttcgcccttaccaagggtctgcttgtggccttgcttgccggagtgatgagcgcatgcttcgctctgggtctcgatgccggcggacctatcaaggaggcagccctcaatggtggcgtggatccgctcttcgcaggccttcccgtcatattgctcgttacgctcggtggattcttcaccaacgccgtatattgcatacaacagaacataaagaaccataccggccgcgagtatttcgcttgcagcggtagcgtgctgaccaacaacgtgcttttctgtgcccttgccggcttgctgtggtactcgcagttcttcggccttgagacaggtaagagcttccttaccggcagtccggtgctgctggcattctcgtggagcatcctgatgtcgctcaacgtgatattcagcaacgtctggggcatcatactgaaagagtggcgcggctgcggacgcaaggctgccggagtgcttgtcgcgggcctgctcatactcatagcctccatcattgtggtggccatggcacagcagtgacgggcctgtaccgcccgacccttcggatacgaacggtgaggcgggaggctcgacaatatgatatgacaatgcgtttacaggctcacgggcggcgattcttcccgtgagtgtgcataaacgaactataaaatccggactgcctgcggtgctgtcagtattatatgtaaattgatgtaatgctgcgtttgtgggtctatgtgagtgataacgtgccgtatggcatttccggaaaacctttgtatggcggacatatcgctgcagcttggccgtcgtcgcggcttgtttgtgctgcatccattgcttacttgatgacaatattccgattatccgtcctgtgttaaaattaatgatgatgaaaacaaacgaatctgtgatagtgagaaagacattgttcctgatacttgtcttgtgtctgggcttcacctgtaagctcatggctgtggacaatctgcgctgcgagatggttgtcaatcctatgggaatagacatcgtgtcgccgcgactgagctgggaactgaacgacaagggacgcaacgtgatgcagacttcttatcgcattctcgtggcttctgcgatggataagctgaagcccggcaaggcagatttgtgggactcgggcaaagtcagttcggacaattcggcgtacataccgtatggcggagtggctctgaagagccgtatgacgtgctactggaaggtgtgcgtcaccactaataagggcaagtcggaatggagcaagcctgccagctggacaatgggactgctcgacggcggcgaatggaaggcgcagtggatagggcttgacaaggctttcgagtgggacgatccgacagctgactgcacaagactgtcggccagatatttcagaaaggatttccgcacggcgcgccgcccggcgaaagccacattgtatatctgcggactcggtgtttacaagctgcatatcaacggcaagaccattggtcgtcaggagctggcacccactcctactgattacagaaaggaagtgaaatacaacacgttcgacgtgaccggcgagataggcaagggcgacaatgccatcggagtgattgtgggcaacggccgtttcttccatatgcgccgcaccgacagggctgaatttccaaagctcatcgcccagctggaacttgagtatggcgacggcagccgcgaatatgtggtgagcgacgcgtcgtggaaggtaacatcgcacggagcgataggcgctaacaacgagtatgacggcgaggaatatgacgcacgtcgggaaatgccgggatgggacaaagccggattcgacgactccgcgtggctgcctgtggacatgaccgccgcaccggaaggaaaactcggcgcgcagataaacaataatatacaggtgatggacgttatcagaccgataggtgtcacccgccttaacgacaacacctacattctggatatgggacagaacttctccggacgcctcaagatgaaagtcaagggtgagcgtggcagggaagtgaagctgcgcttcgcggagttccttaacgatgacggaagcgtcaatctggacaatctgcgcggcggactcgccaccgacaaatacacactgaagggcgagggaacggagacgtgggtgccatgctttgccattcatggcttcagatatgtggagataaccaattatcccggtacgccctctattgatgatttcgagggacaggtgctttacgacgacatgctgcagaccggatatttcgctacttctgactcgatgataaaccggatctaccacaacgcctactggagtgtgcgcagcaactaccgcggcatgcccaccgactgcccgcaacgtacggagagaatgggatggacaggcgacagagccatcggatcgtacggcgagagcttcctcttcgacaacaataatctgtacgcgaaatgggtgcatgacatacgcataacccagcgcgaggacggcagcgtgtccgacatcgctccgagctactggagttcttacactgacaacatgacgtggcccggcacttacctcacggtgtcgaagatgctttacacgcagttcggcaacatacaaccgataaccgagcattacgcttcgatgaagaaatggctgtactatatgcgcgacaagtatctgactccggaccatatcatgccgcgtgatgtttacggcgactggtgcacaccgcccgaggtgttcaccgccaacgacccgcagataccgtcgctgattaccgacaaggcggtgataggtacggcttactattattatatgctcaagaccatgtcctattttgcctcccttctggacaaggatggcgaccgtaacgagttcgacgaacaggcggctgttgtcaaggaagcctacaacaataagtttctggataaggagaaacgctcatacagcaacaacaccgtgacgtcgaacctgctggcgctaagcttcggacttgtgcccgacgactatcgtaacgacatagccggcaacacggtaaggctcatagagcacgacttcaagggacacataagcaccggagtgataggatgtcagtggctgatgcgcgggcttacggagataggacgtcctgaccttgcttacggaatgttgcagaagaccgactatccgagcttcggatacatgataaagaaaggtgccaccaccgtgtgggaacactggaacggcgacggcatggaacgctggatagactcgcagaatcatgtcatgctgctgggcgatctgctcatct

SEQ ID NO: 2200 - DNA, 24191 bp, synthetic construct
  misc_feature 1..24191: note = Synthetic
  source 1..24191: mol_type = other DNA
ttataaaatacgccggtttttaatcggataaataaaaaaggatactcacagcaagctgaataaacgatttattatcaatggacacattaaaggaagatttaaaaaaacacattatagaacaattgaatcttgaagatttgcaggtatcggacattgatgacgacgctttgcttttcagtacggatggaattggcctggactcgattgatgcacttgaactgatcgtgctgatggaaaaatattacggcattcaggttacaaatcctgaggaaggaaaagtagcgttcctgtcaattaataccatggccgattacatagcgaaaagaagaacttaaaaagtgtttactgaaattgactctcaactttccactaaaaaatgtccgttcgaataacaggtattggaattgtttcagcaataggattaactgttgctgaaaatctgtcttcacttgaaaacagcaaatccggtattggcaagatacaatatcttgatcaaaagggagactatctggtgggtgaagtgaagtgttcaaatcgggaattgataagtagacttggcgtgaaatcacagccaatttccagaacgtcattattgggactggccgcggcaagagaagcctggggagaaaacaaacattcatccaaattacgaaccggtatcatttcggctacgtcggttggcggaatggaccagaccgaacatttttaccgcgattatctgaatcagaataatcctgattttcatgttttgaaatgccacgacagcgggaataccacagagcggattgctgctgaattaggtatttcaggttatataaacacactttcaacggcttgttcttccggggcgaatgcgattatgctgggtgcacgcctgatcgaacaggggaaacttgaccgtgttctggttggaggaacggacgctttgacacaatttacattgaatggtttccgctctttaatgatctacgacgatcagtggtgcaggccctttgatgaatccagaagcgggctgaatctgggtgaaggtgctgcgtttttgttattggaaaatgaaaaaagtatagatttttccggcaacgaaaccctgtgttgtttaagcggctgggcaaatgccgccgatgcttatcatcagactgcctcttctccggatggaaaaggagcgacgctggccattcaaaatgccattgaagtttcgggattaagtgctttggatatttcttacatcaatgcgcatggcaccggaacgaagaataatgatctttccgagtcggttgctttgcttaatatttttggagataattgtcctgattttagctcgaccaagccgtttaccggacatacacttgcagcggctggggcaattgaagcagttctttcggtattagcaatccaaaacagtatcatttttccaaacctgaattatagtcgggccattactgaaacaggacttatacccattactgaatttcaatccaatcagcccgtgacttcggtgttatccaattcattcggttttggagggaataattcttcattggttttctcagttaataattcataactgacgcgttttttgctatcgattttcactaaaagtcaaatgtatataactgccgcttcaacgatttctcatcagcctacattcaaaaatgcaggtttttcgaaattgatagagccattaaaaattgattctgaattaatcagccctaattttaaggaatatattgacgcaggtttgcttcgccgcatgagcaagattttgcggatgtctgtaacagctgcaaaagattgtttgcaacaggcagaagttgatcagccaggagcaataattgtgggaactggtttgggttgtttgcaggatacagaaaaattcctcaataacttcctgacgattgagggacttttaccgccgacttcatttattcaatctacgcataataccatagccggacagatttctttaagcattggaaatcacggctataacatgacgcacacacaaaacacactttctttcgaacatgctttgatcgatgccggtttgcttttgggtgaaggaaatgacaatattattgtaggtgctgcggatgaatacattgaaatactgagcacaatcggagaacatttgcatgtgaaaccagaagtgaatttaacttccggcgcatcattttttattgtatctaaggaacagtccggcaaatcaatcgctaaaattaaagatattgaaacggttgggctggtgcaggatattcaggaatcgatagaaaattttctgataaacaatactttgaaagaatctgaaattgatctggttctttatagtgattttaacgatttaaaagattctggtcaggtttcggatgtttttaaacgttttgaaaatagctcagaattaataaattatacgaatattataggcatttacccgtcaaattctgcttttgcattacactatgcggtagacagaattcgggataacaataagataaaatctgtattgatcattaacggattaaataaaataaatttgggcttaatattaatcgaatccattgaagcataacatcgttacggcaatttccgctatagccctcgttttgtgcgggtttgccttttgggaaacaggttatgttgagataatcctcggtttgattgtgattttttatctggccagtacgacttacggatcctttcaaatcagggcaaattattttgtaaaatccatccacaaaggcaataaaaaatcggtagcattcacttttgacgacgggcctgatccggaaatcacacctcgaattttggcggttttaaaagaaaaaggagtgaaagcgaccttttttgtgattggggaaaaggctgaaaaatatccggatttactaaggcagattgatgaagagggacatattgtggccaatcattcttacagtcataatcatctcatcggatttttttcaaagaaacgactgaatcaggatttgactcattgtaacgaagcgataatagcagcactagggaaatcgcctgttttttttcgtcctccttttggtgtaactaacccacgttatgcaaacgttttgaagggattaaaaatgcagtcgattggctggtcgcttcgcagttttgatacccgggcgaaaaacaaataccagctgattgaaaaagtaatttcaaatttaaaaagaagagatatcgttttgctgcatgacaaccgtgccgtcactgccgatgcgctggaagatcttattgaacattgtttcaataaaaatatcgaaatccagccgctttcaataatcattaataaagaaccttatgaaaccgtttaaagtatatttcgtactgtttttcagcttatttggcgggacaatacttgcacaggaatttaaaccggcagctaatccggataaaatattggctgatctaagaaaatcatcgctggcaacttcttccatccaggccgatttcagagaagagaaatacttgtcttttttgaaagaacctgaaaaatcatctggtgtattttattacaaaaaagaagatcagatgcgttgggaacaacaaacaccctttaaatacgtaatcctgattaacggcgaaaaactccgtgtgctggatgccggaaaagagaaaaatgtaggttccgcaggaaaaatggccggacaaataaagcaggttatgcttggacttgtcaatggggattttcagaaaagtaagacttttacgcaggtttgtatggaaaatgcagattattatcaggtcacattaacaccgacaaacaagcggatgagaaatgtatatgctaaaattaatttattgtttcccaaaaatggcttacggttgaaagagcttactttttttgagaaaggcggagataaaagtattatgaaattccagaacgaaaagtttaatcagcctattgcggagactgtttttaccaatttataatgtagatttcaaccctggttttctcaaatttacctgacaaatgtttctcgatagtctttataaaataaccggtttagatgttacaccggaaacaattttagctactatttccataaatccggatcatgctatatttgaagggcatttccctgattctcctgtaatgcctggagttgtgcagctgcaaatcgtgaaagaattgttggaaaaacactttgggaaaactttgaaaatgaaaaccatgcgaaccagtaaatttcttaaggtaataaatccaaaagaaacgcaggacgtatatattgacatcaaatttaagaacggtgaatttttagaagttgtggcctccggaagttgggaaaacgcaactttttttaaagcacaagtttcttatatttaacattcctgctcatgcaacatattgctgtcaacataagaatttccgtttcatcgttctgatctaatgattttaaaagatatacactgctgcattctgattcctacttataacaaccaaaaaacgctccgtcgcgttattgacagcgttttggcttatagtggcggcgaagatatcattgttattaacgatggttcaacagacgaaacagtcagtattttatcggaatacggaagcggaattcaggtaattcataacgatagaaacaggggaaaaggatattcgctgagacgtggattcaaagaagcgcttaatctgggttataaaaatgcaatttcaatagattcagacggacaacatttgccatccgatattcctctttttatagagacggcttatcaaaattcgggtgctttattgatgggctcccgtaacatggagcaggaaggcgtacctggaaaaagctcttttgggaataagttttctaacttttggttcaaggttgaaactggactggttttaccggacacgcaaactggttttcggctttatccgcttgaagaagttagcaaaatcagacttctcacaacgaaatttgaaacagagattgaggttattgtaaaactggcctggcgtaacgttaagattatacccattgatattcaggtgatttacgatagcaatgaacgggtaacccactttcgtccgtttcaggattttaccagaataagtattttaaacacttatttcgtcattctcactttgttatattatttacccaaacgccttttcctttttgtaaaaaaaaaaggactttgggagatcataaaggaggaggcggtcaaaccggatgagagtaattacagtaaggcgctttcaattgcttttggcgtttttatgggaatcgttccaatctggggttttcagcttttggttggtattccgttatccgtttatttcaaaatgaacaaagtcctttttcttacagcggccaatatcagtcttccgccgcttattcctcttattatctttttcagttataaattcggtggtttgttttataaaaatggcgtccagcttgattcaattaaagatcttacgctggattctatcaataaaaactttgtccagtattttcttggcggtactttattagcttccttcacaggccttttggcttttggtatttcgtggcttatttttaaagtgctcagaaaagaggcatgatttttcggataaatcaattcaaattacttccttcatccaaatcaattaccaactatgagcactactattacgactgcacaagacctgaaaaattattaccagaatcttttcagatcggcgcgggtaagggctatcggctgggaattgggtgttatgattttatttggtttgctggcttattttagtcataaaacggttttataccttgccggatttttagtcgtaggaataatagccatttttcatcgccgctatcacaacaaatcttacaagagactggctgtttttaaaactccgtttccggctgcatggcgtcagattcttgaaaaacattcggttttctttaaaaatcttgatggtcaaaaacagacgctatttgaaaaaagagtgcaattgtttttgattggaaaaagagtggagggcatcgatactgaaattgacgatgaaatacgggtcttagtggcggccagttctatcattccgacttttgcattccctgcattcgattatcctgatttaaatgaggttttggtttaccctgcatccttcagcgaaaaatttgaaatcggggcacacaagcatgatgaaaatattgaaggcatggttggtaaccgatatatgaaccattcgttgcttttgtcaaaacctgcgttgttaagcggattcaatggaaggaaaggagaaaataatgtaggtattcatgaattcgtccatcttctggatcgggaagatggcgataccgacggagttcctgaacgacttgcagacaacgcttacgctttaccgtggcttcatctgatcaaaaaagaaatgcaaaatatccggagcggcgagtcagatataaatccttatgcgattacaaacaatgcagaatttctcgctgttgttagtgaatatttcttcaataatccggaagaattccagcgcaaacatcctgaattatacgaaattctctccaaattttatcatattgagccagctttctgattaataagttgattaacagtgatataaatatactattggtatagttaactttaaccagttaatttttttattaatttactcacattttatttctgtattttttcacaaaaaaaatatgaattaaacaaaaataagccgtttttgattttgttatgaggtcgcattctctatatttacgagaatttaaaaccttttaactaattcatatcgcgcatgagtaatattacctatttagtgccagttttaggcctgattggcttggtggttatgtttttcaaaagagggtgggtaatcaggcaggatgccggggacggcaacatgaaagaaattgcggatgctatcgcagatggtgctcttgcatttctcaaagccgaatggcgggtgctgatcgtcttcggtattattgttagtattttattaggtttttccggcacactggttgcaaattccagtgtttttattggtgcctcctttctggttggcgccttcatctcggcctttgcaggatatatcgggatgaatattgctaccaaatccaacgtgcggaccacgcaggctgcgcgtacaagtctaaccaaagcgcttgaagtttcatttaccggcggttccgtaatgggaatcggggtagcgagtctggccgtgatcggattgggcggtttgtttataattctttacagtgtttttgtgggaaatagcagtgatgtcaacggacttggcatggagaaggtgcttgaagtactggccggtttttctcttggagcagaatctatcgcactttttgcacgtgtaggtggtgggatttacaccaaagccgctgacgtaggagccgatttggttggaaaagtagaggcaggaattcccgaagacgatccaagaaacccggctacaattgctgataatgtgggtgataacgtgggcgacgttgccgggatgggagctgatttgtttggttcttatgtggccacgattctggcaaccatggttttgggaagagaaatcattgccgaaggaacagataattttggaggaatatcacctatattattgcctatggtaatcgcaggcgtgggtttgatcgcatcaattatcagtatgcttttcgttcggatcagtggtgatcatggtgacgtgcaaggtgctttaaaccggggaaactggggatcaattgttttgacattaattgcctgttatcctttgacgatgtggatgttaccggaagggatactaaccattcgcggcgttgagttcacttccatgcatgttttttacgcgattttactaggttccattgttggcgctattatgtcaacggtaacggaatattatactgcaatgggcaaacgtccggttcaatccattgtaaatcagtcttcaacaggccatgctaccaacattatcggcggactttctgtgggtatggaatcaacggttattcctacgttggttttggctgccgggatttttatcagttatgaatttgctggtttatatggtgtggccattgctgctgctggcatgatggcgactacggctatgcagcttgccatcgatgctttcggccccatcgcagataatgcgggtggaattgcggaaatggcacatttgccggaagaagttcgtggccgtacggatgttctggatgctgttggaaatactaccgccgctgccggaaaaggttttgcaattgcgtcggctgcacttacttcactggctctttttgctgctttttgtggtgtggctgggatcagttccattgatatttacaaagccaatgtactggccgggcttttcgtaggagcgatgattccgtttatattttcttctcttgctattgccgcagtaggtcgtgccgctatgaaaatggtggaagaagtgcgccgccagttccgtgaaattcctggaattatggaaggaactgccaaacccgagtatgataaatgtgtagcgatttctacggaagcttctatcaaagaaatggtggctcccggattgattgctttactggtacccgttattgtcgggtttctttttggccccgaagtattgggcgggactctcgcgggtgtaacagtttccggggttttgatgggtatttttatgaacaatgccggtggtgcctgggataatgcgaaaaaatcttttgaaaaaggtgctgtcattaatggcaaaacgtattacaaaggctccgatccacataaagccgcggtgacgggtgatacggttggtgatccatttaaagatacttccggaccatcgatgaatattttgatcaaattgatgtcaattgtttccttggtaatcgccccgcatatcgctgttattcctgctggtgtagaggtagttgaagaagaaattattgaaatgcctatgacagaagtggaaacgactatacttgatttgaacggaatgaagctaaatatcgccgcctcgggaaatcctgtggaagctgctttgctggattttatcaaatctgataaaaaagtggacaaggaaacctggtttgattttgaccgtttattatttaaaaccggaagtgacaaacttgaacaaaagtctaaggaacagcttgaaaatgttgccgaaatattaaaagcatatcctgatgtggcaatcaagctgggaggttatacggataataccggagacgcggccgccaatgttaaactttcaagcgaaagggcggaatcagtaaaaaaatcactggaagatctgggtattgataaatcacgtctggaagcggaaggttacggcgaagaacatccggttgcatctaatgacactgaaaaaggcagagctgagaatcggcgtatatcaatcagggtaacgaagaagtaacaattatttaatcatgaaaaagccaggtcaagcaaaacttaacctggcttcttttaattccgtttcctcaaactgcgcaatgcgcgaatataacgttactatttctccacatcttgtaacttcctgcctgcgtagttttaggcttcgtttttacaaatgtttcggtaactattgattcaatatctgttttttcaatatattcttcaagtaaggcaatggagcaattcaaagaagaaaagctgatgccggcatcattaagcgtgtggaacagatctcttagtacggcaagatctgtcttggccatcaataagttttcaggattcattccgtaagattcaagattcattttttaattattaagctggttattttagttgtgatgcttaatggtgttaaaaaagtgtaccagggcaattcggggagggaattttggagtggtctaaaaacaaaaatgtctcccgttaaaagtcgagagacgaacttaatgttttcacagcggaaaaatccttattgtgatttgcttcaatgcaaatatatgaataatataaaacaagtgacaaaatattggatatttaaattatttttgataaaataaaactgtccctcccaaatatgagcaaaaaaatactaggtcttgatttaggcacaacctcaattggttgggcatttgtaatagaagctgataaccaagaatattccgaaattaagaaaattggtgtaagagttaatccgcttacaacagacgaacagaccaattttgaaaaaggtaagcctgtatctgttaacgcagacagaacacttaaaagaggagctagaagaaatttacaacgttataaacaacgccgtgaaaatctggtagaggttttaaaaaataataatcttattacaagtgattcagttttggctgaaaacgataaaaataccactcattctacttttgagattagagcacgagcagcttccgagaaagttgaaaaagaggaactcgccagaattttgttaatgataaataaaaaacggggttataaaagcagtagaaaggctaaaaacgaagaagaaggccaggctattgacggaatggctattgccaaaagactttatgatgaaaatttaacgcctgggcaactcagttgtgcattactgaaagaaggtagaaaggttctccctgatttttatcgctctgatctacaaactgagtttaacgggatttgggactttcaccaatcattttatccggacattttaactgatggatttaaaaatgaaattgctggaaagggtcagcgcgcaacagcggcgtcattttggaataggtataagtttaatactgctgaaaataaggggacaaaagctgaaaagagactgagaagttatgaatggagaagtaaggctattaacacaaaactcagtgcggaagaggttgcctacgtcctgacggaagtgaacaacaatatcagtaattccagcggataccttggcgagattagtgacagaagtaaagagctttatttcaataaggaaactattggccaatatttgtacaaacaattattggttagcccccattcgagaatgaaaggtcaggttttttatcgtcaggactattttgatgaatttgaaacaatttgggaaactcagtctagatatcattcggagcttaccaaggatttgaaaattgagattagagatataatcattttttaccagagaaaactaaaatcgcaaaaaggccaggtaggtatttgcgagttagaaaacaaggaaattgatcttgaaatagatggcaaaaaggttacgcggactattggagcaaaggtcataccaaaatcttccccgctttttcaggaattcaaaatctggcaaaatttaaataatctactttttcaaaataagaaatcgaaagaaattattccactggatctggacgcgaaaggaattctttttgaagaactgaattcaaaaggaaatttgaaaactgatgatgcgcttaatatactgggatataatccaaaagaatgggatgccaatttttcgagtctggaaggaaataagaccaatcagatattttatgaaacatttctaaaaatgctggaattggaagggcacgaagagtatgtcttatctgatttttcgggaaaagagattaaagaattaattctttccttttttgaatcaatgggtattgaaatttctatacttaattttagtgctgatctggatggtaaggcatttgaaaaacaacctgcctatctgttctggcatcttctttattcctacacggatgacagtagtacaactggtgataaacaacttctggaaatacttcaatctaaatttggcttcaaaaaggagcatgcaatattgttgtccaacattaattttgaaaatgattacggaaatcttagtgccaaagcgattcgtaaaatacttccctttttaaaggcgggacacccgctatcaggtgaatctaaatttgacggctctttaagtgccaggttactagccggctataaggattcttcttcaatcacaaaagaagaaaacgacaatcgtgatttaaaggaaagattgaaaatattaccaaaaaacagtttgcgaaaccctgtggttgaaaagattctcaatcaaatggtaaatgtcgtaaatgcaattattgatgatccgtctttgggtaggccggatgagataagaattgaactggcaagggagctaaaaaagaatgcaaaagagcgtgaggagatgacttctcagattaactcggcaaagactaatcatgaggctattagaaagaaactgataaatgagtttggtgttaaaaatcctacaagaaatgatatcattaggttcaaattatatgatgaattaaaactgaacagttataaagatttatacacgaatcattatatttcgccgcaggaattgtttacaaataaatatgatatagaacatatcattcccaagtccaggctctttgacgatagtttttcaaataaaaccattgttccaaggtctgtaaatgcaaataaggataaggcaactgcatacgactttatttccaacacctattctaatgatctcaaagattatttggccagagtggaaatgatgtttaaaacaaaagatgggtctatcagtaaagcaaaatataaaaaattgctgatgaaaggtagcgatattggagagggctttattgaacgagatcttcgggacagccaatacattgcaaaaaaggcgaaacaaatgttactccggatttgcagaacggtggtatcgacaactggaagcgttacagatcgtctccgggaagattggaaccttgtcaacgtaatgcaggaattgaatatggataaattccggaaacttggtctgactgaaatggtcgaaaaaaaggatggaagttttaaggaacgaatcactgaatggacaaagagaaatgatcatcgtcaccatggtatggatgcattaacgattgcatttacacgacacgaacatattcaatatctcaataatcttaatgctaagaataaagaggataaaaaaggaaaagaaatttacggtattgaacaaaagataacttttctagaaggagaaaacggaagtaagaaaagaaagtttaaagcaccacttcctaatttcagaaatgaagctaaaagtcatcttgaaaatcttctgatctcttgtaaatcaaaaaataaagttactacgaaaaataaaaataaggtaaaagttaaaaatggcactaaaacgcgaattgaattaacgccacgtggcgcattgcacaaagagactgtttatggaagaatccggcagtacaaaacgaaagaagaaaaaataggtgctaagtttgaccttgaaactattaaaactgtcgctaacagtacttaccgggatttgctaacagacagacttcttaacaatgaaaatgatcctaaaaaagcctttaccggagccaattcattaattaaaaaaccaatttatattaattctggaaaagtggatgttgtccctgaaaaagtaaaacttgtgtggcttgaagatgattttacaattcggaaagaaattacgcctgatttgaaaattgacaaagttattgattccggtattcgcaaaattttggaaaacagactaatggattttgatggtaatgccaaagaagcgttctcgaatcttgataaaaatccaatttggctaaatgaaaaagcgggaattgctataaaaagagtgaagataagcggtgtgaaaaatgctgagtctcttcattataagaaggataatcttggtaattacgttgaagataatcttggcaaacgtattcctactgattttgtgagtacgggaagtaatcatcatgtagcgatataccgtgatgaggaaggaaacttgcaggatcaggtaatatcattttatgaaactgttgagcgcgttaatcagggactttctatcattgaccgatcatataatcaagataaaggatggaaatttctcttttccatgaaacaaaatgagtattttgtttttcctgcatccgattttgatccttctgaggttgatttgttgaattcggctaacaataaactaattagcccaaatttattcagagttcaaaaattttcaaaagtcacgtatggaaattcttctgttcgtgactatgtttttagacatcatcttgaaacttctgttgaagaaaaaaaggctttaaaggatgtagcctataaaagcataaagagtgtgtcaaattttgagaacataatcaaagttcgtgtcaaccacattgggaaaattgtgaaagtcggtgaatattagtattttaactgccgttaaataacaattccgacggaattttcgatatgtaactactaatttataatttgggaggactcaatgtcataatcctcccaaattatatgattaaacgaacgcttcacttcggtaatcccgcatatctgagccttaataatgcccaattaagtattgatcttccacatttgcgtgaatttggagaagaacattccaagaaatcaatagcgattgaagatattggtgtacttattctggaacataaacaaattaccatcacacatggctgtattgcggcattgcttgaaaataatgtcgcgattatcacctgcaatcattctcatcatcctaccggcttattgctgccgcttgaaggtaatggattacaaagtaaaacctaccggtaccagatagaagcttcacagccgcttaaaaaacaattgtggcaacaaactattcaggctaagatctataatcaggcggcagtacttcgtgagcgtggaattccaatggaaaatatgcttcattgggtaaaaagtgttcgttccggtgatcctgataattttgaaggaagggctgccgcatattactggaaaaatgtatttccaaagaaagtcgaattttttcgaggacgtgaaggtaatccacctaacaatttactcaattatggctacgcgattttacgtgccattgtagcaagaggattggtctcttccgggcttctgcccacgttgggtattcatcatcacaatcaatataatgcctattgtctggcggatgatattatggaaccataccggccatttgtagatcaaattgtcttgaaaattaaagataatggcgaaaactttctggaattgtcaacttccctgaaatcaaagttgatggatatagccagttgtgatattatgattgataacgaaaccagcccattaatggttggacttcaaaaaacgacctcatcactggtgaaatgttatgagggaaagcaacgtaaaatcaattatccaattattctgtaattcatctcccggattaaattggtcataactctgtctatcatgcgtttaaacgaatatagaattttgtggatacttgtactttttgacctgccaactgaaacgaaaaaggagaagaaagatcatgccggatttcgcaaggatttgatgaaagacggtttcgctatgtttcagttttctatttatctgcgacattgttccagccgcgaaaatgcagatgtacatatcaaaagggttaaagggtttttacctgaaaaagggtacgtaggaattttaacaattactgacaaacagtttggaatgatggagctatttcaggccagaaaagtgaaagacaggccaaatgtccctcaacagcttgaaatgttttagaataggataattaaaatgacaaaaaaaatcggaaatctgttaagatattccgattttttttctttgatatgtcgactgtaactaattgattactagataaataatccatagtatgttgttgtcgatatatcaaagatcgaattttgaaagcaaatcacaaccgttgctaaattcaattatagacgttgcgcgttgttgtcgatatatcaaagatcgaattttgaaagcaaatcacaactacttccaagttttttaaatgctcttgcagttgttgtcgatatatcaaagatcgaattttgaaagcaaatcacaacacccttttctgttccctgaaaagattcagggttgttgtcgatatatcaaagatcgaattttgaaagcaaatcacaacccagccaatagaccaatcaattggaagatcgttgttgtcgatatatcaaagatcgaattttgaaagcaaatcacaacatgatcgatgtcataaaggatttcggacaagttgttgtcgatatatcaaagatcgaattttgaaagcaaatcacaactatctctgagcgatgccagaagggactgaagttgttgtcgatatatcaaagatcgaattttgaaagcaaatcacaacgtgaagtagaaaaggataaaacagccagtggttgttgtcgatatatcaaagatcgaattttgaaagcaaatcacaactcagtagaaaaagtcccaacatatacatagttgttgtcgatatatcaaagatcgaattttgaaagcaaatcacaacatgcaggatcattgaatcagacattggtaagttgttgtcgatatattgcatattccactctatagtttaccacgattccgatttcatattttaccagaaattccgaacatgctttaccagtgttccggaatagtttaccagttattccgcggtaggttttaccagttattccgctgcaaactttaccaattggaagtaaaatcagggcattaaaaatctgtcatttcgacagatactttaccggattttccgctacatactttaccactgaggatttcataccgttctgggatacatttgattacgatcaaaaactatccggagaatggctaataaatcacttagtatgcaaaaattacgtcagatacttttattcctgaaacgaggctattccgagcgctctattgtgaagcaaaccggcatttcaaggcagactgtgcatcagtacgccagattgtttttggaaaccggaagtgattataatacccttttaacccttagtgatcatcagctgcactccattattgaagggaataaaccagaaaaggagcaggtccgggatacgcgtaaaagccagtttttagaccagattgattactttatactggaattaaaaagggttggtgtcacccgtcagcttctttggcaggaatacctcgaagcgcacccttctggttttcagtactccaggttctgtgaacttcttgatatagaaacgggccgcaggaagcccagtatgcattttagccataatccagccgagctgatggagatcgactttgcgggctcaaaactgcattatgtcgataagaaaagtggtgagataatcgaatgtcccgtactaatcggtgtgctgccgttcagcggttacgcttatgtggaagcccttgacaatgcgagcctgccgcaggtaatcaaaggcttgaacaacatgctcaattacctgggtggagtgcccttaaatgcaatctcagacaacatgagacagtgggtaagcaaatcctgtcgttatgagccgacctttccacagatgcttgagcagtggtctatccataaccacataggcctgttggccaccagaccaggtttccccaaagacaagccttctgtagagaatcaggtattgatcacctaccgtcgtgtttacgccctgatccgcaatacaactttccatagccgtaccgagctgaataacgccattcttcaaaagcttgaagaacatcaccggcaaaactttcaaaagaaaacatacagcagataccagctatttaactctgaggaaaagcccttattacaacccttgcctcagacaccttatgaactccgtcattacacacggggcaaagtacataaaaactactacgtcgtggtaggcgaagactggcacttttacagcgttcccagcacctatgtaggtaaagaagtacagattgtgtacgatagcgattgtgtagagatctaccaccgtcaggagcggattgctcttcataagagaagttttaaaaaacatgcctacactaccgaatgggagcacatgcccgagaatcataaaaggattgctgaacaaaaaggatggaatccggaatactacctcagaaaggcctctgaaaatggtgtctttacccgggagttttttgataagctaatgcaaagtaaaataacgattcaccaggcctacggcccttgccttggtatactgaggctcattacagaatatggtcctgccagagtggaatcagcttgtaaaagagccctgatgggaagtaaatacaattatggtgtagttaaaacgatccttaaaaacaatatggatctgatcgtagaacttaccgaattaccttcccagattccggcccataccaacatcagaggtgcagatttttataaaacaatttaataaacagtactgatcatgaacactcaaatcactgtggagcagctaaatgctcttaaacttacgggcatggctaaacgctatcaagccgctttggcactgccctcacatcaacaagaagacgcacattcactcattgctttactgtgccagtccgagctcgaatacagaaatcattaccgaacagaaaggttgctaaagaacagcaaactacgttacaacgccctgcttgaagaagttatctgcacccccgaaagggggctgtcccgagagatgctgctacggttatctgacggaatgtttattgagaaagctgaaaatatacttatctgtggtcaaaccggaacaggtaaaagctttttagcgtgcgcaataggtcgcagctgctgcttgctgggctataagaccttatacttttcgatgaataaattcctggaaaacctgtctcaggcaaagctcgatggttcttacctgaaatggatccgtaatatagcgggccatcaggtactgattcttgatgactttggtctgaaaccactatcgccggacgcaaggctggctatgctggatattctggaagacaggtatggaaaatccgctactatcgttacctcgcagctgcccgtagacaaatggcatgagttcataaacgaaccttcagttgccgacgcagtgctcgatcgactgacagcatcggcaaataaaattgatcttgtggggagctccttgagaagacgaaaataaaaaactaatattgaatgttcaacttgacatcctcagtgatgtaagtacttagctgctggtaaagtttccttcggaattactggtaaatatacagctcggaacggtggtaaagttttcccggaatatgcaatatatcaaagatcgaattttgaaagcaaatcacaactgttaggataaacactttctttcgaaattgttgttgtcgatatatcaaagatcgaattttgaaagcaaatcacaactaggcagcagaaacggaattgccaaacttgttgttgtcgatatatcaaagatcgaattttgaaagcaaatcacaacactgtagtattctcattatcaggtatatagttgttgtcgatatatcaaagatcgaattttgaaagcaaatcacaactaagttagtgaaggaagtaaatttacacctgttgttgtcgatatatcaaagatcgaattttgaaagcaaatcacaacaatacaacgagcttctaaattcttgataaagttgttgtcgatatatcaaagatcgaattttgaaagcaaatcacaaccgctctttcgttatcaacgaactaaccgggttgttgtcgatatatcaaagatcgaattttgaaagcaaatcacaaccagtggcacgaggtatagggcatattttagttgttgtcgatatatcaaagatcgaattttgaaagcaaatcacaactatttctaattgtgtcgtatctgaccgttggttgttgtcgatatatcaaagatcgaattttgaaagcaaatcacaacagcatatcgtagtcaattgctagtatatctgttgttgtcgatatatcaaagatcgaattttgaaagcaaatcacaaccaaaattgttatccaaagcgacgggacggtgttgttgtcgatatatcaaagatcgaattttgaaagcaaatcacaactaggagctgcatcgtctgtgcagacgatgcgttgttgtcgatatatcaaagatcgaattttgaaagcaaatcacaacttagctttgcaaatctcccagatacgagaagttgttgtcgatatatcaaagatcgaattttgaaagcaaatcacaacatggagcttggtacggccaaaggttttgatgttgttgtcgatatatcaaagatcgaattttgaaagcaaatcacaactgacaaaatataatgaaatacttcaggttcgttgttgtcgatatatcaaagatcgaattttgaaagcaaatcacaacgacaatgcaggacattatgtgggaattcttgttgttgtcgatatatcaaagatcgaattttgaaagcaaatcacaacagctcattaattcttgcttggaattctctagttgttgtcgatatatcaaagatcgaattttgaaagcaaatcacaacaacaggtcatgggctggctgcaagaagcggttgttgtcgatatatcaaagatcgaattttgaaagcaaatcacaacgcggtgctgcaggtacaaaaatcagctgttgttgttgtcgatatatcaaagatcgaattttgaaagcaaatcacaactgacatggagcatggttaaattgtttatagttgttgtcgatatatcaaagatcgaattttgaaagcaaatcacaacctatagagagaggtaaaggaaaaactgtaagttgttgtcgatatatcaaagatcgaattttgaaagcaaatcacaacgtaagcctattatttaactctacatcttagttgttgtcgatatatcaaagatcgaattttgaaagcaaatcacaactatggatactgagcgaacatctaccagagggttgttgtcgatatatcaaagatcgaattttgaaagcaaatcacaacaccctgagctgtttcaagaattaattgccagttgttgtcgatatatcaaagatcgaattttgaaagcaaatcacaaccgtggactgtcccggatgtgcagaaagattgttgttgtcgatatatcaaagatcgaattttgaaagcaaatcacaacggaaggtgttaaagctgctgagtttgctgggttgttgtcgatatatcaaagatcgaattttgaaagcaaatcacaacattgtctaacatttcatcagttcctgtaaagttgttgtcgatatatcaaagatcgaattttgaaagcaaatcacaacgccctgcgcgatctttgctatattcaagatgttgttgtcgatatatcaaagatcgaattttgaaagcaaatcacaactaatgcagaaagttcaacgcggcattttaagttgttgtcgatatatcaaagatcgaattttgaaagcaaatcacaacagtatctaattattacagggacattgccgtgttgttgtcgatatatcaaagatcgaattttgaaagcaaatcacaacggcacgcaagacctttgctgatcataagggttgttgtcgatatatcaaagatcgaattttgaaagcaaatcacaacaaggtactgcacataaaaaaaggccatccggttgttgtcgatatatcaaagatcgaattttgaaagcaaatcacaactcgacgttcagcgttccccgcatatcccagttgttgtcgatatatcaaagatcgaattttgaaagcaaatcacaacggaaccgccgcggctatatcgatcaaacttgttgttgtcgatatatcaaagatcgaattttgaaagcaaatcacaacaagcactataaatgaaaaaactattttggagttgttgtcgatatatcaaagatcgaattttgaaagcaaatcacaactacgacaacggatgtagctaccattaatggttgttgtcgatatatcaaagatcgaattttgaaagcaaatcacaactataaattctaaacttatgaaaactactaagttgttgtcgatatatcaaagatcgaattttgaaagcaaatcacaacacgtccttaaatgatcctgctgcgtgtatagttgttgtcgatatatcaaagatcgaattttgaaagcaaatcacaactttaacaatgaactccctccgatgaaaagagttgttgtcgatatatcaaagatcgaattttgaaagcaaatcacaacttatgcgacgtgctaaatgttaattggaatgttgttgtcgatatatcaaagatcgaattttgaaagcaaatcacaacgctccgttgtcggtaggcacgactcctgcgttgttgtcgatatatcaaagatcgaattttgaaagcaaatcacaactattatgaaaactaaagaatctataacatcgttgttgtcgatatatcaaagatcgaattttgaaagcaaatcacaacggtaacactaaacaagaagatttaaataagttgttgtcgatatatcaaagatcgaattttgaaagcaaatcacaaccctgctttgtcagttaaatatagttggttggttgttgtcgatatatcaaagatcgaattttgaaagcaaatcacaaccggcatgataaattgttaaaagtgaaaaatgttgttgtcgatatatcaaagatcgaattttgaaagcaaatcacaaccggaaacccaaagttaggtggagatcttagttgttgtcgatatatcaaagatcgaattttgaaagcaaatcacaactatcagcaggtagatccggaacatctgcgagttgttgtcgatatatcaaagatcgaattttgaaagcaaatcacaactggaagcaaaccaatagctactccttccggttgttgtcgatatatcaaagatcgaattttgaaagcaaatcacaacagatccgacggcattttgatcattaacgacgttgttgtcgatatatcaaagatcgaattttgaaagcaaatcacaacactactgctgttacagatggagttaatgcgttgttgtcgatatatcaaagatcgaattttgaaagcaaatcacaacacaaatggaaaacacatctacaatatacaggttgttgtcgatatatcaaagatcgaattttgaaagcaaatcacaacattccaacgtctggttacagctaattgatgttgttgtcgatatatcaaagatcgaattttgaaagcaaatcacaacggagctgcgtttgtcaaatcaagcattgcgttgttgtcgatatatcaaagatcgaattttgaaagcaaatcacaactgaaaaagttcagtgctctatttttcgcggttgttgtcgatatatcaaagatcgaattttgaaagcaaatcacaacaacagcaaggccaataaggatattaaggcgttgttgtcgatatatcaaagatcgaattttgaaagcaaatcacaacaatgccattacgatgatcctgaaagaaatggttgttgtcgatatatcaaagatcgaattttgaaagcaaatcacaactcctcaatctgttgtagaacaacaaaagtgttgttgtcgatatatcaaagatcgaattttgaaagcaaatcacaactatggatactgagcgaacatctaccagagggttgttgtcgatatatcaaagatcgaattttgaaagcaaatcacaactgcaggggggaccgggacggcagggcttttgttgttgtcgatatatcaaagatcgaattttgaaagtaagtgatacgtcataagttttaccactacttcaaaaaccaaccttccccaacagccttcgccgtcagttcagccatgttcttcacattacattttgcaaacatatttgtccgatgatgtttaaccgtattttcgctgattttgagctgatcggcaatcattttaatactttttcccagggcgattaattccaaaactcttttttccgcagctgtaatgggtaggatagcaggatttttattgattcctggctgaataggaatattcttcatatgattagaatcggctgtgtccagtatgaaaaaccttagctgcggtattggatcgagatgggtgatatctgtgatcaggtcaaactggtaaacgccgttgccttgtttgtcgataaaaatggtggagctctgctgtaatgcgtgaaaagtgctgccgtctttccggataaatttatacgtgtatgaagattttacatgcagccggttttccagcggttgcatgtaaaaatagccccagaaatattccgctgcctgaacaatcgtatataaaaattcgggactggtaaagcgggcagcattgataaaagatttacctaacatttcatcttc

SEQ ID NO: 2201 - DNA, 24188 bp, synthetic construct
  source 1..24188: mol_type = other DNA
  misc_feature 1..24188: note = Synthetic
ggcgcgtactcgttgaggctgaagcgcggaatgcttatcagctcagcggctggtttgggtacggagggcagacgcttgtcggagtatttctccattgtgcggcgcagctcgtagtattttggtgtggcctgtccgtattcgttgatgggtgcgtcgtagtcgtaggatgtcacgtcaggagcgaatcccggtgagtttgcgcctgcccaatggccgaacgatgtgccgccgtgggtcatgtagagcgagaacgaaatgcctttggacaacatctcgtctatgcctgccaccattgccgaggcggggcgtgtctcgtggcgggcgccccatttgtcgaaccatccgctccagaactccgagcacataagcggcgactcaggccgcagttcgcgcagacggctgaactgactgtcgatgtcggagcccgtgccgaagttcattgtccacaccagatcgtccagtccgttgcgtgtgaagttgctcgcccagtcgcactggaagagcgtgaccttgtcgaatcccgactggcgcacgatatcgcgtatggcactcacgtaagccttatcctcaccgtaggaaccgtattcgttctccacctgcaccatgattatcggtcctccgttctgaatggtgagcggagcgagctgttcgcccaccttcgccatgaacttggatacgcggtccatgaagtaaggatcctgctcgcgcagacgtatatccttcttcttgagcagccaccagggcagtccacccatctcccactcggcgcacacgtaaggtccggggcgcactatgacgtacatgccgttctcttgtgccaggcggcagaaggctgcgatgtcgttctgtccggtgaagttgaattcgccttcacgctgttcgtgtatgttccagaacacgtagaggcagatggtgttcatgccgagtgcgcgacacatcctgatgcggtgctcccagtaagggcgcggaatgcgcggatagtgcagctcggcagccttcaccacgaagggtttgacgttgagcagaaacgtcttgttgccggcggtgaacgtaccgccaccgttgtcggcggcacatgtagtgcggcccgcgaatgccattatggccacgagcagcagggtgcgtaataaggatgatttcatcattttggtttttaggtttttgtttcttcagccacggtgttgtagggtcgtgactgccggaggtgtcccggtgtcagtagagaagggctttgacgtaaatagtggaagtccataccgttatggacgcttgcggcaatgccctcatgcgaaattaatattttatttgcaaatatcaaaaattacatacacatatacaagtgtgtgtgaaggcattgcgtggtttccctatgtgtaataacgtcttttttatggtgcagaacgggctttatgatcatgcgatatgtgctatatcatgccatgatatgtactttttcacactgcggaacggcccattccgtagtgcgtgacatgtcatacggatgatgtgaatggtttaaaccgataattgccggtagtttgcgtgatgtgtctgagagtcgggtatttgcgcccgaaagttcatccgtacgtaaaaacggcggtataggagagttgcgataaagacttctgcatatttatacacagcgtgaaagacgtgtgcataaatatgcagaagattctggtgtcggtatgtgttaatcggggatgtcaccagtcatgtacgagatatggccgtacggttatgccgctgtcagtcggattcttcgcctgtcgatatggtaacagggccgagaagtcccgagggttctaacggaatgtcctttagaggagcgcctctgaagtcgtggcccagcacaatgttggtctttgtgtatttctgaggagtggctgacatctcgtcgccggcaacgcggttataccatgaattgacaacctccacttccagtatgttgtcgccgtcggtcagatcatcggtcacctcgacgcggaaaggtttggtccagactatgcctttgtccttgccgttgagtcgtatggaggcgatacccacatcctttacgtcgccgagttgcaggaagtagcgcttgtccgttttcttgtcgaaggttgtcttgaagctctttttgtagacagcggtgcctgaataatactttattcccttgtccggatgtgaggtccagtcggtgagttcgctgaatgtcacctctccaggaccgccccattctgtatcaaaaccgaccgtccatgctccttccagtgtctgaatggtgttatattccaggctgttatgctgtctgtctccctgtcttttcttacttatcttcttgtggaatacgattatgacggagccgtaagggtcaagcgtcagcggtatggttgtgatgccgtctgcctgacggaaagccctggcctcgcttatgctgccgtccagagcgttccatatctcgggctgcatgccgcatacacggaagtcggccatgacgttacggctgagctctgtctggttgcttacaaaatagatgtgagtgtctccgattgtgtaatgtatgtaatcataatcgtctttgttgctgcttccctggatagaaaagtctctccggacatcttgcgacagcagatattccttggcggtcatgccccatactacttttcctttgccatacacgtgttgtccgatggagtctttggccgttccccatatctgtccggaaagtctggcaaactcttttgctccgtcttttcctccaaccagcgacacagcttttacaggcttgtatccaagaactgtcgcacctttacttatcagattctccagttttcgcagtacagccaacgacaagatcttgtggtcgggcagcacaagtattttgtatcttctcttgtttggcgtgactatctcgccgtttctgacgtccagtctcagcaaaatagtctcgtccgtaacgtcatagtcgaagccgaacatcgcccccgccggatcagagtgcttgtaaggaaacacgttaggaacatggtctccataataatacagtacgtccgccacgaagtcgccttcctgtacaagcgattgaacgcggcttatgtagttgaagaaaggagaagacttgctccaccatgttacttgaggattgatgtgggttccggcgaaatattcctgtccgggcaggccctgttcttttggagagcaggtgaatgtgtggagatagaccctgttgaggcccgcgcatatttcgtgatcgaacgacggtttctggtcatgccacagttcgtcattccagtgcgggccgattgttgtgaaggattcggcacccacaatcctttttccatagatgtgtgcggcagacgaagcctgctttatgaagaaacggttttcaggtttgggacgatgtggagacggtgcccagaactcactcatcatgatgtcactgaagccgtagttctttataccgtccaacggtcctgcatgcggtcctgccgattcgggctgtatgcccatgttgtatttgtgggcatactcggcaaaacgtgcataatggtttatggcaaccagatggcccatggtctttctgaaatctgcaaggaatgcatttgacacatccatgttttcgatgatgtgtccagcgaatatgggtagaaatgctgtcagatcatatccgcagtaatcacggaattcctctgcgaaggagtcggtccagttcattcctccacattcccagctgtctgtttccatgaacttgagtgttgttcccagatgttcttcacctattgcgctgaagatggattctacgacggtgttccagtaaaagtcgaaagcgtccttgctcatgtaatccagtacgctgccctgccatttgccgctggatgtggaaacaaccgaacgtgtacaagtgtagccgatgcgcagtatgttccactttccttcgggagcatcccatcgcagaacacctttttcgtccattctgtcgcttatgttcagaacattcttcagactaaccatgaagatgtccttagcgtttccggcaggcttgtcttgaggttcgtcttcaagcaggaaacggcaatcgggagctgagccacccaattcatgatatcccatcttcaaatccagcttggagatgcgcttcagcgttttgttctcttcttttgcgggaaaggcaagaacggcaatgtccttgtagaaatcattgtgctttcgcgggttgtccagttgtatgctgattgtctttccgccagtaaccagccgttcggtgtatgtcagttgttttgcggcatattgtggagtgacacatggtcctcccaggttccatccactctgaatgttaaatcccataaccagtccaagccgtttcgcttcgtccaaggcataagagaaaagttctatccattcctttgaagcgaaggtcggtccggatggtatgtctttgtttccgcgctggttatgaccgcctgcatcgaatatcatggcgccttggaagtttttaagcctcatggcttccagatcctttctgatggcttctttagtgacgtttccgttcagccaccaccaccagcagttcactccatatttctgagcaggctgctggaagtttgccttgaggtcatcgtaggtatcatgagaattcatattgtgcgacatgccgcttaggttatgacacacgcacagcagcacagacaataatattctaaaacagtttcttttgtaattcatatgttaatagtaagtaagaagatacaggcggttaaccgcagttattgagattataatctgtataagcagtgcatcactcattcatgtatgcactgtaacgaccaacctgtggccgtggaaggcacagcctggcggtatgcaccgggaaagagtaggcagtagccggctgtgcttgtatgttattgcaatattaaccaatttttttgttaatatggtttttgaaatgaaaaagttgactttacagtttatgccagacatgaatattatattgcagaactcttgtttggcgatatcattattggttatgtcgacgtctatgtgcggcagtcaggtatactgcagtacggatggcgtgaaacagtgattctttcggtgccattgcatgagttgtccgatcatgaagttgtgatggatgaatacaaaacaaaagcaggaggaaagcagtctgtctttcctcctgcaatgatgttgtatgatctcacatcatgccggatgcagtcatttctttattatctttgatgtcttctgactgttctgtgtattcactgtgagcagatacatgcccgtattcacagaagacaggtcgagggtttcgcatttgccttcggctttgctgacgagatggccggccatgtcgttgagtgtgagactggtcacaggctcgtcgctctctatgtggagcactccgtcggtggggttcggatatactcttatgccgttttctgtctctactgcgctgatgtcggtggagatgttggtggtgaaggagtagctgccagaaccgagagtgaatacagcacggtcgtcggtagtgccttcatacttcacaccttcagactcttctgccggtctgccgccttcatacaccttgctgccttctgccacaggcatgagcagacgggcggtggtgttggccggaacagtgactttgtagctgaggctaccgtctgctccgagctgccatgcgctctttatgctgccgtagttggaggctactgtggcatcgacgctggtgatgcgctcctgtccctgtggcagtgtggtgcgtgtgtcggggtagggctgcagtatgatgttcttgaatccggcgttctgttcgtcggcctcgatgcctgccatgtatctgtacatccactcggccacggctccgtaggagtagtggttgaaggagttcatggatatgtctttatggaatccggtctctttggtgtaggagttccagcgctcccatattgttgtggcaccctgatccacgctgtagagccatgacggacagttgcgctggagcagcaggttgtatgccttgtctatgagtcccacctgtgagagtgtggtgttgatgatgcccgtacctacgaatccggtgttgagcgtctcgttgtttgagcttatggcacgtgcgagcgccttgatggtggcctgttcagatgcctcgtcgggtagcagtccgaagcgcagtgcgagcagataacccgtctgagtgcgctgtgttggcatgttgccgctgatgtagcgtgtggcgaactctttctttatgttgttgtagagctcttcatattcggcggccttgatggcatattcgtcgcctggtgccgtgctgagagcctgcgacatcttgctcatgagcattgcgtcgtaagcatagtagcatacgctgacatagcgtgagtcggtcggaacgaacgatacccagtcgccgtatgatgtgccggcaccctgatacttgtagccgtcgccggcctgtgctgccagccagtccatgtatttctccatcgattcatagttctcctcgatgatgctcttgtcgccgtgcatgagataagtggtccatggcacgatgatgcctgcgtcgccccatgcgccgttgccgtagcccacccaggctataggagccacgtcgggataggcaccgtccgaacgctggctgtcgcgcatgtcgcccatgaacttgtggtagaaggcggcggtgttggcgttgtaggcagccgtgcggcagaatatctgcgtgtcgcctgtccatccgagtcgttcgtcgcgctgcgggcagtcggtcggcacgctcatgaagttgccgcgctgtccccagatgacgttgctgtagagctggttcacggcgtcgtggcttgttgtgagcgacgagccttcctcgttgtcggcacctacaacaagtccctcgatgccggttatctcgatgtcgtcgcctgcggtgagctcgcagtagcggaatccgtagtaggtgtttgtcgggctgtaggtctcgccttcctcgtcgccgcggagcgtgtagtacatcgaggcctttgccgtgcgcaggttgatgagatacagactgccgccggggccgtcgtcgccacggttggtgtcgcccttgtcgttgagcatctcgctgaagcgtccgcgcagagtgcagccggccttacccttgacgttcactctcacccaacctaccatgttctgtccgaagtcgtagattacggtctggcctttcttcagtttcacgggcgagttgccgcttatctcggacactacgttcaccatgccataggcagtgcctgtctgctttatgccttcgtagatggtgatgtgttccggcagacgtgtcagcgaggtgcgtatgcgtgccgccggaccttcgaaggcgcatatctcgccggtgaagtcgcggcttgacacgatggcgtgccatgcagactggtcgtagccggcctttgtccagccgtcctcgagagttgcgttgtaggtctcgccgttgtatatgtcgcccttgcgcagtgcaccgttgtcgtatgttgcccatgaggcatcggtcacaacagtctctttcgagccgtcggtgtactcgatgacgagcttggccatgaatgccacgggcttgtcgccatactgtccgtggcatatgccgccggcccagtagcccgatgtgacggtggctccgatggcgttgccgccttccttaacgagtgtcgtcacgtcgtgtgtgttgtagaataccttctttgcatagtcggtccatcccggtttcagttcgtcgtagatggttgttccgtcatcctgaacgtggcctacgcgggtgccgttgatgaatacgtcgtatatgccgagggcagaactgtagagcttggccgacttgacgggtgccttggccgtgaactcttttctgaacatagaggctgcacccatggagctttccatgaatctctgctcgccgttggcggtgtatacataaagctggttagaaccgtcgtgttcagttattgtgccgtcgaacataggagcattgccctcgaagtcctctgacagacgcacggtctcatttccgtcagcgccaatggtggtcacctttacgttgtcggcataagccggaccttcgtcgtcggcatgtgtacggaagccagtgtagccgtcgacaatctttccggaagcggtgtatgtgtcgacgagctggccgtcgatgtaagtcttcacggtgttgtctatgacttcgatacgcagacggtggggcttgccgaggatttcatcctttgtgaacgcgtcgatgcgcgtgtcgctgtaggatggcgttgtgctgttgctgtagacatggcgtcgtatggccggatagtcgtagtccttgcagttgagcgcccacatataataattgttcgatgcggtataggcgaacactacacccacattgcctttcatcagagtgatgtccgactcgatggcatatcctttggcattgtcggctgctctggtgaggcgtgcgcgggccgaacctttggcgccttccttctgccagcagtattgtgccgactccgtgccttcgaagtagaggcgtccacctttcacgcttcctgccgtgaaggtggagttgccttcagagaagtcttcggtgaatacggacacaccgtccacgcttatgtcgaagtcgtcgtagtaggcagcctcatacaggttttcggtgtattcggagcgtgctgcacggaatccgatacgtccgaaggggaagtcgccgcggcgctcgtctatcagaatgtcgttgatatatgtctttgcaagcatgccgttgtcggttatgtcgatgcgcagggtgtattcctcattgttcttcaggtcgatgattccggtgaggtctacgtcctcgaggcatgacggactgttgttcagccagcggtgaggacggaagcgcggatagtcaccctcggtgttgaactgccacatgtagtagttgttctcgtcggtcataccgaagcacaggccggctgccaccttggcgatctcgaacttgcagcttattgagtagtcggatatttcgttctcgtcgatatatcctagcggattcttggaatatcttatccatttggctccgtcccatcctgtgcccatgagtccggtttcgaagtaagccttctctgtggaagtggcctcgttgcccttgttatcggtcactgtgaccttccaatagtagcgtgtcgaaggagcgaaggtgtggttgggacttaccatcaccgactggtcggactccacaacgccggagtcccacacgatgttggagcagtcgctgtctgaacacaccatgatgcggtagctcttctgcatcactccgcgttcgtccgactgcaatatccagctgaacgtcggcgccttgtctatacccacgggattggtgagcgacagggtgcgcagcttttctacagtcagagcatgagctactcctgcaaacaatacgcctaacatcagcaaccataatcgtggattgcgtgtaagaatgtagttttgtttcatgattaatagttattatattgatattaatgataaatattctctgtgtcatcgtccgccactttacgcatacaggctgccatgtttattttgtcgcctgtggtatgggaggattcatgacctgaccaaagtcataacaaacaaatagatactatcggttggtgtggttagtgtcagttttataataatgtatttatgcaaatttaagaattaatgataatccgttcaaactaaacactgctattttgatattacattgtttgcttctctcaaaaagcatattaatagtatcattctgtatagtacggcattgtgaagtatattgtatgacgcagcactgttgtgcgccattacggaacgatgaagacatactgttgggacaaatggttcggccttcatataaaacattcggaatccatagaaaaacagatacaaaaagcaacttattagtttgccattgtatccatctttcactatatttgtaacatgtattgaatctattatttgataagaagaatcataaactatgaaaaagatattaggactggatctgggtaccaacagcataggctgggctttggtaaaggaaagagaaaacgagaatgaacaatcttcgataattagacttggggtaagagaaatttatcttactacggacgagcagagtaattttgaaaaaggtaaatctattacaacaaatgctgatcgtactcagaaacgtagtatgcgtcggaacttgcaacggtataagattcgtcgtgatagtctaataaatgtgctgaaagaccatggctttataacggcggataccttactgaatgaaaacggcaacaggacaacttttgaaacttatcgtcttcgagccagagctgttacagaagaaatttcactggaagagtttgcacgtgtattgcttatgataaacaagaaacgtggctataagagtagtcgtaaggtaaaatctaatgatgaaagtggacaactgatagacggaatggaggttgcgaagaaactttatgatgataatcttactccaggacaatatgttgcattacttttacataatggaaagaatagtataccagacttttatcgttctgacctagttgatgagtttaacaagatatggaactttcaacgacttttttatcctaatgtgcttaccgataaccttaaagaagaactgaaaggtaaaggtgataaggaaacatgggccatatgttcaaaaccctttgatatagtaggtttgaagcgcaagacgaaaggatgggaacagaaaaaagaagattacgtatggcgcgctgagagcctgcatcataaaatagatcttgagaggcttgcaatagtcttgcagaaagtcaacggacagataaagaattcgagtggatacctcggagctataagtgaccgcagcaaggaactgtttttttataagcttactgtagggcaatatcagatgtcagagcttgacaagaatccaaatttcagccttaaaaatcaggtgttttaccgtcaggattatcttgatgagtttgagtgtatttgggagactcaggctaagtttcataaagaacttacgccagaacttaaacatatcatacgtgatattgtgattttttatcaacgtccgctgaaatcccaaaaaggacttatcagtctgtgtgaacttgaaagtcgtgagattgaaatagaaaagaatggtaagaaagtcaaaaagacaataggtccgcgagtgtgtccaaaatcttcaccgatgtatcaggagttcagaatatggcagactataaacaatcttcaggtatcaggtatgattgttgcagataaccggtttgatttgtttggtgaaactgtaggtatgaagtttggcaaacgctttcttgaacaggaagaaaaagagattctcttcaaggaactcaacttcaaaagcaagttggcgaagaaagaaattcttagattgctattcaaaaactacaaggaacttgaccttaactataatgaagtgaagggcaatactactatggctgcattattagaggcatgcagtaagattattgaaatgagcgggcatggtgagtatgatttttctaagatgacggcagatgaaataaaggattttgtgtttccaatattcaatggacttggtttcaatacagacatattatcttttgattcgtctgttgaaggcaaggcttttgagaaacagccgtcttacatgttttggcatttgctctattcttatgaaggcgacaaatcaaagaccggtaatgaaagtctcataaataaaatatccgaatgttatggatttgataaagagtatgccgctgttattgccggcataagactcgagcctgattatggtaatcttagtgtaaaggcaatgcgcaagatactgccttacatgaaagacggccttggatatagtgacgcttgccaatacgctggttatcggcattcaaaaaggtcgttgacaaaagaggaaatcgattccagaccattgaaaaataaggtggacctgttgccacgtaacagtctgcgtaatcctatagttgagaaaattcttaatcagatgattaatgtagtgaatgctgttgttgatgtttacggaagacctgacgagattcgtgttgaaatggcacgtgagctgaagaaaaccaaggctcagcgtgaggagactgtaaagacgataagaaaggttactgttgaaaatgagaaatacaagaaagaacttgaagaagagtttggactgaaaaacgtgagtcgcaacgatattataagatacagactttatttagaactgaaggacaacggatttaagactctttattcaaatacctatataccacgtgagaaattattcagtaaggaatttgacattgagcatattataccacaagcaaaactgtttgatgattctttatcaaataagacacttgaagctcgaaacgtaaatattgagaaagccgattctactgcttatgattatgtaaaagctaagtatggagatgaaggacttaaaaaatataatgagaaggtcaaacagttgtatgagaaaaagattataggtaagacaaaatttaaacggcttcttaccacggaaaaagatattcctgatggatttattaatcgcgatttgagcaacactcaatacattgcccgtaaggcatgtgagattcttgaagaagtggctagaagagtagtgtcgacaactggttcggttacgtccagattgcgtgaagactggcagctcgttgacattatgaaggaacttaattgggataaatacgacaggcttggattaacagagattgtagaagatagagacggaagacgtatcaagcatattaaagactggacaaagcgtaatgaccagcgccaccatgcaatggatgcactgaccattgcatttacaaaacctgcattcatacaatatcttaacaacttaaatgctcgaagcgataaaggtggcagcatatacacaatagaacgcaaagaactttatcgtgacaataagggcaaacttaggctttatccacctatgccgcttgacgaattccgtgctgaagcgaaatgccatcttgaaaatattctcgtgtctataaaagcaaaaaacaaggtggttacgcgtaatgttaacatcacgaggacggaaaaagcagagaaaggaaaacatgagagaatacaactaacaccacgtgggaaacttcataacgaaaccatctacggcagtataaagcgctatgatggaaataaggaaaaagtgaacgcttcgtttgacgtgtcaaagattatgactgttgcagacaaacgttaccgtgaagcattgctcagaagattggaacagtttgaaggcgatgcccgaaaagcgttcacaggaaaaaacagtcttgagaagaatccgttattcgtagacgaactccatacaaagaaagtgcctgatatagtgaaaactgtaaagtttggaactatttatacacaacgtaaggagatatctgatgaattgaaaatagataaagttattgataataaagtaagaaaaattcttgaagaaaggcttgctgaatttaatggtgatgcgaaaaaagcattctcgaatcttgatgagaatcctatatggcttaataaagaaaaaggtataagcattaaacgtgtcacgataaacagtggattgaaagatcctactgcattgcacgacaaacgcgacaacaacggacgacttatccttgataaggatggaaagaaacagcccacagactttgtgagtacgagcaataatcatcatgttgcaatcttctgcgatattgagggacagattcaggaacatctcgtttcgttctatgaggctacggcacgtgccatacagcatctgccggtggtagacagaaacttcaataaagacaaagactggcagttcatgttcaccatgaagcagaatgaatatttcgtatttccgaacaaagaaacaggttttgatcctaaagagattgatttgctcaatccgaaaaattatgcagccataagtccgaatctatacagagtgcagaaattatcttcaaaatattatgttttcaggcatcatttggaaacaacggttgacgataagaaagagctgttgggcatcacatggaaacgtataaggtctttagataaccttagagatattgtgaaagtccgcataaatcatcttggacagattgtcaatgtgggagaatattgattagaaaatgaatttatgataaaacgcacattatgtttcacaagtccggcctatctgtcgctgaaggacggacagatggtggttaggcttccggaagttgagaagagcgatatgcccgagcgtctgaaacgtgacagcataagaaccataccggtggaagacatcggtgtggttgtgttcgacaacagacagataaccattacgcatggtttgcttgaggtgttactcgagaacaactgtgctgtggtgacgtgcgatgcacgcggtatgcctgtcggattgatgctgccgctgtgcggcaatacggtgcagagcgagcgtttccgtcttcagaccgatgccacgcttccgttgaaaaaacagttgtggcagcagactgtgcgggcaaagatagctaaccaggcggctgtgctgcgtttgttcactgatgtagatactgggtgcatgactcgttggatagacgatgtgcgcagcggtgacgccgacaatctggagggccgtgcagccgcttattattggaaaatgttgtttgcagctatccccggactcgaatccttcactcgtggtcgtgatggtatgtcgcccaacaatctgctcaattacgggtatgctatactgcgtgctgtggttgcacgggcgttggtgtcgagcggtatgctgcccactttcggcatacatcatcacaaccgctacaatgcctattgtctggctgacgacataatggagccttaccggccgtatgtcgatcgtcttgtgtatgacattgtgaaagaaaacggcatcgacggacttgaactcaccaggcaacacaaggcccggcttctcaccattcctacgctcggcgtctgtatatcaggcaagcgcagtccgctcatggtgggtgtcactcagaccacggcgtcgctctaccgttgcttcagcggcgagtcgaggcgcatagcctatccggaaatagattgaatgtttcgggcgctgtatcgctctgccatttatatgaattattatttatcatggaccgctttagtgaatatcgcgttatgtgggtgcttgttttctttgatttgcctactgagacaaaaaaagacaagaaggcttacgctctttttcgtaagaatctgcagcgtgacggtttcaccatgttccagttctccatctacgttagacattgtgcgagtatggagaacgcgcaggtgcacattaagcgtgtcaaatcgttcttaccagaatatggcaatgtgggagtgatgtgtatcacagacaaacagttcggagcgatagagttgttctatggcaagaagtcgaagccacctaatgctccaggtcagcaactcgagctattctgaatatgcagatttattattttttaactttatagcaagtctgcacactttaatcattccatacaataatgttgtctttcggaatgtaacagaaataaggaaacaccgtcttgtttgcgatgtttccttattcctatatcagttttatgtttctgatatatcgcataatcatttgctgctcagcttattatggataatgtgctgttgcttatatagcaaaggtaagaattttagagcaaatcacaactcgttcatttgttgaagccttccgtattgggctgttgcttatatagcaaaggtaagaattttagagcaaatcacaacacctcagtcttcatcactgtatgattaacagctgttgcttatatagcaaaggtaagaattttagagcaaatcacaacttaattcgtatcattaagcgtctcaaatgagctgttgcttatatcgcaaaggtaagagtttttaatcaaatccctattatcaatccttattattttattgtgaaaaaacagcagacaaaattttccgatcaatcctttcttaccgcctcccgtctctgtatatttatgcaaaaatcggatctcataattgcataaatattcatcgataactcgaaaatacggcgatattttcgagcagcagtctcctcggtcgcaaattctcgagttttgagagggttgcgtattgtgttgacagccagccacttgtgctttatgacaatccgatagcttctgtatggcgctgcgaaacagtctgtttcagcctctgatattgcccatatcagggcctgatatgctcaatatcacaccataaccaagcacatatcgcatggtgataaaggctgtttcgcagagccgtctgattttttatgtcattcgtgaagaaaaatacgacggggcacgaaagaaaaatccgtctgataaagcctgttccgtcgcgctccgttttctatttcgtgaaaaatttttgtcaaaattttttacttttgatattgcataaatatacagttctgaaggcgaaaagcaccatttcgttttattcttgctccacacgcctatgtatgtttcttttgggcagttccggctccgtgtgccgatgcttttaagatccgtagacaatccttcgcaactttattatatgtgcttcgtcaccttatcatatatggtgtgttgctttctctggtgccgcgcccgccgcctgtatgccgttcactgtcattgtcgctccgccatggggcttattccgcatccggccgttattatctccgccgtccgcacacgtcttgcttcgtgccgttgtgtcgccgtatatttttctccggagaacttttccgcggttgcatattttatttcatatcacggtggataatgtattattatgccattcttatgtgtgatctgacgctgacgatatgcggtttatgtcactttttatatatccgacagccgtgttccaccatgcaccgcgactctgccaagacggctttctgcgagcgtatcgtgcttgttttatgcgtattgtgacattcttatgagcagttcatacctttaatatatggctttccgtatgctcttttatgtgttgtgtcaaaaagtgaatgttttaagtcaaaaaacatacgcgccgtaatggttgttattgctaaatttgctcagccatttagaagtctaagctatataaccaaatgaacaacaaaagaaaatgtttctttgcagttgacctcggagcaacgagcggacgtacgatagtcggcagttttctcccgtccggtctggagctggaggagataaaccgcttccccaaccatctcatagagaacggcggacggttctactgggacatctacgaactgttccgcaatgttgtggaagggttgaggctggttgccggtcgcgacgactgtgagatatgctccataggcgttgacacatggggtgtggacttcgtgtgtgtcggcgaggacggcgctttcctgcgtcttccgcgtgcctaccgcgatccgttcacctcgggagctgcagaacgtttcttttcggaagtgccgcgcgagacggtctacagtcagaccggcatacaggtgatggacttcaacactctgttccagctcgatgccatgcgccgttcgtcagacagtgcgctggccgccgcacacaaactgttgttcatgccggatgccataacatacatgctcacgggcgaaatggtgaccgaatacaccatagcctccacctcccagttgctcaatgcggccacacgccgtttcgagccgtcgcttcttgcggccacgggactgacggaggagagtttcggacgtttcgtctttccgggcaaccaggtgggtgtgctcacgcccgaggtgcagcgccagacagggctcggccccgtgccggtgatagcagtggccggccacgacaccgcttctgccgttgccgccgttccggcatccgaccgcgattttgcttatctcagcagtggcacatggtcgctgatgggtatcgagactgatgcacccgtcatcagcgccgtcactcagaagttgaacttcaccaatgagggcggcgtcaacggtaccatccgcctgctgaagaatatatgcggcctgtggatacttgagcgctgccgtgcccaatggggtgcggtgccctacgacgtgctgatagacgaggcacgtgccgcagagccgttccgtagtttgatcaatcccgacgaagcttctttttctaatccgtccgacatggttgaggccatacggacattctgccgcagtcacagccagcctgtgcccgatacgcgcggacgtctggtgcgttgcatcttcgagagtcttgccttgcgctaccgtcatgtcttcgacagtctgcgcgagctgtccgagcgatcactcagcgttctgcacgttatcggcggtggcagttgcaatgagctgttgaaccagtggacggccgatgccatcggtgtgcctgtcgtagcaggcccgtccgaggcaacagccataggcaacatcatgatgcaggcagtagctgccggacattcgtccgacgtagccggcatgcgccgtatggtgcgcgggtcggtaagcctgaagacatacatgccggccgacaccgccgcatgggaagaagcataccgcagggcgccgttcaccgcctgagcgttttcataccggcctatgccggctttggcgggcgtgacgggccgccgttgcgtcttgaccgataatttacatacaaccattttaaacaaaaaacctgattatgaaagaacaactcatcaacaaagcctacgagatagccaaggaacgctatgccgttctgggtatcgatacagacaaggcgatggacgccttgcagaatatttccctctcaatgcattgctggcaggccgacgacgtcacaggattcgagtcgggcggcgcgcttacgggtggcatacaggccacgggcaattatcccggcaaggcgcgcaacatggaggaagtgcgcatggacatactgaaagccatgtcgttcattcccggccgtcaccgtctgagcctgcacgagatatacggtgacttcggcggacagtttgttgaccgcgatcaggttgagccgtcacacttcgagagctggatgcagtgggctgccgaaaacggcataaagctcgacttcaattccacctctttctctcatcccaagagcggaaacctctcgctggccaatcccgacaaggccatacgcgacttctgggtggagcacacggtgcgctgccgcgccattgcagaggagatgggacgccgtcagggcgatccttgtataatgaacctctggatacacgacggcagcaaggacatcaccgtcaaccgcatgatgtaccgcgaactgctcaaggattcgctcgaccgcatattcgcaacagagtataagaacatgaaggacagcatcgagtccaaggtgttcggcataggtcttgagagctacaccgtgggttcaaacgatttctatataggttatggcgtgcagcatcagaagctcgtcacactcgacacaggccacttccatccgacggagagtgtggccgacaaactctcttcgctcctgcttttcgtgccggaggtgctgctccatgtgagccgtcccgtgcgttgggacagcgatcacgtaacgataatgaacgacgatacgctcgacctctgcaaggagattgtgcgttgcggagccctcggccgcgtgcacataggtctcgactacttcgacgcgtccatcaaccgcattggagcatatgtcatcggaagccgtgccacacagaaatgtctgctccaggcgctgctcgaaccgctccatacattgcgcagctacgaagccgaggacaagggcttcgagcgtctggcgttgctcgaggagtgcaagtcgttgccatggaacgccgtatgggacatgttctgtctgcgcaacggtgtgcctgtgggcgaggagttcatagctgaggttgataaatatgaggccgacgtgacctcaaagcgtaaataaataaaaggttgttttgtcatggacgttttgttagggttattgataatagcggtcggcagtttcggtcagagcagttcttatgtgcccattaacaaggttaaggaatggtcgtgggagagtttctggttggttcagggcatctttgcatggctcgtgtttcctttgctcggcgcactgctcgccgttcctgcgggcggcagtctgtggcagttgtggagttcgggcggagcgcttcaggccgtcatttatggtgttctctggggtgttggcggtctgacgttcggcctctccatgcgctatctcggtgtcgccttgggccagagcatagctctcggtacgtgtgctgcgttcggaactctctttccggcgctatttgccggcaccgatctgctccgtggcgacggtctcatgctgctctgcggcgtgtgcatcaccattgcaggcattgccgtgataggctacgccggcagtctgcgctcggccaatatgagtgaggaggagaagaaggcggccgtaaaggatttcgcccttaccaagggtctgctcgtggcgttgcttgccggagtgatgagcgcatgcttcgctctgggtctcgatgccggcggtcatatcaaggaggcagccctcaacggcggcgtggctccgctctatgccggcctgcccgtcatattccttgtgacgcttggcggtttctgcaccaacgctgtatattgcatccgacagaacataaagaaccataccggctgcgaatatttcgcatgcagcggccgtgtgctggccaacaacgtgcttttctgtgcccttgccggcgtgctgtggtactcgcagttcttcggtcttgagacgggcaagagcttcctcaccgacagtccggtgctgctggcattctcgtggagcatcctcatgtcgctcaacgtgatattcagcaacgtctggggcatcatcctgaaagagtggcgcggatgcggccgcaaggctgccggagtgcttgttgccggcctgctcatactcatagcctccatcattgtggtggccatggcacagcagtgacatgttttctggccggatgtgtgtcggccatgctacgatattgttatttctgtttgattaatttcgacttatagatgtgctcacgggtgacgttgtctcccgtgagcataacataagtgaaagaccgggtcggacggcggttgtctgccgcggacgccgtcgcagtgtctggtgtggccatgtacagatggatgtggaaacacggggcgcgctgtccggcaacatcattggatctttatctgacaggtgtgacgcaatgtgccgactgtcacgacgttacttctgttatgcatagaactttaagacattaacaaaataccgcttatcctgcgtattttaaacttcagaatgatgaaaccatacgaatctgtgatagtgagaaagacattgattctcatccttgtaatgtgtctgaccggcgcaagcaagctcatggccgtggacaatctgcgttgtgaaatggtgaccaatcctatgggaatagacatcactacgccacgactgagctgggaactgaacgataagggacgcaacgtgatgcagactgcttaccgcattctcgtggcttctacgatggataagctgaagcttggcaaggctgatttgtgggattcgggagaagtgagctcggacaattcgacgtacataccgtatggcggagtggctctgaagagccgtatgacgtgctactggaaggtgtgcgtcaccacgaataagggcaagtcggaatggagcaagcccgcccgctggacaatgggactgctcgacggtggagactggaaggcgcagtggataggacttgacaaggctttcgagtgggacgacccaacggctgactgtacaagactgtcggccagatatttcagaaaggatttccgcacgacgcgtcgtccggcgaaagccacgttatacatctgcggactgggtgtttacaaactgcatatcaacggcaagaccattggccgtcaggagctggcacccactcctactgattacagaaaggaagtgaaatacaacacgttcgacgtgaccggcgagataggcaagggcgacaatgccatcggagtgattgtgggcaacggccgtttcttccatatgcgccgcaccgacagggccgaatttccaaagctcatcgcccagttggaacttgagtatggcgacggcagccgcgaatatgtggtgagtgacgcgtcgtggaaggtcacatcgcacggagcgataggcgctaacaacgagtatgacggcgaggaatatgacgcacgccgtgagatgccgggatgggacaaagccggattcgacgactccgcgtggctgcctgtggatatgactgccgcaccggaaggaaagctcggcgcgcagataaacaataatatacaggtgatggacgttatcagaccgacaggtgtcacccgacttaacgacactacctatattctggatatgggacagaacttctccggacgcctcaagatgaaagtcaagggtgagcgtggcagggaagtgaagctgcgcttcgcggagttccttaacgatgacggaagcgtcaatctggacaatctgcgcggcggactcgccaccgacaaatacacactgaagggcgagggaaaggagacgtgggtgccatgcttcgccattcatggcttcagatatgtggagataaccaattatcccggtacgccttctacagatgacttcgagggacaggtgctctatgacgacatgcggcagaccggatatttctcgacgtcggactctctgataaatcagatttaccacaacgcctactggagtgtgcgcagcaactaccgcggcatgcccaccgactgcccgcaacgtacggagagaatgggatggacaggcgacagagccatcggatcgtacggcgagagcttcctcttcgacaacaataatctgtacgcgaaatgggtgcacgacatacgcataacccagcgcgaggacggcagcgtgtccgacatcgctccgagctactggagttcttacacggacaacatgacgtggcccggcacttatctcacggtgtcgaagatgctttacacgcagttcggcaacatacaaccgataaccgagcattacgcttcgatgaagaagtggctgtattatatgcgcgacaagtatctgactacggaccatatcatgccgcgtgatgtttacggtgactggtgcacgccgcccgaagtgttcaccgccaacgatccgcagataccgtcgctgattaccgacaaggcggtgataggtacggcttactattattatatgctcaagaccatgtcctggtttgcctctcttctggacaaggatggcgacagtaacgagttcgacgaacaggcggctgtggtaaaggaagcctacaacaataagttcctggataaggagaagcgctcatacagcaacaacaccgtgacgtcgaacctgctggcgctaagcttcggactcgtgcccgacgactatcgtaacgacatagccgacaacatggtaaggctcatagagaacgactttaagggacatataagcaccggagtgataggatgtcagtggctgatgcgcgggcttacggagataggacgccctgaccttgcttacggaatgttgcagaagactgattatccgagcttcggatacatgataaagaaaggtgctaccaccatatgggaacactggaacggcgacggcatggaacgttggatagactcgcagaatcatgtcatgctgttgggtgatctgctcatctggttctatgagaatatggcaggcataaagagtgatgatgctcatcccggattcaagaaactgattatgaagcctctgctcatcgacagactgagtcatgtggactgttcctaccactctgttcacggacaaataaccagttcgtggaagaaagacggggcgtcgttccaatggaatatcacgataccggccaactcctcggctaccgtatgcattccagccacggcattggacaatgtgaccgaaagcggaaagagtctttcagaagccggcatcagcacgtctaaggttgagggaggatatgttgtctgcgaaataggatcaggcacttaccgtttcaaggcagtgcgttag

SEQ ID NO: 2202 - DNA, 24188 bp, synthetic construct
  source 1..24188: mol_type = other DNA
  misc_feature 1..24188: note = Synthetic
  variation 17282..17306: note = n is a, c, g, or t
acgagtattgacagtagtcgtgcgggcattggtagaatagtcaacagcatccttggtacctatcacgacacccgtcagcaggtcgtcggcatgaacagcgacactgcaagcaatcattaagcctattagtttgggtcgaagacttatcatttttgatatttcttgataacactatatgcctgatagagaccgagttcacctgctttgctgaggtcagcaataccctcagccttcttgttagccttgatacgagccagaccacgattgtagtaagcttctgcaagatgttcttcgagctcaatagcacgtgtatagtcatcgatagcacgctggaagtcatgacgcaaggcatagagattacctcggtcatagtagagataggcgttcttggacgcaaactgaatggcatcagaaagatctccaaggacgttagccgactgaagttcgacattcgtgccttgggctgcattgaactcattgaccttcgcctgacagacggcacgctgccagtaagccagcgacgaagtagagtctatctggagatagatgccaagatcatcaatggcattatcaaaattctgtatagcactataggctacagcccgtagaaagagcaaaggctttacgtcgttagtgttctttgatgcgtcaatggccgtactgagcgaatcaataaaggcaaaggtccgtttcatgccctcctcaccaagccttgtctggtcgcaggaaatatagatggtgcgcgtgtctgatcgttggttgaaggcctcaacggtatcctcataaggagaatcacgcttcacctcgtctttcggccgagtgaaagtgaggccgaacatgggttggaaattcagttctgcctttcggttctgcacacgtccgcgatagtcgctcttatattcgtgctccacctcctgttcgtcggctacgacaatctggttgtatttctccaggtcctcatcactgcgcttacgcatctgttttttcgagagtcgtggctggtgaccatagcgcttgtcaatctgggccttcagaatacggaactcgtcaagctcagcttgttttgtattgccaagtcggcgatagcacgaggcacgatgctggagtccgaaccaaaaattcggatactgttcgataaccttcgaatagtcacggatagcagccctgaggttacccgtctgttcaagcaacaaggcacgattgaaaagagccatcagattgtcaggctccaaccttagcacgaagtcgaagtcttcgatacctcgattgtcatcgcccacttgggctcgcagcaggccacgattgtaatgccccaggaaattattgggatcgaggtcgagggccgtatcatagtcagccatcgctcctctgagattattctgattatagcgtgccagcgcacggttgatgtagttgcctgggtgcttaggcaacaagtggatactcttggtgaggaactcctcaccgtctttccattcctgacgggccagactgatcactgcccgttctgcccaaatgccgccatcatagggatcgagttcaagactcttactgagtgaagtcacagccttggtagtatctttctgcaagagatagacctctgcctgcatggcataggcacgagcatacttagaccaatgggtggtcatcgtatctatctcagccaacgcacgatcaaagtttttctcctgtatcagacaaaggatacgattatgccagaggctttggttcgcaggatcatagcgcaacgcacggtcataatccttgaccgcctcggcatacttcttctgattgattcgacagagaccgcggagctcatacgcgctgacaacataaggattgcgctcaatggcctccgaacagtcattctctgcaccgcgatagtcctcaaggtagaatttggctaccccacggaagaaccaaggctcatagagccaaggcttctgactgatagcctgattgaaatactggatagacaggacatagtcctcataatagagcgctgagcgccctatcatcaccagacggtcggtattgaactgggcaaatccgactaaaggcaaaaagaccagaagataaaaaatgcgacgcatttttatcttctgactggttttgtcttgtagccacaacgatagcggccaagcgtcagcgcacgaagtttgctcttgataagttgctttcgcaggggagagatgtgatcgatgaacatcttgccgtcaagatgatcgaactcatgctgcatcacacgagccagatagccttctatccattcatcgtggtgctggaactgttcatcgtcccaagtgacatgaatacgcgttgggcgcaccaccttttcgtggatggctggcaacgacaggcagccctcctcggaggtatccgtcttcgactcgtcatattcaatgatatgaggattgatgaacacctggcggaagcctttatattcaggcaggtcatccgacagtacgtcgaggtcgatgaccgacaggcgaatggccttaccaatctgcggagcagccagtccgatgccttctgattcagccaatgtttcccacatatccgcaatcagttccttcaactgcggatagtcgggagtgatatcttctgccaccttacggagtacaggttggccatatatataaataggtaatatcatcttcgtttggattccaaatagtcttgtaagattatcgtagcagaaatctcatcgacgagtcccttatcctgtcgggccttcttcttcagaccgccgtcgagcatagcctgatgagccagcacggaggtgaaacgctcgtcgtagtactcaatgggcacctcgggcaccgccttgcgccaacgggcgacaaactgctgcacgcgccgcaggttctcactgggttgtccattcggctgtcgcggctctccgatgatgattcgctccacaggctctttcgcaagataagccttcagccagtcgaacaactccgatgtagaaacagtcgccaaccctccggctataatctgcagagggtcggtgactgccagtccggtacgtttcttaccgtaatctattgataagatcctcgccaatccgaagtattaacgagcgttatagagcaaccatgcatcgggataggtagcacggagctggtcgcggctatagaccgcatcagccttgcctgcgaaggtgctggctactacacgatacatgttcttatcttcgttcttcacaatctgtgcatcgtaacctgcagacttcagacgctgctgcagaccttcagcattggagatcaagccgaaagaaccaacgaccacactgaatgccttcagaccagcaccgctaaccagctgcacgctttcctgacggactgaaacgttatcaagattatcaacaacgcgagtctctgttgctggccttgccacaacaggagctaccacggctgaattgtctgtgttggaagcctgggctgttgctgtgtcatactgctttgccttttcatatgccttcttataggcactttcacttgacttacaacttgtgaaagccattgctgcgcataaacctacgcacaaaagggtgtactttttcatttgcctttgtatttaattaacctaattattcaataaatttggtgcgaagttacaaaaaatcagggaaaaacaagtgaatttgccacataaagtttgttaaatcaggaaaatcgtaactttttaacaaaaaaattggcttttttttgcgctttaatggaaaaaattcgtatatttgcaaaacaaatcgttacgaacaattttaaaacaattagaattatgaagagtttaggttacattggcgcattccttggcggtgctatcgccggcgcagctctgggcatcctcgttgctccagaaaagggacaggacacacgcgtaaaaattactgatgctgtagaggatttcctgaagaagcacaacatcaagctcagccgcaaggaagtggttgatctggtagatgatatccaagatgcttccgaagaggaataaaccgataaagacagaacgaagaaatgctttcaagcgacaagaatgttgagaccattgctcaactgatcgaggtcttgaaacattacctcgggcttcagacggaatacgtgaagctcgacgtggttgacaaggtggtccgcctactgacggcggccgccttggcaatcatcttcttctttatcatcattgccgtgctgatgttcttctcctttgccctcgccttctggctggcaaactttataggcacggccgctgcttttgctgtagtagcagtcatccatctgctgctcttcttgattatcactcatttccgcaagccttggatagagaagccgctggtgcactttctcgccacgttgctgctcagcaaataatctttcacgcccatgctgcccgtcaagaaacctgtcagagaataccgcacgctcgacgagatccgtcagcgcaaagacgaactgttgaacgaacttcagcaagacaacactcagtttacgaccctctggaatcaggtcttcctgaaacgcgagaacaattcgaagtcagactacatcgcaggtctggtgaccaacggcatcgtagccttcgataccttcatgctcgtacgcaagctcatgaagaactacggttcgctcttcggatttggcaaaggaaagaagaaaaagaagtaaaaaacgattcagatgatgacttcctgaccatcgtaggccagttggatatcctcaggaagcatcgcattcaccttttcatggagaccaatgtcatgacagacgtgtatcagaagtgtctgtctagcccccactctgcgcgcaaacttgatggcatcatcgacgagctgatgagaatggtgaggtttgtcaaagcgcaaagcattgaccaccagtagttccgtgccttccagataaggatactcaccttcatcaatggtcttcatatcagtgatatacgccagtttgccgatacgatatcccagaatgggcagtttgccatgcatcacctctatcggcatgatgtcaaggtcaccaatctgaagcggctcatgggcatgaatctcatgaagttcaatggcaggtacaccaggatagcgatgctctgcaaaacagtaaggcaacatctcgagcatcgccttgcgagcgataggatccgcatagacgttcatctctccgaactgacagtaaggtctgatatcatccattcctcccatgtggtcgtaatgcgaatgggtgatcaggataccgtctatcttacgaaacggctggggaaggatttgctgtcggaagtcaggtccgcagtcgatcagcaggcgcgtcgcctctgtctccaccaataccgaacagcgggtacgctgatccttagggtcagtgctctgacacacctcacactgacagccgataactggcacgccacacgaggttcccgttcctaagaatgtcagtttcatataatgtttacctccggatagatatctatatcaaatttcgccttcacatcttgacggatagcttcgcagagcgctacaatctctgatcctgttgcgccaccgcgattcacgagtaccagcgcctgcttgtcgtgaacacctgcacggcccaacgacttgcctttccaaccacactggtctatcatccagcctgctggtatcttcacctgctcggcatccacatcgtaatgaggcatgccttcatactgggcagcgagctgctcgtacttctcacggctcacgacgggattcataaagaagctgcccgcattgcccgtcaccttcggatcaggcaactttgcatttctgatatcgatgatagtgtctctcacctgcatggccgtaggctggctgattccctttcgctcaagttcggcacagatattaccatagacaagatggggcgtgaattcactgaggagctcatattcgacagccgtgatgagataacggttcttccagtcatgtttgaaacggctgttacgatagccatagtcacacgcttccttgtcgatgaccaccgcctcgcccgtagcaatctctatggcatataccttgctgataaacgactgcacttctgcgccataggcaccaatattctgaacggcactcgcaccaacgtcaccaggaatcagcgaaaggttttccagaccaaagaggccattcgccagactcttctccacgacgtcatcccacgtctcgccgctcccacaacgcatcttgttgccgtcaaaagcgacacccttgatagccgagtgcaccacggtgccatcaaagtcttttgtcaacagcagattgctaccgccacctattattatataaggggtcggcacctcacgcaggatggcagcgaccttctgagcctcctcggcagtctcatactcaaggaaacggccacacttggcgtcgatgccaaatgtgttatgttctttcagactataattcttaagatccttcacttcttactcttcacttctacgttgtcatcttcatcagcagccacttattgcccaccttcttgaagcgtagttccatctccagaccgttagccacacccttcatcaggaatatcatctccttattggcagccttcggcttgccatagacgatgttgtagagcacctttacaggcaaggttggcgcaaaggcttcccacgtatcaggcgttatcacgccttccatctgagcaaagtcgtcatcagggtcagggccgacaaactgtaccgtctcgttgatgctctcatgctggaacacgctgtcagtgacaaacttctggtagaaactgaggaatgaggcattagcattctcagagataggcgtcacgttgatactcgtcatcatccaagcacccttcacgcgaaagaatcggtagttcaccacacggttcttcttcagctgaatcttctccacgatggcctgactgacagcggtatccttcatgtgcgacatctgctcctcgtcgctgaacaacagcgtgtagtagccttgtcgcatgaagaggcgctccatcttccactgctccaccttcgtattgacggtcttgccgccttctgtcgtgcgcagcgggaacactgtacgctctttctgtagtttcttgttggccacgaagttgaagataaagtcgtcaaacatcgcgtcagccgcccgaggcatcggcgtctcggtaatcagtagttccatcgtgtctgtgactgccacgtccgatgagtctgctacagagtctgcaggcacctcgtccgtctggccagctttctttcccgtacacgagaacatcaacagcatgattgcgctgagcgcaataaaacaccttctcattgactgaagttgtaactaataatccgcaattctctcaaaatttcggcaaaggtacaaaatattcttaattcttcatcataattctcattttttttgtacctttgcacgcaaaattgcaattttaagacaaatatgatacttgataagattgatcaacttctcaaagaagtgcaggatttgagtgcgaagaacgcagatgaagtagaacagctccgactgaaatacctcagcaagaagggtgagattacagccctgatgaacgacttccgcaatgtggctgccgaccagaaaaagaccgtcggcatgaagatcaacgaactgaagacacttgccactgagcgcatcaaccagctgcgcgaggagtgcgagacgcaggagactggcgaagaggccatcgacctgacgcgtaccccctaccccatacagctcggcacacgccatccgctgaccatcgtcaccaacgagattatcgatatcttctcccgtatgggattcgtccttgccgacggtcctgaggtggaagacgacaatcacatcttcacgaagatgaacttcgctgccgaccatcctgcccgcgatatgcaggacaccttcttcgtcagccagcatcccaacgatgtcacgaagaacattctcttgcgttcacacacctccagcgtccaggctcgcatcatggagcagatgcacactgaggatggtaagctcacaggccctatccgcgtcatctgcccaggccgcgtctatcgtaatgaggccatcacggcacgtgcccactgcttcttccatcaggtggaaggtctgtatatcgacaagaacgtatcattcaccgacctcaagcaggtgctcctttcatttgcccgcgagatgttcggccctgacacgaagatccgtctgcgcccctcttacttcccattcacggagccctcagctgagatggatatctcatgcttcatctgtggcggtgagggatgcggcttctgcaagcacacaggctgggtggagattctgggttgcggtatggtcgatcccaacgtgctcgagctctgcggcatcgattccaaggagtacagcggctatgccttcggcatgggtgtcgagcgtatcaccaacctgaaatatcgcgtcagcgacctccgtatgttctcagagaacgatacccgtttcctcgaagaattcgaagctgccaactaacagcactgcgatctcataatgaaagggctttggagaacatccaaagcccttttttcttatttgttttagaagaacatcatcgggagagaattcttccgcttttgggaaagctcattcttcatccgctcgatagcagtcttaacgaagaaggcaatcagatattcgtctgaaccctcagtcctaatctgtttcaaggcagagatatactcagaacggtccttcagttcgatgatcaacaacggatgacctgccctgaggagaataaagttagaaagcaggcgaccagttcttccatttccgtcgcggaacggatgcagatactcataatacccatgccatttcgctgcgacaatcaagggatgctgtccttcgccaatagccctctctgttgatgccatcaacgaaggcacacgggctatcaatgcctcatgatcaccaaaaacggtgtcacctgcagccatatcttccgtcgtatattcacctgctatcgatcctggagccctataggcaagcgtatgctctgtcaccagccgattcacctctttcaacagagcctcatcaagcggatgttccaattgacctaccatatagtcaaaggccctgaaatggtcagccatttcagtacactccaacaacgaccgtcctacaggaatcatagccataccctgttcgcgtagaatcctcgtatcatcaacggtaaatgagtttccctcgatagcacaagaataggtagagaacagaatctcattatattccatccactgctcacgactcatcctatcagcaatcttctcctgatattcccgtcggatgcgctcgtattcctccatctctttctcgaacatcgtggcaaagataaacttaaaagccgaaagttccaaactttcagagagatttttaaattgttcatctacacatgaatatttctacttgtctcatattaccttttgaatgacataaatgccgcactgccgcaacgccgcagcaattgtttgcgatttaaagcatgacagaaccagtcccctaaatcagggtagtggtttggaagccccattttctttgtatatgcgacaagtttttgccctttggcctccctttgtcgcatccatcccaccccgtcgcaacaactccgagaagaactggcctaaatatttggaaatcgccgaaacccgccgtacctttgcatcaacaaaacaaagttagagtttctttttcatacgttataaattggttttagttttttaggttagtaatgatgtatgtagggcccgcagtgatgcaggccctacatgcgtttataaagaaacgcttcgcgcagcaccaagcacgctgtgataacaaaaaaaaaatccaccgttgaaggacgatggatcaggacctaatgttttcacaacggaataatccttattgtgatttgctaaaaattagtgctgcaaagataaatattttccatataagtaccaaacatttcaaaagaattttgtacttttgtggcataaataactaaaaacttgatatatgaagaagattctaggtctagatttaggaacaacaagtataggttgggcacttgtcaatgagaaagagaacgataatgagaagtcggtaatcattcgcttaggtgtcagagtcaatcctctaacagtcgacgaaaagacaaactttgagaaagggaagtcgattaccaccaatgcagaccgacgcatgaagcgcagcatgcataggaatcttcaacgctacaaattacgcagaaagaatctgatcgagtgcctgttggaacatcatatcatctcagatgaaacacttctatatgagcagggaaacaataccactttccaaacctacagagccagagcaaaggcagttaccgaagaaatatccttagaggattttgcccgcgtgttgttgatgatcaacaaaaagcgaggctacaagagtagtcgcaaagtgaaagatggcgaagagggagaattaattgacggtatggaaattgccaaaaggctctatgaagagaacatgactccaggccagctattactagacctatataataaaggaaagaaaaacagaccaactttctaccgatcagaccttcaggcggagttcgacaagatatggaatacgcagtctgcattctatccaaacatcctgaccgacgatttcaagtcatctattcatggattcaataagactcagacagcaggtgctttctatggcgttcatcagataactacagccaagaatgctggaaaagagggctatgcccaggccctctcgtggcgaacagatgccttgaaccgccaattgggaatcgaagaagtagcctatattttggcggatatcaatggagccatcaacaactctagcaagcgtttggcaatgatcagcgacagaagtaaggaactttacttcaaccatcagaccattgggcaattcttaatgaaacgacttgacgagaatccaaacaatagtttgacaaacatcatcttttatcgacaagactatatggatgagtttgaggtgatatgggagaagcaggcacaataccatcccgaattgacttcagaactaaaaaaagaaatccgcgatatcatcatcttctatcagcgagatttgaagagctgcaaaaatcttgttagctattgtgagcttgaacataccgaaagagagataaccattggcagcaagaaaaagaccattctcacaggatgcaaagtttgcccaaaatcatctctcctgtttcaggatttcaaaatatggcagattctaaacaaccttcaggtctcagtagttggccgtcagcgtaagaaaatcaagaaagacaacactcagccttctttatttgatgatgtcgagactagtgccttgaccagattcctaactcaggaagagaaggatatcttatataacgagttatccatcaaggacaagatgagcaagaaggaggtcctgaaacttctatttgacaaccacaacagcctggatcttaattataaagaggttgaaggtaatcggacaatggcagcactattcaaggcttatcaagatattatcagtctaacaggaaatggcgaatacgacttcgcaaagatgccgacagacgaagtaatgaatgtcacgactgaaatattcagaggtttaggctacaaaactgatttcctaactttcgaccctttgctagaaggtaaatccttagagcagcagcatgcctatcgtttgtggcatctgctctattcatatactggtgataactcagccacaggaaacgaagccttactgaacaagatcaaggaactgtgcggattcgaaaaagaatatgccgttatcctttctaatatacctctggctcttgactatggaagcctaagcgccaaagccatcaggaaaatactaccacacatgatgaaaggctatgaatatagcgaagcctgcaagatggcaggctacaaccattctgctcgttctctaaccaaagaagaacttgcaaagaaagaatacaaatcatgccttgatgaaatcagacgcaacagcctgcgtaaccctgtagtagaaaagatcctaaaccagatgatcaacgtcgtcaatgagattgttaagacttacggcaagcctgaagagattagaattgagatggctcgcgaactgaagaagagccaggaggaacgtgagttgttggatgctgctatcagaaagaacactgcagagagcgagaaactgcgcaaagaactcgaagatgaatttggtatacagcatgtcactagaaacgacattctgcgttacaagctttacaatgagttaaaactcaatggctataaaacgctatactccaatacctacattccaagagaagatctcttcagcaaacgattcgacatagaacatattatccctcaatcacgtctcttcgatgattcattctcgaacaagacacttgaagtccgtgatatcaatattgagaaaggtaatatgactgcttacgactatgtggcaggcaaatttgatgaaaaatatttggttgattatgaaagcagaattgaagaactctatacccagaaggccatttcaaaaaccaaacgcaataatctgctgatgaaggaagagaatattccatcagatttcttagagcgtgacttgcgcgactctcagtacatcgcaagaaaagcccgtgagatattagaagaattggtaccatttgtggttacaactactggcgccgttacaagtcgtttgcgtgaagactggcaattagtaaacctgatgcaagaactgaattgggataaatacgatgcgttaggattaacagaacgttacactgataagaatggcaacatcgtaaagcgcattaaagactggaccaagcgcaatgatcatcgccatcatgcgatggacgcattaaccattgccttcaccaagcggagtattgttcaatatctcagcaacctaaatgcccgtagtgacaagtcgagcagcatctacggtatcgagcagaaagaattgcatcgcgacgaaaaggatcataaactcgtgttcaatgcaccgatgcctctgaatgaattccgagctgaagcaaaaaaacacctagaaagcattctggtttccatcaaagcaaagaacaaagttgtaaccaagaacatcaataagtccaagacaaaagatggacatcagaataaaatccaactaacgcctcgtggtgccctacataatgaaacagtctatggaaacatacgtaattacgaggcagaatacagaaaggttgacggcaagttcaccgaagatatcattcttcgcgtatcaagtcagaagcatcgcgaagctttattgaaacgattggcagagtttgataatgatcccaagaaagcattcacaggtaagaacagtctggagaagaatccgatctggcttaatgaagaccattcccatgctgtacctttgaaggtgaaactatacaaaattgtggatgtctttaccatcaaaaaggccgtagataaagaccttaagttagacaaagtaatagatgataaggtacgcacaatactgcaacagcgattagatgaatttggtggcgatgctgctaaagcattctctaacctcgatgaaaatccgatttggttgaataaagaaaaggggattgctattaaaagggtgaaaatcagaggaattgccaacggcgaacctatcagagtcaagagggatgttatgggtaatatcatcaaagatgagaacggcaatccaattcctaatgattttgttaatactggtaacaatcatcatgtagcggtatttagggatgcttcagggaagttacaagagcacgtggtttcattctatgaagcaacaacaagagctatattgggttatcctatagtcgataaggagtataatcgttctgaaggctgggaattcttattctctatgaaacagaatgaattttttgtattcccaaacgagaagacaggtttcaatccacaagaaacagacttgatggatgctaacaattggagtgcgataagtcctaatctttatcgtgttcagaagtttactacgggtgattattttttccgtcatcatttagaaacaaatgttgagaatagtaataatctaaaagacatcacctggaaaaggattaacagcgctaacaaccttgcaggaattgtaaaagtgagactcaatcatcttggagaaattgttgctattggagaatattagcctatgattaagaaaaccctatgtttcagcaatcctgcatatctctcactgagagatgcccaattagtaataaggctgccagaagttgagaaagcagacattctttcagaggacttcaagaaggctaacgaaattacgcgtcctattgaagacattggagtggtggtgctcagtcataagcaaatcaccatcacttcgggggtacttgaagccctactagaaaataactgtgctgtcattacctgtgattccaaatcaatgcctgttggattactattgcctttagtgggaaatactacacaaaatgaacgtttcagagaccagttagatgcctcacaacctctacgcaaacaattgtggcaacaaaccatacaatacaagatacgtaaccaagcaaccgtactcgctcaatgcaccaatacagagacaaaatgtatgcttgtatgggccaacgaggttcggagtggtgatccagacaatttagaagctcgtgctgctgtgtactattggaaggggctatttggaaatataccaggttttatccgagacagggagggagttgcaccaaacaacctgctaaactatggatatgccatacttcgagccgtaatagcccgctccttggtagcaagtggattactaccaacccttggcattcaccatcacaacaaatataatgcatattgtttggctgatgacattatggagccatatcgtccatacgttgatcgactcgtttatgatattgtggagcaatatggtgaagatgtagaattgtcaaaagacattaagtctgaactactctccatacctactcttgatgtagttataggaggtaagcgtagtccactgatggttgcagcatcgcaaaccacagcttctctttataaatgttttagcggcgaacttaggaaaatagcttatcctgagatgacatgaattcaagaagattcagcgaatacagagttatgtggctcttagttttattcgatttaccaacagagacaaagaaagacatcaaggcttatgccaaatttcgcaaacgcctgattcaagatggattcacaatgtttcagttttctatctacgttcgccattgcgctagcatggaaaatgctgaagttcatcgaaaacgggtaaaagccattctaccagaatttggaaaggtaggaatcatgtgcataacagacaagcaatttggtaatattgaattgttttttggagccaaaccacaattgccaaatgccccagggcaacaactagagctattctagaaaaggaggaatccattacatcatgaaaacctccttttactttgcaccattttttattttctaattctctttccaacaacctgattatcaactacttcctgaaatcgagttgtctattcaggtgcaaagatactaattttttagcaaatcacaactcggcggcggggtgtctcgcttgcgctgccgttgtctattcaggtgcaaagatactaattttttagcaaatcacaacgatgcagctgtaataatagccttcgtacaagttgtctattcaggtgcaaagatactaattttttagcaaatcacaacggaattgttacaagtcatttcctggcaaacgttgtctattcaggtgcaaagatactaattttttagcaaatcacaactggcttatcgtcgaaaactatacccgcgtgttgtctattcaggtgcaaagatactaattttttagcaaatcacaacatctacctatagtgatctgatggctaagtagttgtctattcaggtgcaaagatactaattttttagcaaatcacaactccttttctgtcttttcgtcgatagtgatagttgtctattcaggtgcaaagatactaattttttagcaaatcacaacgagcaggctggcatgccatcagactactgggttgtctattcaggtgcaaagatactaattttttagcaaatcacaactatttgctgaagtattcataatcttatgcgttgtctattcaggtgcaaagatactaattttttagcaaatcacaacgtcagcgacgcatacgaatcaccagaggtagttgtctattcaggtgcaaagatactaattttttagcaaatcacaacagttcgtcgtacttcttgaaccacttggcggttgtctattcaggtgcaaagatactaattttttagcaaatcacaacactcaatccatcctgctccttattgaacgagttgtctattcaggtgcaaagatactaattttttagcaaatcacaacagcctctgttattgagcgaagtccctttacgttgtctattcaggtgcaaagatactaattttttagcaaatcacaaccgtccacttatccactgcctcgctcagccggttgtctattcaggtgcaaagatactaattttttagcaaatcacaacagaagatcgttcttccaaagcttaatctgagttgtctattcaggtgcaaagatactaattttttagcaaatcacaacatgtagtcctgtatctcccgcagcgtcgggttgtctattcaggtgcaaagatactaattttttagcaaatcacaacgtacagagaacagagaacagagaagagaatgttgtctattcaggtgcaaagatactaattttttagcaaatcacaacacctcacgcaatgctgccgtggctgatgtggttgtctattcaggtgcaaagatactaattttttagcaaatcacaaccatcgttgacagatacgctgaaggttttatgttgtctattcaggtgcaaagatactaattttttagcaaatcacaactatcagaataagcgtaagtctccgcgtgttgttgtctattcaggtgcaaagatactaattttttagcaaatcacaactgccatggtgtaataatgactatctttaggttgtctattcaggtgcaaagatactaattttttagcaaatcacaacttatccgccctgcttgtgaaagtcggacggttgtctattcaggtgcaaagatactaattttttagcaaatcacaactctcgtcatgccgatgccaaatctaagggggttgtctattcaggtgcaaagannnnnnnnnnnnnnnnnnnnnnnnntaattttttagcaaatcacaactctcgtcatgccgatgccaaatctaagggggttgtctattcaggtgcaaagatactaattttttagcaaatcacaactattcaatgaagacattcacgaattaaagtgttgtctattcaggtgcaaagatactaattttttagcaaatcacaactggcgttcgtagtagttctgtcgcttgcggttgtctattcaggtgcaaagatactaattttttagcaaatcacaactattcggatttatccagttttaagacattagttgtctattcaggtgcaaagatactaattttttagcaaatcacaacgagaccgtcgaggtgaacatgaagacgtgggttgtctattcaggtgcaaagatactaattttttagcaaatcacaacaaggtgtccgtgtggtcagcagcctatcaggttgtctatgcaggtgcaaagatactaatttttagcaaatcacaacgcgcattccatcactatcgagtatgccgcagttgtctatgcaggtgcaaaactagttcttttgattgatcaaattcaccaccacttttaccattacgtccttctcctctgtcttgctctctgcaatcatcaaagtcagagcgacgagggtgttatctgccagccgttttgagccatcagcacgatagagaataccattattattcaggaaccacaagaacagcgtggctgcaatgcgtttgttgccatcgctgaatgaatggttctttgtgacgagataaagcaacatagcagctttctcctctacactgggatagagttcttcaccaccaaaggtctgatagatctgaccaatactgctcttgaaggaatcatccttctcattgccaaataaagcagaacctccaaatttctcgcgcaaaccattgatggcctccatcgcattctcatacgttgcatggaaaggctcttgcttggtggtcttgtcgatggtcagtcgctcgtaatcgtaattatcaagcgtatcgagggcataggtataatccgtcaccacctcgaaaagcgcattggtctcatcattcgacagcaaggtctgattctgaattgtgcgccccagcatacctaccaactggcgcaactcgccaatctgctccttacggatacgctcgttgacggcatagcctttcacgaggtattccttcaacactcgatttgcccactgacgaaattttacgccacgcttagaattgacacgataccctactgaaataatcatatccaaattgaaatatgggatagtacgggtaacttgtcttttcccttcagtttgaacttgtgcaatttttgcacaggttgcctctcgttctaattcatcagctctatagatattgttgatgtgacgaactattgaggttctgtctgtttcaaacagctctgccatctgagcctgcgtcagccacaccgtctcattctccaagcggacatcaatttgcgtctgtccgtcctccgtctgatagattacaatcttgttctcgtccattttgctatctgataaaaccattccgcaaagatacaacttttttcttatccatcaaacatttacatgctatttttttgtagtcgtagggacagagtcgtagggacaggtgcttgggtatgagggtgttataacttaaatacctgtccccaaggctatcgcgataagcaatacttgcgataatcttctatgttcataggattagctaaattggtatctaacctattacatatttactccccggtatcagcgagagaagttttgtggtgatggcactgcacaggaatgtgagcagaccgatagtgggaatcgccagccatacgggcaacagaggatgggccacatcgccaccgataatccattctgctatgaatgtcagaaagaagatgtgcatcagatacatgccaaaggtgagtttggcaaggctgttaatccatcggggagccttctggatgcagctgaacagcaggaaggcaccaaaggtggcaagcagcacattgggcgtgcaaaactcccacgaccattccatcatcggcgtttccatctgcaagccaggcacggccttccaccagaaactccaggcagtgaacagtccgcctataatgaaacagatagtcccaatggccaacttcttctgcttgctccacttcaggtgtactcggatatagtgggccaatacgagatagcctaaataacctgagcagtaccacagagcagaatactgattccagaagcattcaccccagagttcgggcgacacaaagcggtgcagccaaggggtgagtgtggagaaggcaaagataccgaggaacgtcagttcgtctttcgcgccagccttctcgagccaaggcgacaccacgggtatgataaggtaaatactgataagcggatacatgaaccacagatgaccgccccatagcgggaagttgaagggcaccatcttcaactgctcgatggcttcatcccacgtcaaactgccccaagtggctggcaatatcgcataaagcaccaggaaacagacgaatggcggcaggatgcgcaggaagcgccgacggtagaactggctcatcgacgtgcccggcttcatcggcaccagcaggaaggccgatacaatcataaacagcggcacggatatgcgtccgaagaagccgtcatagacagatacccaaagacggttgtcctcattgaccacctgggacacaggtcccatgttgtaaaactgctcactggcgtgaactaccatcaccagcaggcaggcaattacacggatgtaatctacaaatgctattctatctttcatcttttttgtaatttgcggataactcggcaaggattgccaactagctgggtgcatctgcaaagaatgtcgcttggcagtcgtccattcttatttctttttctgccagagccgatggcttctgggtacgcactgcccaccgcatcatacggtactcctgcgcctgccattttaatgtttaatgttttaatgtcataatcttcgtaggacaggccagagtacacttaccacatttcagacagtctggatcgaggtagcctatttcctgtccgcgactgtcatatggggtgagttgcatcggacagacgcgggcacagcttttacacttggctccgccttcgccagacgcgactcggccatccaagcgagcttggcggctctcgctgctcctggcgttcatctgacaggcactcgacacatggatgttcgtgaaggccttgggcagcggtgccttctttggagccacccagcgggagatggtacccatcggacagaacgagcaccaagtgcgtggcgcatagatgaaactcagcgtaacgccgacaatggtagtcatcacgataatcgtccaaaacacgcgaccgatgccaccccacattgccaatccgccctcgctccagggaacggtgaatgtcagctggacgccgaacatgctgaagataaagaacaccatgaacaggcggaagccgaacgtacgcacgaatgcaggtattggcttgtggggtgagtacttcgacaacagacgatcgtacatattgccgcgaggacatacatgaccgcaccaccaacgccctttccagatgctggtcatcacgggaccaatcatacaaatgagtgcgatgagtcctacaacggggtagaaccacccgacgatgatatacgcgatgatgatccaatagaggtctaatcctggtgtcgcaaagtggcgatggaagttctttttctgttgcataatccttatttgttctttagctgtaaaataccttctattcctttctatgctattatagttccacatctaaaagactgtaattgctcacccattacgtctttcattacctcaaacacatggtcacatgtgcaatggctggtgtagttaccaatacgattgaaagaatccacggttttgatccaaaagtcttcatattaataatgtttgaaatactgcgtgcaaagttacgaaaatatttggattcttcctcattttttcgtaactttgcaatctaaaatagcgagaacatcctaaagaaatatggatgtctaatttttatcatttttattgtagttatttcagcaatagcatataaaaccaagaaaagcgttctggaataaccatccagaacgccttgatcgaatatttatatggtgactttaatcaaaaccaaacacgtttgcgcttaggtgtgaaccttctgggaaggccatctcctttaccaccgtttacatactccaattctgccattgtcagggcgcgtgcgctcatttcattcttctgtaccataatcttatatttttaaattgttaaacttactgttttgtcttgtcgctcagatgttgttttgtctgattgacgatgcaaaggtacggcggttttgggggaatcgcaaataattcgcagactttctcccgaggttgtgacgacaggggcagtaatctgcgacaaagcgcagacgaggcagctgaatcgtgtcgcaacgaggctgaaaagattagttgataaaatcctcattttctttgccaaatcgtatttttgtattatctttgcagcatataacgaatgagagagtcattcaggaaagaaatgtgattaaactataagacatatggaaaagaaactatttgtaatggctgcagccatcatgatggcaacagcaagtgcgaatgcacaggaagaacaagtcgttgacgcttatttcaccgccgacgaaatgcccgacatgcgacttttcatgcctggccctccagacagcacttcggtggcattcgccaatgacgtgaaccgatacttctggggcaaggagatgcgtgaggatcaggaacgtgctgatcaggccaagcgtgatgccgtctatggtctggctaccatcctggaggagtttgaagaggctttcggcttgaagatcagccaggaggatacacctgagatctataaggtgctgctcgaaggtaccgccacctgcgacagtatctgtaagtatcctaagactcgctatggtcgcacacgccccttcgtccgctttcatgagcataccctgatgccggaacttgaagaagagctcaacccctacaaatctttcccctcagggcactcactattaggctggagttcggcactcctgatgatggagatcaatcctgatcgtgctaacgagatactggcccgcggatatcgttatggtgagaaccgcgtggtggtgggtgctcactggcagagcgataccgaagccgccaggatggcagcggctgtggcttatgccaaactgcataccagcgagcgtttcctggagcagatgaagaaagcgcgtgaagagtataagctgatcacctctgatcctgctgcgataagaggggttcaggcagtccgtcagggtggtgatgccaagatctatgatctctcagggcgaagactcagttctcctggccagggtgtttatatccaggatggacagaaacggttggctaagtaaccccaatcgtggcttgttcacatcatcacaggcgaaagcttgagatcagcaggaagtgcatggcgattgaggaataggtaggtggtattcagggcgatatagtcgcgcgacatataccaaacacctttgtactccccactctgtccccaggagttctttaccatatagtaaggatgcccctgttcatctatggccttgccgtagatgagcatgacgtggtcgtaggtaaattgccaattgtcccattgttcctgccgcaactgttgggtgggcttcacgccttctggcagcatagccagtcctgtgcgcgtaaaatcgcctgtcacgtcgccgccccaagccaccgtgtagcctgcatcaatagccttgtcgagcacatccatcaactgctctataggaatgttgtaactcggtttcagtcgccatttgtaaggtgcctctatcacaaaccattggttgaacggatgatgcgtatagctggtcaagctgacgtaatcgtcgaggttgagcgagagactctcagcaaacgtttttggcgtgtatgtctttccgtgatattcaaacttctcaggacagcgacctatatagcgttcgatgactgcctgcacgctatcctgccaatgagccttgggggccttggcatccttaacaaccatactgcttacagtacgttccaactcagggaagaacaccttgaagttagccagcgaatcgcccgtcaacgagcctggtgcaggcatcgcgttctctgggcagatgccatgctgacgtatcacttccagcacatcatcacacgagccaccttctgaaatctgactgtagccatgcatacgcacatagtgggtagcgttgtccatatagtcgttgttcaccacaaacatctcacacagatcgtatgtcctacccgtctgtcgcagtatctcgctttcaaaatagcccaatgtggcgtatgcccaacaagtgccactacgatgctgatttttcacgctggttatcgggagttccttcaccgtagtaaacgatttcttcacctgcgaagcaatggctccgcgctgtagattctcttgtgccgatgccgttgtcgccatcagcatcattgcaatgactgttttataataatgtgacatacactaacttcttaaaaaaactattctttggccgtaacgacggtgacgatataagcactgaggaggacgaggatgcccgcaacgggtttgtcccaggtgaggatgtcctgtccgaggatgatggcaatcacggaggcaacgacgggctggagattggtgtagatggagaccgtcgtggcctgcagatacttcatcgcgaagggaatgaggaaatagccgagggccgtagcacccagtacgatgaaggccatctc

SEQ ID NO: 2203 - DNA, 24188 bp, synthetic construct
  source 1..24188: mol_type = other DNA
  misc_feature 1..24188: note = Synthetic
aaaatgatatggcataaaaaaagtattttctcgtggaaaataaataaggtaagactatgtattcccaaaaaagtaagtataggaaatttgtaagacttaaataatgaaaagaagtaacataaaaaaatacataaaggcacggtaattaaaataaaaggacttacataatttccgtaaatttcaaaataaggagtataaaagtataaatagtaaagaatgcttacccctactatcagacttattgcaaacaaaattattgtaattttgttaaactcatattctttattcttaattaagaaatcggctaaccaaaaacctataacataatgcggtattctaaaagttagattataaagatattcgtaagttccataggttgagtagctaaagatataagccgcagaaattgcgcacagtgtagttgctgtcttattaattttaaaaaatttataatataaaggggttaaaaggtataagaacaaaagtgccggaatgtaccaatcatatattttatctaaacccacatttctccaatagcctaaagtggttaaattataaaataaagaatcagaattccaaatacctaacttaatagcaataatagtaacaataagtacaattggataataatagggaaatattcgtaaaactctttttttgtaaaaatttcttatgcaattatctttagagatagaaaaatatactccaaatccggatactaatataaaaatatctactcccccatatccaattcttttaaagaattctaaaaattttgaggaaccaacatacacatgtgaatgataaaacataacccataaaatggcaactcccattaataaggttctgtatttacttagtaaatttaatttcataatatttattttattttgtgcgagtttaaccaatctatgtatgctctggcatttttcatatgttcaaccggattagacgtgaaggcatgtctgccggtattttttatagcacacatataaagataatctgttttagccggatttaacacggcatcaacaacaaagtcattaggaatgcaaatgggtaagggaggcaatcctttattcttataggtattatacggagaatcaattgatacattttttaccctctttacctgaatcttaaacccatatatttttctttctgcatactgtactgtaggatcagattgtaatttcatatctttttttaaacgattaaggtataagccagcaattataggcagttcgtccttaataacatattctctttgaattatggaagctaatgtgtaaacttctaaaacagataaacctaattgatcagcttctgctcttcttttttcattccaaaaacgattatgaattctttcaaatctggaaaataatttttccggagaagtattccaatccatataataagtttccggggtaaaatatatttttaattcttcaacgtctttatatcctttcaatgatgcttgttttttaaaataatttataaattttaaagaatcatcctccaaatttttacctaaatcggaagctaattcatagatatcatcatacgatttaattcttagatgaacttcatcttgtttccccaacaataaacgtctaattaaatctctattattttctcctaaatttaatttatatcttcctgcttttattttttcagggtatttttcggaataagctactttatcaaaagattgactgtcttttagatagggagctatcagcttttttacttggtaatagtcagcttgtgtaggaatacatatatgcgcttcctgtataatgttagaactgtaattttttttgtaataaggaacaactaataaaattaatcctaacgaaaatagtaaaaacaaaattattatgacaataattatttttctcatattcgattatttaatttggataatatatttcataaggattaaatgctgcaaaaatacgtatctttaatttaatttaaataatataagtctttgtttttatatatttgttagtaacttcaagttaattaaatatggtattaggtttattaggaaaaaatatttcttactctttttccaaaaattattttaatgaaaaattcgacttattaggtttaaaagattattcctataaaatatttgacattacttctaaaaacgatatatcagagatttttaacatgcccgatttgctaggctttaacgttactattccttttaaaaaagatataattgattttttagatgaattaagtccggaagctgaaaaaataggagctgttaatacagttaaaattgatggtacaaaaagaattggttataataccgatgccatcggcttcaaaaattccttagttcctttgctaaagcctcatcaccaatctgctttgatacttggtaatggtggagcatttagggctgtcgcctatattttacaacagctttccattccttatatggtcatttccagaaacggaatgaatacatacagctcattaaatcaagaaataatttcatcccataatttaattataaatactacaccggttggaacttttcctaatataaatgattgtcctcctatacctgtacattttttcaagcctcaacatttaatttatgatttaatttataatcccgaagaaactaaattgctaaagttgggaaaaaaagcagggtcacaaactaaaaatgggttagaaatgctccatttgcaagcagattttgcctggaatatttggtatgaaaatcaataagtaaataacctattttctgttaaataatgttcccgaagcttgtgctttagggaatatggtgatatccgcaatttgtacatggtccggtcttgaaacagcgtaataaatagcatcagctatatcttctgcaactaatggctcaaaaccctgatacacagaatctgctcttttcttgtctcctttaaatctaactaatgaaaattccgtttcaaccgcacccggtgcaatattagttaccttgatcccttgagttaataaatccattctcattcctttactaattgcttctacggcatgtttagtagcacaataaacagcgcctttaggataggtttctttccctgcaatagaacttacgtttataatatgccctcctttattagcaactaaaataggaacaatggctttggatacatataaaagtcctttaacattggaatcaatcatcgaatcaaaatcatctatagaggaatcgaaaaaagtatccaatccatgggcattccctgcacaattcactaagacatttatatctttctttttattatccgataaactttcaatagtagaaaaaaccgcctctctatttcctacatcaaaatgaagggttgttatgtctactttattttccaattcttttttaatatcatccaatctattttttcttcttccacaaagtacaagattaattccattttcagcgaagattttcgctgtggctttacctatacctgatgttgctcctgtaattaaagctgttttttgcatatgattaattttaattatttcatttattaaatatacaaaattctaattaaaaaatagcatattaaaggatatgttgtgcctagtttatctttatttataacttgggaaattttcaaccagttctatatcatcaattctaaatcctcgatcattatttgctgcttcactaataaattctaaggtggaaatttctttaactattttatcagggattcgaatcattactcccctgtatttgtttttattgttgaaggcatttaattcaatatcaggcatggaaagctctatctcattaaattttatttttagcttgtttatattggaaatatcatccgaattataaatatttgcattgaaattatatctcaatactatgttttttcgatttcctaaatgaatattacttatgattaacgacgactttttgtttgcaggaaaccatatgaaaagctcttttttagcgatttcactggaaccgtttagctttcttatatcagccagttcatatggatctgaataaaaagctccttctgcttctccatcaaaattagcagcagcagatattttaggccatggacttgaaataatcattccccccttaattttacttactttgttaaaagtttctttaaaaaaaccgcttggtggtaccggtggtattgaataatcatcattatttacgcaagaaataagagacagttcaactaccactattgtaattagttggaaaaatatatattttaacttcatcactatattcattaatcttccaattgtatgttatctatcctaattccttttttatttttacttgctgatccaaaaaattcaattttttgggtaccatcgggaattgctattcgcacggtataaaaagtatttttattattacttacatctaaagcaatatgaggaagctctatttcgatatcattgcatttcaatattaaatcatccacatatccaatatcgaatgaattaaatatacctacattgagtttaaaagataaggtcatttgtttatgtccggacgtatttatatgatctataagtaacgatgcattagtttttgccggaagccatactaaaggattgggaaatgatactcctgaagttcttatatcggcttttccgtaacgatcattataagtaaccggttgagaattatcaaagcctattgcattattaattttaggcttggatggcacatcagaaactttattaaaggtttcaataaaaaaaggttgggttgttggaaaatctttgacgtcatctattgttcttattattaatctataggtcttatacattccatcatatcgagtcattatacctctcaatttaccttcaccataaggaattttatatcccgaaaaagacgcataattacttacaggaaccgcaaaataattgaggttcatagtatttatctgattgtctgtacttgaatggtttcttacaaatgttttacccggctcgttaaattctactccgctaatttcaaccaaagtacacaaatatttttcattattattgatctctttcacggttaataatttgccggatgcatttgttttaataaccaattcttcttcattttttttgtctttacccaacacaatatttgaattcataatagagggtgttattggatcgaccacatattttttcggttgtgtgggaagcagacctatctgcaccatgccattttgctttccataacataaattgtccagtttaatatatattttagatcctaagggataatccgtgtataaactggatttattgatgcttaacatgataccttgagatccatcttcagtaactacaaataaatttttatatacatttcctgcatgatcagaagaaatcacatatccttctaaaacctccccattggaaaaggcacgtgcttctactccattttttcctgtaaaaacgggagctgtttttaaaagatagggtatatcaagcgtcgcacctattacttgtccttgatttaccggaggatctttatagtcatcatcatgtacacaggacatgagaaaccatgaggtaataataaataacatagtatttttaatcatatttatttttaaaatttatcatttatcctattaataattaaaattttaatgaaacattgatgaaatatgatctgcccctatcgtaaaacaacatattatcaaaaagtggatatgccaacgatttgtcattttctaattgttcataattagagtttcttccttgttcaaatgaaccggtaacataacctctttcatttaaaatattatttatcgaagcattcagactcagtatatacttacccacttttatcgatttgcctatatttgcgtttaccataaaaacatcttgaaactgcttttgttttaatactgattttacatttttaggagtaatatcctcataaggaaaagcatcatctttcattataaagttttgggttcttgacagtgaagatacatttgaataaatatcttgtagaaaattgctgctgatacctgcccaccaatattggggcgaataatatcttattgctacagtatatgctttttgaggagttccggttatcttatagttcttcatgtaagaagatccataatcatgtattccgggtgaattatcactaagtatatataaattgggattatttttataagaatattgtcccagggaagctatcccggataaggttatagaaggtgttagcttccaatctaaacctagttcacctcctaaaaattccttttcagttcctgttaaaacttctgaaacaaacgcatcttggctttcttccaaacttacacctttagcataataacgactgatttctacagcattttttatttttgtataatatcctgttattctggctttcataacaggggattttacaacataggttaaatcgtttgtatttattctttggttagataaagtaggaattatatcgttgttcaatcgagaatttacaaaaatttcatctaatgtgggtgaagattcaaaataggctgaattaaggatcataaagtttcttccattaatcttatagataatccctgttcgtagtcccaactcaataaaatttgccttgtcggaccttccatacgaattattcggatataatccatgtttaaatttcccatctctataagcctcattccatccgaataaaaacgatactgccacctcccaccggtttacagttaatctagaagtagcatttcctgtgaattcttgtctaaacagttggtaatcatattccgttttgtctcctttcctagctacacttcctggttttaggtaattataatcattggctgatgaaattgacccatctccctttataaatgaacttttatttactgcaaaatcagcacccaataaatcatttacctctctataattgtttgaaactaaattttgataattaatattgaaaaataatttccaattatcgttcaaaaaagtttgtaaatgagtggcagcgttaaaggttttatccttaataatatcatcaaccaaaaagtatgaagctcttctacctaattgtccgctatatggatcttggtaggtaggagcatgattgttggctttatataattggtcccagttgagttgagttatagcaaggtcattattttcccaagcatgaagactatgttcatattcagataaatttccttgactaagccaataacttggtaaatttttataataagtaggtgaaggactatctgcttcatatctgtttaagcgagagcttttattatatccaaactgataagaagcagtagtggtcaccttggattgatcacttaaattccaataatgggtaaacataactatcggctcaaaaatcctttttactctttcgtttcttttctccctatcttgccaaccccaatatgaattataattttttcctctcaagtcgtatacttcttgtgtattggggctcattccggttcttcttgcaggagatccgaatgtagttaaattcagtttgtgcttatcattaatttttttttctattgatgtaaaataggcatatgaatcgttataggttccatcaattactccctcttccatccatcttctggaacccgaaaaagtaaatgcccaacctgaaggaagcattccggaggagtatgtggtcataactctgtgttggtacgtacgattggaaaaagaataggtaaactggaaccctttcctgtaagaagaagaacgagtatcataataagtggttcctcccaggttgctaaaagaataattagaaatgttgttattttctgctaattcgtaaggataacgcactacgttgtttaagccgccccaattcccaaaatcaggtttacctgtacgatttttggacatcgggattccattaaacataatatttgcataactgttatcaattccccttactttgaaccagtaagagcctaattcgaatgaagctgttttagaaaacacatcttgggaagattgtaataaactaattcctgactgtagtagagagctctcatcatccgatgaaaaatcatcttctgttagagttatgataccttcgtcttcttgggacggattgtattctaatttaatgttacctaaatcttttttcaactccccaggagagacttttatcgtaagagtcatcggtacatagcctactctattaatgattattagataggttccggcagccacatctttaaattgaaaatatcctactcgatcggatacagactgtatcgtgccctcttctcctaagcttacgacagtctggtctaagggcttatcctgttctcctttgagatagccgtaaatcatagattgcgcaaatagtacctgatttacaaaaagtgcccaatataataacttaaatttcatcatctttcggtaatttcaagaagctttttgaaacaaatgtaattatttctttttagttttgttaatataaaaaaacgaatatatgcgtatatttttaaaaaataacttggtttttatttttttattgttgattataactcaaattaaagcacaaatacaatataaatcagcaactatcatgttttataatgtagaaaacctttatgacacgatacaatctgcagatcttataaacggcaccttacttcctaatgacccaaagtatcaaataagtgtacccgaaaatgaagctttaaaatctggatatgaagtatatcggggggaattatccttcactaaactaaaaggaaaaaaggtgatcagaaaacatatcctaacagatgaattccattataagggaacgaagcgttgggattcaaaaaaatatacggaaaaaattaaccatatcagtcgggttatatcagaaacaggaaaatctgaaacccaatctatgccggtaattatcggtttatgtgaaatagaaaatgagcaggtattgctagatctgtgcgaagccatcaaaaaaaaaggtgacaattatggatttattcatcttaactcatttgatgccagaggaatagacgtaggcttattatataacaagatgagatttattcccctaaatcgacagaggctttttattgacttgcccagagaggatggttataaaaattatacgcgcgatatactattggtcgaaggtctgttagacggtgaaaaaatgttttttttggttaatcattggccttcccgacgaggaggtgaacaaaagagtcttccgaacagattggcagcggcaaacgtattaaagcaagcaatggacagccttataaacattaatcctatggcaaaaatagtggctatgggtgattttaatgatgacagtaacagtcccagcattaaaaaggggttaaatactatatctaaaaaagaaaaggtaacagcaggtacttattataatcccgctgaaaatttatttaagaaagggttaggaactattgcctatcaagattcatttagcttttttgatcaacaaattatctctcccggactaattactgacaaagaaggttatcacttttataaaatgaacgtgtttgctccgccttatttagttactcaagagggattgtggaaaggctacccctttcgatctttttctaatgacaattataccggcggatatagcgatcattttccggtttatactatacttattaaaaaaattaataagtaattatactctaataataaaatatcgtgattaattgcgcttcattaatattgaaatactaccaaatatattagtataaaattattaaaataaaaaagcgagaaaattcccgcctttaatgttgttcacaacggaataatccttattgtgaattgccttcaaattttatttgttacaaatttaaagaaaagaaaacaataattcatcataaatattcattttttttatttctaattaatttatacatttattcttttatataattactaaaaccaaatagatcatatgtcttttaagaaaattctaggcctggacgtaggagttgcttcgattggctgggctgttgtccgcgaaaatgaagaaaaccctaatttcaatactattaccaaattaggcgtgagagtagttcctataacgagcgatgaaaaattaaattttgaaaaaggaaagtctataacctctaatgcagaaagaaccctagcaagaagttctagaagaaatcttcaacggtttaggttgagaagaaaaaacttgatcgctatattactacaaaaccaaattattactcctaccactcctctgacagaaaaaggcaaatttaccaccttcgaaaccttaaaaatccgagcaaaagcgactaaagaaaaaatagagctagaagaattggctagggttttacttcatattaataaaaagagaggatataaaagcagccgtaaagtaaaaaattcagaagatggcaaggcgatagatggaatggaggccgctaagatattatacgaaaacaagttaactcccgggcaatatacttaccaacttttagaaaagggtagtaataaaattcctgatttttactgttctgatttgcaaatagaatgggaagtaatatggaatttccaaaaacaattttatcccaatttattgactgaagatttcaagaaagaactgaaaggaataggacaaagggcaaccgcagctttatttttaaaaaaatatggtatttatacagccttaaataaaggaaaaagagaagaaaaaaagctccaagcctataagtggagaagtaaatccgtttcggaaaaaattcccgtagaagaattggcctatgttatagctgaaataaacagccatattactaactcgagcggatatttgggaacaatcagtgatcgtagtaaagaactgtattttaaccaacaaactataggtgaaaatctttatgctcaagtagctaaaaatactcatgcgaagttaaaaaaccaggtatttctacgtcaagattattccgcagaatttgaacaaatatgggaaactcaggcgaaatttcaccctcaattaacccctgagctaaaaaaaaagattcgtgattccatcattttctaccaacgtaaacttcgctctcagaaaagattgattagtatttgtgaatttgaaaaccgggaaattgaaattattaaaaacggaaaaaagaaaaagaaaaaaattggtttaaaggctgctcctaagtcttctcccctatttcaagaatttaagatatggcaggtacttaacaatattgttatcaaacaagaaggaaaagatcgactgcttacttgggaagaaaaagaattgttatttacagaactgaatataaaaggcaatatatccggacaaaaagcattagccttattaaaattatcccctaaagataccaaaataaatgttaccatattggagggaaatcacacccaggaacagctttaccgagtttacttgagaattttgggaatggaaggatatgatgtttttgatcttttaaaaataccggaaaatcaagatgaaataaaaccggcagatagtaaaatctctgctgcagaaataaaagaaacggtaaaatctgtctttaaaacttgctccatttccccttctattttagattttgacccacttcttccaaacccggaatttgaaaatcaaagctcatatcaactctggcatttattgtattcctacgaaggagacagttcgccctccggtaatgaaaagctcttggaactgttaaaaaataaatttggatttaaaaaggaacacgcgttactattagcttcaatctcatatacttatatatacggaaacctgagcagtaaggctatgcgaaaaatatatccgtacagtaaagaaaatacctatagtgaggcttgtatgttggcagggtacagacattctaaaaatgccttaccccgtgaggaattggttaagtaccaattaaaagatcgactggaaatcttacctaaaaattccttgcgaaatcctgttgtggagaaagtactaaaccaactgattaatcttgtaaattcattaatggatgaatatggagcctttgatgaaatacgccttgagatggcaagagaactcaaaaaaaatgcgaaagaacgggaaaaatggtcaaaaaatattgcagacgctacatcccggaaccaaaaacatgcagaaatactgaaaaaagattttaaaatctctaatccatctaagaacgatttgattcgctaccgattgtatttagaattgaaagcaaatggctataatgatttatataccaatacatatatagatataaattatctctttacccatagatacgacatagaccatatcattccgcaatccaaagttttggatgacagcttttccaataaagttttagttccccgacaggcaaaccttgaaaaaagtaatttaactgcctttgattatatatcccaccaaggaaaagaaaaagaagaacactatctgaatgtgattacagaattatataagagaggttctatctccgaaacaaaatataaaaatttacaaaaaaaaggaaatgagataggagaaggatttataaacagagatttaaagaatactcaatatattgtcagaaaagctcgggaaatactttctttaattactcccaatgtggttaccactaccggggaaattaccgccaaattgcgtaaagattggaatttaatcaatagtatgaaagaattgaatatggataagttccgtaacgccagactcacggaattggttgaaaattccagaggagagaaaaaagagattattatcgactggaacaaacggaatgatcagcgtcatcatgccatagatgccttagtcgttgctttcacaacccgtaatcatgttcaatatttaaactatatgaacgcacgggaagatgaatcacataaacaacattcacatattctttccattgaaaagaaaattaaatacgataaattccatgaaaatggttcccgacaatcccggtttatctatccgacctctaattttcgagaggaagccaaaaagaaattaaaagaaattttggtttcttataaaactaaaaataaggtggtaactgttaatataaataaacctaaaaagaaaggaggatattcacccaagcatgaactcactccaaggggacccttgcataaagaaaccatatatggtatgataagaattttacacaccaaagaaataaaagtttcttctaaactcaattttgaaactgttgtaaggatacaaaacccaaggtacagaaatgctttattagagcgattgaaggataatttcaatgaccctaaaaaagctttttcgggtacaaattcgttaaccaaaaatcctgtttttttgactgctaattctactgagacagtacctgaaaaagtaaccatacaatggtttgaaaaggtttatacgataagaaaacctataaatcccactaattttaaaaatgaaaaaaatatagaaaaagtgctggaccccaccatccggactcttttaaaaaaacgattacaagaatacaatggaaatgctaaagaagccttttcagatttggagaagaacccaatctggttaaatcaagaaaaaggcatttgcatcaaaacggtaactataaccgggattagcaatgtagaatctcttcatactaagaaagaccatttcggaaaggagcttttagatataaacggcaatcctattccggtagattttgtaagtacaggaaataatcatcatgtggctatatatgaggattcagaaggaaatttacaggaaaaggtggtcagtttttacgaagctgtcgaaagagttaatcaaggacttcccgtaattgacacgttatataatttggatttaggttggaagtttctttttaccatgaagcaaaacgaaatgtttttatttcctgcagatgattttgacccgaatgatatagatatatatgatgagaaaaatttaatcttgatttccaaacatctatttcgagtccaaaaattatcttctaaagattactgttttaggcatcatttggaaaccagtattaatttcaacgatcctgccttgaaagggataacctggagaagagaaagccctaacggacttagaaatctagttaaggttcgtctaaaccatttagggaaaatcgttcatataggagaatagcaaaaattatgataacccgctctgtttacattggaaccccgtcttatctcaaacttaaggacgaacaagtatacattacagaaccttcaaccggtaagaccaaaggaaaaatcccgattgaagatttaggcttattaatgctggaccattttcaaattaccattttccatcaactcatacaaaagatgatgggaaatcatgtggtaataatcagttgcgatgcacttcatcttcctcacggaatcatgcttcctctgtatggtcatacagaatactccgaacgcattaaaaatcagataaacatcagtgtacgactaaaaatcagctttggaagcaaacggtggaaaataaaataaaaaatcaaaaagaagtacttaaaatgttgggaaaatattttgaacccatgcaagaatatcttgaaaatgtttaaagtggtgatccatctaatagagaaggaattgctgctcaacattattggaaacacctaatgggttccgattttatgagaaaacgtatggggaattttcccaatccattttttaattttggatatgccgttttacgaagcattattgcccgttcattggtggaaaccggtttacttccagtgttgggcatatttcataaaaacaaatataatccgtattgtttggcagatgatatcatggagccctatcgcccttttgtcgatttaatggtggtaagatggctggaaaaaaatcataatgctgatgaattaaccagagaatttaaagcctatatgcttactattgcaacgatcgatttaaatattaatgaaaaaataagacctttacttgtagcagtaaaaataactacaagctcactttataagtgtttcacgggagaaaaacgtttgataagctatcctaaattagtatgatatccgaacggtataatgcttatagagttatgtggatcttggttttatatgatttaccgactgaaactaaagaaaatattcgagaggcagctatttttagaaaacgtttattggataatgggttttcattacttcaattttcaatgtatataagacaatgtcctagccgagaaaatgcagatgtacatataaaaagagttaaatctatccttcctcaagcaggtaaagtagctattatgtgtataaccgataaacaatttggagatattgaaatatttttttccagaaataaagaaaatcctccttctccctaccaacaacttgagttattctaatttatacatctctaaacaaacaaaaaacccattgataatcaacgggttaaatattgaggctgtgatgtatcactacaactaaaaaaatttgaaagcaattcacaacgatattacttctgtgttagcagaaggtaacgctgtgatgtatcacaaaaataaaaaaatttgaaagcaattcacaacaatatgaacaaagaaagtattataatgttcgctgaaatatattgcaaaaataataaaattcgaaaataattcataatgcatcaggaaaaatttttaataaagcatgttgttatgtatcattacaactaataaaacttgaaagcaattcacaacactaagtatacttcttggtaataaattaaagttgtgaattatcactaaaataatatatttaaaaagcattcaatcttaatattataccgaatactaaagataaaaatgatttcaattttgcaaatatataaaaattattttttttatctaataacataataagtacactctttttatacatcaaaacaaaagaaaaaaaacagaaaaacaactaaaaattagcgctttatatatataagtgttaaaatcatcttattttggaataatattttaaatcagtttatatatttgcatttatgttttttagtagtaacattaaggataaaaattctaaagcaagggccggtattttgcaaactgatcatggtaaaatagaaactcctatttttatgccggttggaacggtagggtctgtaaaatcagttcatcagagagaattaaaagaggatattaatgctcagataattttaggaaatacctatcatctatatcttagacctggaacagatattttatataaagctggcggattacataaatttatcaattggaatcgtcctgttcttacagatagtggcggttatcaggttttttctctttcacaaactagaaaaattcaagaagaaggggtaaagtttaaatctcacattgacgggtcataccatttttttacgccagaaaaatctatggaaattcaacgttttattgggggagatatctttatggcttttgatgaatgtactccttatccttgtgattattcgtatgctaaaaattcgttaacgattacacatcaatggctgaaacgttgtgtgaaatggtgtgatgaaaatccggagttttataactacaaacagcacttattccctattgtacaaggaagcacatttgacgacttacgtaaattttctgcagaatttatttcttctgtccatgctgatggtaatgcgatcggtggactaagtgttggtgaaccggaagaagaaatgtaccgaattaccgatttggtaaccgatattttacctcttgataaaccacggtatttaatgggtgtaggtaccccctggaatattctggaatctatttctttgggtattgatatgatggattgtgtaatgcctactcggaatgcgagaaacggaatgctatttacttgggatggcgtcattaatataaaaaataaaaaatgggccgatgatttttctgaattggatactaagggaactgcttttgttgatcatgattactccaaagcgtatttaaggcatttgttttctgctaatgaatttttaggaaaacaaattgcttctgttcataatcttgctttttatttggacttggttaaaactgcccgaaaacatattatagagggtgattttacaagttggaaaaaatctgtaattccgcagctaagaaatagattatgatcactattttggatcgatatattattcgaaactttctggggaccctgtttttcatgctgctgctgttaattgctgtatttgtcatcatcgacatacaaagtcattatcaggaattcagcgaaaacggattttccgtgttggatacgctgaaattgtactatccgttttatgtcatatgggcggtgaatgtctttgcttccatactggtttttatttcagtaatttattttacttctcgaatggcaaacaatacggaaattgttgccattaccagcgcaggaacaagcttcttcagattttcacgaccttattttatagtcggattcatgattgctttaggttcttttatgaccaatcatttcctacttccttgggcaaatatcaaaaagaatgaatttaatgtaaaaattcttaccggaaacaaaaaagatgcttatatggccaatcaaaatatatctgcacaaatttctccttcagaatatatttttgtaaacagctataaccggcaaatgaaaagaggtaccggatttttatatcagaaatttaatgaaaacaggatattacttcatgaattacgttctgctgaaatatattggtcagaagaagacaatacctatgtcttaggcaattattatgaaaagaaaatgtcttccaacgggaacatatcatcattaaataacggacgtattttaaaaaaacattttaactttacacctgatgaattattacctgaagccttcgtagcagaaactatgaatactcccgaattaaaaaaatttataaataaagaaaagttaagaggagctaataatgtaaacatttacctcaatgagcttcatcaaagaaccagttcttcaatagctgtaatcatccttacttttcttgccttatctctttcatcaatcaaaaaaagaggaggattaggaattaacttagctataggaatatcctgtgcttttttatacatattttcttttcaagccttacaagtattttcttccaaaggaattttacctccttggtttgccgtatggcttcctaatataattttcggtataataactttaattctttatgtaaaacgtgcgtatgcataaaaataatatttaattctattatggagaaaaaaaaaattgttaattttatagcatgtataattggtgtctatttaataatccgttcatttttctggtatacccgttctcaaggtgatccttctcaaaataaattttttgctataatttatttttgtattggaatattagcaataatcattcagttaatcgtaaattatattaagaaaaagaaataaattgcaatggcaatcaacattcttcatatagaaacttcttcaaaaaactgttcggtagcgattggaacagagggtaaaataaattcttattgtgaagaaatataccaagattataaacatagcgaaaatcttcatttatttatacaatgggctcttgaaggtgcaaagcttacgctttcggatattcatgccgtatctgtaggaaaggggcctggatcttatacgggtttacgaataggagtagctgcagccaaaggattttgttttggaaatgatatcccgctaatctccgtaaattctttgtatatcttagcctttccctatttcaattcagaatatgattatattattccggtaatggatgcaagaaggatggaaatttacacctcagttttagataaaaaaggggaatatcttgtagaaactcacgcacatattttaaatgaaaaatcttttgaacaactaaataataaaaaaatattatttgtaggggatgccgttgaaaaaacagaaaatttcttgaaaggaatttcttttcatatggaaaaagctacctttgttaatgcttatccacaatcaaaaaatatgattgacatctcctataaaaaatttcaaaacactatttttgaagatgtcgcttatttcgatcctttttatttaaaaaattggaaataaatttcttaagtttaatatttttatcttacacgtaacttaccttataatttttacaagtaaatattattgaaaagatttacattatactaaaactgtttaatatctgttggtaaaagactttaattggttttacttatttttataatactattaaaattattttttttataaaattatttctataaaatgccaactattattttaattcacacatattctaccagaatctaatagtaattatttatataattataattaaattaatgattaaatagattattttatatgaaattttcaattaacatcttaataataatataaaaatatttgtatttttacaaaattgtgagtgtgtaatcagctttagtttatgtcatttaaatagttttttattgtgctctatgatatttgttcatccattgctatttaaatattctttattaactataaacctaattatattacctcattcacatggataatttaattgattatataattttttgatcaatagttgatatatgaaacatttatactttgttcttattttattgcaaactataggcattggatccctttgctcacaagagaaaaatccaatacttacagaaccttatgaaacacttaatgacagaacctatcagcacctaattatgtatggacaaagtttgtccaccggtgcccagtcttatcccgctttatccactgaaagcatagagggtaattatatgataggagatcaggtctggattaagcagggaaataccaatttcacagaatttaatccgctcaaagcttctactgccattatgtaccaaaattacccaaaaaacagggcgtccatcactttggcggaaactcctttggttgggttagtgaatcatttacaattaaaacagcccaaagcaaggattaaatacctggcttcttccgacggagaaaatggaaaaagtattgaagctttatctaaagaaggatattttagcaccaactactataaagaacattttttaaaatctattgaatctgctgccggaattgcaagatcaaacggttataaaatggttactccggctattttctggctgcagggagaatataattactttaccattcatgatgataatactaagggggcaacacttgacaaatttggatacaaaaagctgttagttgatttaaaaaatgatatgcagaaagatatcatgaatacttacggccaaactaagaaacctgtttttattacctaccaagtaggatcactgcgtaaagatgacaatctcaacattggacttgcacaattagagttatctaatacctatgatgatattattaatgccggtcccatctatcacttgccccatagaggaatccatatggatgccaatggatacagatggtacggtgaaatgttggcgaaagtatattataaaacccaagtgttaggtgaagactttaaacccttacaacctaaacaaatttatcgtatttcatctaagtctataggtgtcgtatttcatgtaccccaaccgcctcttgtatttgatacaaatttagtacaagctcttcccaattatgggtttaaattaaagaataatggagtattacaaaatatttctgatgtaaaaatcgattcaaataataatacggttataataagttgcgataacgatattatcggaaatgtagaggtaatatacggacagcaagatatatatcttaatggtaaattattgataaaagccggaaatctaagggatagtgataattatcctgccttttttacttatgttgatttagatgctaaaaaggatggagaatatatttatccaagagaaaaatcagaaactaccttaagacccgacaatgaacctaaagataaagacggaagctttttacatggtaagccttatccattatataattttagtgtagctttcagttatacacttgatgcaaatagaacctctgtttttatgcctagttttagtcctaaacaagatattttatacgttaaaaaaggcagtaacggagacgggagttcttgggcaaatgcattaggtgaattagcagatgcattaaagattgccggagaacaaaatttaggaaataatatatttgttaagcaaatttgggtttcccaaggaacttattctcctttatatgttgcgggagatggaggaaatcaggtaaatgatcgttcttttgtattaccgaaaaatgttgaaatttatggcggtttttcaggaactgaaacttctgtaaatcaaagagattggaaaaataatgttactacgttgctgggggataatgtttatcacgttgttatttcatccggagatgttggaaaaactattctagacggctttactattaaaggggggaacgcaagtcttcgtagcgataattgcttaagagcttttaaagctccgtgtcacataattgtaaataatagttggatctataccggatacggtggaggaatatatctttccaattcatcgccaaaattaaaaaatttgattgtttcggaaaataatgccgtggatgccggagggggtatactaattgatgtatccaactcttttttaagcaatattactattaccgataataaattgatcagtgataaagccataggggggggcggtatttatacctataaatcatctcctgttttacttgatgtttctatagttaacaacaaaatagaaacattcaataataatgctgttggtgccggaatatttaataaagaatcaaaacaacctacactgactaacgtgatcatttcagacaacagtatcattaattttaaatatagatatttggtaggcaaaggtgggggtatttacaataaaaactcgagtctgcttttaactaattcgttaatcactagaaacaagtccggcgaaggaggggggatttatattgatgaatcagaaaaatctgtatttactaacctaactatttccgataacgaagtttcaaataataaaggtagtggtctttattgtaacaacgctaaccctactattaacaatagtattatttggggcaataagcccaatacatccaataatgatttaaataatgctcctatttttaactacagtttagttgagtataatacttccaccaataacaataatataaacggccaaactgatcctttattcgaggaaggttataaactaaaccccaatagtcctgtaataaacaaaggtaacaatgattatataaccagaatcaataaagatttagccaacaaccctcgagtagttaaaaataccattgatttaggtgcttatgaatatcaaaatgaagtctcttgcgttagtttaagtaatatattaatcaatgatacggaagtaacgtatgatggaacacctaaagaaattattttaaacaatctacccgatcatataaccaaagaaattaaatatagaggtattgaaaatacctcctttgaagagagctctcaagctcctactgatgcaggaacttatttggcgatcgttaatttaaaagataattctatatcttctgattgcgaaataactcttacggcaaatttgattattaataaagctaataccgaaatagtttcagacgacttatttatttatacatatgatggaaaaggcaaaaaagtaagtgcttccattaatcataccgcttcttcaattacatatgaacctcaacaagaatatgtaaatgccgggggatacaccattacagcaaaatctgctgaaacacaaaattatctttctgcaaaaaaagatattatattggttataaacaaaactaattataccggaatatctctacctgaaaaaacaaccacttatgatggatctgaaaaaaatattgaggttatgggttcacttcctgaaggaactgaagtagtttatgaatacgaaggaattaatacaacttcctatcctaaacagaaaaacaagcctgtaaatgcaggaacctatcttgttacggcaacactaaataatccaaactataatactttatccttacgtaataatttaattattaaaaaggcagaatttaccggtattgaacttaaggaaaaaataactacttacaatactgaaaaacatggcaatgctataactgtactagataaactcccagataatactgaggtaaaatatgaatacgaaggaattaataacacttcttatccgaaaaatactgaagaaccgattaattctggcatatatcaagttacagctacagttaccaatagtaattacaacacactgattctgactaataaccttatcattaacaaagcagaagcaattatctccgctgaagatacacaaacattcacttatgatggttctgtaaaaaatatatccgcaacacttaatcattcggaaaaacaacttcaatatttccctcaagaaggatatataaatgcaggagattatgaaataacaataaaagcacctgaatcggataattacaaggaagcaattaagaaggttttgctaaaaataaaaagagcaaaaactgtaattactgccgaaactatacaaaaatatatctatgatggatctgaaaaatatattattgcctctattaatcataaggaagcttcccttaattttgaacctcaaaaaggctacactaatgccggagaatattcaataaaattaaaaacggaagaaaccaataattatgaagcagcctcgaaagatgtaaaattagttattgaaaaagcccaatctattatttctgctgaagatattcaaacctttatctacgatggaacagtaaaaaatatatcagcaactttaaatcacaaagaaacagaacttacctttagtccacaaagaggatatacggatgttggttcctatgacattactatacatgttccttcgtcgcataattatgaatctgactcaaaaacagttaagctaattatcaataaagctaaggccatgataactgctgataacatacaaacctttacttacgacggctcagt

SEQ ID NO: 2204 - DNA, 24188 bp, synthetic construct
  misc_feature 1..24188: note = Synthetic
  source 1..24188: mol_type = other DNA
ctgtaaaagacagaatggcgcttaaaatgattgaagatgctgagaaagacggacgtctgaaacctggcggaaccatcatcgaaggtacttccggaaacacagggatgggtctggctctggtcgctatccagaaaggttacaaatgtatttttgtgaccaactccaaacagtccaaagaaaaatgtgatattcttcgtgcagtaggcgcagaagtcattgtttgcccaacagatgtaaaaccgactgacccacgttcttattattctgtttcaaaaagattagccaaagaaacggaaaacggctggtatgtcaatcaatatgataacctgtccaacagacaggctcattatgagagcacagcaccggaaatctgggatcagacagatggacagctgacacactttgttgcaggcgcaggaacaggcggaactgttacgggctgcggaacattcttcaaagagaaaaatccggacatcaaaatcatcggcgttgatacatacggttctattctgaaagaaatccacgagactggagagatccatctgaatcatgcctacacctacatcacagaaggtatcggcgaagatatccttccggagaattatgatatgagcgtgatcgaccacttcgaaaaagtaacggacaaagacggcgccatctatgcgagaagactggcaaaagaagaagggatcttctgcggttattctgcaggaagtgcaatgtctgctttggttcagatgaaagaccagttcacgaaagatgatgtgatcgtcgttttgctacacgaccacggaagccgttatgtaggcaaaatctacaatgatgaatggatgaaggaaatgggttggctggattaatgaattattaatgagaaattataaaaaaaccgctttcgggagatggcggttttaatttatttagcaattacggtaggtggtctcctgtagctattcattttatttttattaccaataatttgaactttatcatcaatgtaaagaattttcatatttagattgatattccttcttagatcaagtctggttatatcattattattaattgtgatttgaatcaattctggattatttgataaatcaagttccttaagtctattattatcggcaactaagtactttaatttcagaaattttcttaaatcaaggtttgaaatttgattatccattaaatcgagtgattcaatatttggacaatttttaatcattacctcagtaatttgatttctaccacatgctaattcttgtaattttggaatgttagaaatttggaatgtttttagattgtttctcgcacaataaaatttagttaggttagggaaattttctatttttattttttcaattttattgttggttaatgatagatattcaagattcttaaaaaatcttatatcatttacattggtaagattttgagacatcaaacctaattctcttaaactttcagcttcttttttatcgatttttccatttttgttaaaatctaacttcggatattttcttaaaatcgctttttcaaaatattgattttcaaattttaaaacttgagaataagcaactgttaaagctgttatagataacagaaataataaatttttcatttaaatcgattttattttacctaaaaacctcaaaatccaccccgtcaaaactcgcaaaaaccatcgtcggataagaatcctgatggaaaatattgccttcgcagtcgatcccaatcgctccggcaaaaccgtcaatttctttcagttcctcaaaagttctgtcaaaagcattttcgatggttaatccgtcagttactcgggtcactattttagctgcagtcgcattgctcacaatatcttcaccaacgccggtacagcttaccgcacaaaattggttggcaaaatttcctgctacagtagccgaatcagaaattcttccggggatttcaaaaccttttccaccggttgaggtcgcaacagccagtttgccgtgtttgtcaattgcaacagcaccgacagttccttttccgccggttttcagtttttcttcgtattcttttcttcgctgcggaatttcggtagagtaatcttcaaaaccatacccggcagcatatttctttgcaccggtcccgccgagaacacggtcatcttcttttatcagttctttggcaacaagaatcggatttttcacattttggatattgatcacgccgctcattttctgagtttcgccgtccatgatcgctgcactcattcggatcacaccgtcactttggatttgcgagccggttccggcattgtacaattcgtcatcttccaaaagcgaaacagcaaatgctaccgtatcaaaagcagtgttgttctgaagaaactcataagattttttcgcaatatctttcagggagttttgcttggcaactttcacttcattgctttggctgctttctgagaagaatccgccatggattattattttcattttttattttatttgtgatcaaagagagaagacatgtatttctctcacagattaagcaaattttgcagactgtttttattattaatctgcatgatcttaagatttgtgagagactaatatgactaatgaaaatcttaattagctattcgggatcacctgcgggatcggattatactgggagttaacaatcgtcatttctctggatttcagatcaaaagtatcattcatcgagagtacatccacaatcagattctgaatagagatcggctgtcccagttcgatattagtgaggttggtatccttgatctgaaggccatccacaaggatgacaagtcctgaacctatcgccgtcatggtatcttccacgatgaaaagacctgtatcttcacccaggccgatacccagtgttctcggattgtttacaacggcctggaacagtcttccgatccttccgcgctgcacaaaatgggtatcgataatcacattttctataaaaccaagaccttgtgtcgttttgatttcgcctttcaaaagggcttctgagctggaaccctgatagatcatattttccgaggccgccgctgctccggcggaagttcctgcatagataaaatcttctgtctgatacttggtcagtatcgcatcatggaatcttgttccgccaagaatcgaagtcagccgcagttggtcgccaccggtgaacatgacgacatccgcagcgttcgctcttgccacaatggcatcgctgttggcctgctcacggttctggatgtccatgatgttgcagttttttgcgccgagatattcgaaggcttttttatattccgggccgacaatgtcgggaatctgggaggcagtggtgatcacttcaatgaccgattgttctttcgatttcgattcatcgatgatttttctgaggataccccgttcaaaaaaattgaggtttttctcaacgttttgatcaaaatcagtttccgtaaaacttcctttgtttacagccccgccgatgatgaccagttttccttttgatttcatagtaaacaaaaataataaatcgtaacagaataaacctaatgtcagcgtactaaaaatttggattataatttaaacttttaatacttgcgggcatatttctgaaaatcaatgattttaaattaacgaattgttaattattttgaacatatcataaaatattcattttatattaaaatatttatttctgatttttcttgattttaaagcttttctattatctttgataaaatggaacgattattagtagcgtatttgttattggaaaggtttatacagcccatcaataatctggcttcgccggacagaatggctttacgaattctgaacatatcctgaataatttgcattgaaaatcaactcatctactagctaaaatatgaaaatagagaaaatacaggttttacgtggtccgaatatttggagcataacccggaaaaaactaatccagatgcgtcttaatctggaggaagtcgaacatcagcccaccaataagatcgaaggattccgagatagaatcgaggcattactgccgtcactcatttcgcacagatgttcagaaggcacagttggcggtttcttcaagcgtgtagagatgggcacatggatggggcatgtgatcgaacatatcgcattggaaatccagactctggccggtatggatgtaggattcgggaggacgagggaaacgaaaacgcccggaacgtataacgttgtttttaattatatagaagaaaaagcgggtgtttatgcagccgaagagtccgtaaaaattgcacaatgcctgattgacgggacagagtatgacatccatgcctgtatccagaagctcaaggagatccgcgagcgcgaaagacttggcccatctacaggaagcattgttgaagaggcagcttcccgtaggattccctggatcagattggggaaaaactctttggttcagctgggctacgggatcaatcagcagcgtttccaggcaaccatcactggtaatacaagcagcattgctgtcgatatcgcctgcaataaggagctgacaaaaaaaatgcttgaagatgcagccattccggttccttcgggggatctggtaatggatgaggaaggccttcagggtgtggtcagaaagattggttacccattggttcttaaacctctggatggcaaccacggaaagggcgcttccatcaatgttaaggattatgaaacagctttgacaggtttgcagcatgcacagcaatattccaggaaggtcattgttgagaaatatataaccggttttgacttcagggttctggtgatcaatcataaaatggtggctgctgcaagacgggttccggcacacatagtaggcgacggtgaattaaatatcaggcagcttattgataaagaaaacctggatccgagaagaggctatgggcacgaaaatgtactaacggagattgatgtggacaaagataccaatgaacttctggaaaagctgggctacactctggaaactgttcctcaaaaaggtgaaatcgtttacctgaaatctacagccaatctctccaccggcggaacttccattgacgtcacagatatgatccatccggaaaatgtccagatggcggaacgcatctccaggatcatcgggctggatgtctgtggcattgatatcatggcagaaaacctcacgcaacccttgaaagagagtggtggtgcaattctggaggtcaatgctgcgccgggattccggatgcacctggcaccaagtgaaggcctgccaagaaatgttgcagcaccggtagttgatatgctttatccgccaggaaaggaattcaggatcccgatcatagctttgacaggaaccaatggaaagacgacgaccaccagactgctggcacatatcgtaaaaaataatggaaaacgtgtaggatttacaacttcagacggaatttatattcagaatacattacttgaaaaaggggataccacagggcctatgtctgcagaattcatcctgaaagacccgactgtagaatttgcagttctggaaacggcaagaggcgggattctccgttcaggattaggattcgggacttgtgacatcggggttttaaccaatatcaaagaagaccacctggggataagtgatattcataatcttaaggatcttacaagagttaagcgtgtcgttctggacagtgtcaaaaaagacggatggtgtgtcctgaatgccgatgatgagtattctatgaggataaaagatgacctgcattccaaagttgcattgttcagtctggacgaaaataatccgcatatcagaaagtttgcgaaagaaggaaaaatcacctgcgtctatgaagaaggctttgtaaccatcaaaaaaggagaatggaagatccgtatagagcgtgtgaagaacatcccgatcaccatggaagggaaagcgcggtttatgatcgctaatgttctggcagcgtctctggcagcctatgtttatggatttgaaattccgaatatcgcattagccttaaccaccttcatcccaagtgcacagctgacaccgggaaggctgaatgtttttaaattcaagaacttcaaggtgatgatagactttgcacacaatcctgcgggttatgaagccatagaggactatcttaaaaacgtggaatccaacaagaagatcggtatcatctccggcgttggtgacagaagggatagtgatatccgggaatgtggcaagattgcggcaaggatgtttgaccatatcatcatcaggaacgaaaaacatctgcgcggacgaaccgaggaggagatcaatggactgattatagaaggcatccatagcgttgaaaaaagcgtcagctatgagatcatcccgaaagagatcgatgcgctaaagcattctatgagcctggccgaggaagggaccttcatcacggcgctcagcgatgtgataaacaatgccatagagatcgtccaggaataccaggcgaaagagcttcaggacgaataatactgcagagtgaaaaataaaaggctgtctcattatggagacagccttttttgtattgataaatattagttgttttttgtggcaaccactgcataaaccattgggatcttgtctcccagatgttcgatccggaattttttaggctcatattcgatggttttattgaagcagttgtaaggtgaataatcatactcctccagagtgttcaggctgaggccattgcggatcaggctgttgaccacctcgctcatactatggttccacatgacataatcctgtgtgatgtccgctgtcttgtccgcatatgtgccgctctcggactctataatcgcccccgaattaaaataacggtagaagatcgtttcaaaattatcatcaaacatccacacaacagggtggaactctacaaatacaagtctgccgccaggcttcaggaattttgaaatcacctttgcccacagatccagatccggcagccagccgatggtcccgtagcttgtatagaccatatcaaattgcccatccagatgattgggcaggtcatacacatcacagcagatgaaccgggtatcggaaccagtgtctttggcgatctgcagggcattttctatagctttatcagagaggtctatgccggtagcttttgcgcccatccggctcagggatatcgtatcctgtccgaagtggcattgcaggtgcagcacggatttcccgctgatgtcacccaacagttcaagctctatgctgttcagggaggtgttccctttcagaaagccgttcatgtcatagaagtcagacttcagatggctatctgtcctgttgttccaggactggcggttgatttccagataattatactctttattcattacgctttattcattagttggttgatgtcctgatattcacattttattgaatagctgaactgtgttccggatcaaagtgtcttcagtggctttgttttctctttttataggtcagcagatagttccctttttcagagcttttggagaaattaccgctaagctcccagagatagcgcgcattggcacgtgcttcctcattgctgaagttttcatattctattctgtatatcgagctgaacagcctcgaacggcccacgccatggtggcaatggatcagtaccggataatttttcggatcgtccatgatcttcaggaacctttttaccgtgctgtcctgcggtatctggtctgtgggaagattgtaataatggacgccggggatatgattgacagcatgttcctcagcattcacctgttgttttgtttccgggttcagcgtggtttgcaggacgccgtcacgcaggtcgataacagttttgatatggtggtctccgaggatggcgggcagcttgtccggcggaatcacaccggaattataaaccctgttatccgagatggttaccatattgtagcgcatctttttctgataaaaaacaaaagcacagatcacaacagctgcagcaatcagaaggattgctgttgttttaatcgctttttttctgacggtagaagccatctatttttcagctttctttttataattcctgataaatacaaaaaccgcaaaagtaagggtaacggcatacagtacagacaacgcaggcttctcaacggtcattgtattgaagtcgatctgcttatagagtgcaaatcccacgatgatggcgacgatagccatagtgaacaatggtgctttgttattttccatagtcgtagatcagttagttatgattaaaagtatccaaatatacaattaatcacgattataaaaagctgcttagtaaagcggttctgctgatcctgcccacggaaagcatataggggattttcagtctgtgataatgacagtttttgcccggaaagcgccgggtacaatgtttaagctttataatgctcatttttgatgaatttgattggtggttatttaataatatttttcttatatttatataatgatattttaagcaattgcttttattctgaattatttaaattaaaaacacaaaccatgaaaaaacaagacgaatactcttctgacagagatacttttttagggatgtttgctgagatcatttcatacctccgacaattggttaacaaaaaagcgaaaaccaaaaatctttatgacactgcagatgtcaaacagttactcaaagccagcgacagtactgtttaccggttgcgaaaatccggaaaacttaagtttatcaaaatacgcggcaggatatactacacaatagcttctgtaaaaaagctgatgaagggaaagtaagaaattctttgattttcttcgggtcttcttcgggtcttcttcggatcggcttcggaaaaaacatcttttttccgaagccgatccgaaggaatgtggtagatgatccgaaggaatccaaaaactaccggtcaattgccgtcattaccagtcatcccctgtcaaatgccgtcaggggtgtacaggctgtgcatttgtgtcctaacttcgtcctacttaatcttaaaaattattagatatggcaacatttaacaaaggaatcctcggtgggttctcaggcaaagtaggaactgtagtaggcgctaactggcgtggcaaagacatcatgcgaagtcttcctaaaccatctcagaaagagcctaccgaaaaacaactgctccagcaggccaagttcaaactggcggtggcttttttgctcccgctcaaagccatacaatcccggtatttcgggtcgggtagtggcgtaaaatcgagagtgaatatggcaacatcatacactatcaacgaagcgatgcgtgtagtagcaggtattccggaactggtttacaacaaggtgctgatcaccagaggtgaactgactggtttccagaacgccgtgcttgctacgcaggttggctgtgttctaagcctggaatgggaagacaacggcaatcagggcaatgcgaaagctaccgatgaagtgggtatagtgtgttattgtaaagagctgaagctcttcgatatcttcgaaagtatggtcatgcgctctgatctgatgctggatgtcacgctcccgaattattgtatcgggaagactgtagaggtctatgcttatctcaacaatgataagcagacctttgtcagcaacagtttttatctgggcgagcacacggttatttaaatgaaggaatccacttgaaagagtggatttttttgttttggggtgtgggtataaaaaagggcgagttgccccagcttgaatgttttgttatttactgtatattgttttaaaaggaattcacgaaacatttaaaataaaaaatgccccacaggtaggcgaggcgctaaatgttttcacaacggaataatccttattgtgaattgctttcgaatacaaatctaaaacttatttttttaatagaattacggaaaaccgcatttctgtgattttttttcttcttaattttaagagtttcaaataaacgacatagctatgataagaaatatacttggattggacttaggagtttcatcaattggatgggcttttgttcaagaagatgagaagaattcagagaataataaaatcattaagttaggtgttcgtgtgaatcctttgacggttgatgagcaaatcaattttgagaaaggtaagcctattactactaatgccaatagaacattggccagaagtgccagaagaaatcttcaaagattcaaattgagaagagaaaatctgattgatgttttaaagaaaaacaatattcttaaagaaaccgacttattgacggaggttggaaaaaattctacatttcaaactcaggaaataagagcaatctcggcaaaagaaagaattgaattgtccgaatttgcaagagtattaattcttatcaataaaaaaagaggttacaaaagcagtagaaaagcaaagaacgaagatgaaggtcagattgttgacggaatggctgtggctaagaaattatatgaagaaaatcttacgcctggagaatattcttaccaacttttggaagaaggtaagaagcaattaccggatttttatcgttcagatttacaagcagagttcgacaaggtttgggattttcaaaaacaatattatccagaaatcttaacagatgttctttataaagcattacaaggtaaacctaaaacaggaacttggacaactttaaaagagcctttttctcttgttggtatcaaacaagttgggacgatgcaagagaaaaaggtagaaaaatatttttggagaagcgaagctgttaaaaaacaattagatcttgaaagcttagctatcgttctccaagagataaatggtaatctgtatagctcaagtggctatcttggcgctatcagtgatagaagtaaagaattgtatttcaataaccaaactgttggcgaatatctatatcaacaactcaaagtaaatcctcatacgaagctgaaaaatcaggttttctacagacaggattatttggatgaatttgaaaagatatgggaaactcaagcaaaatatcacaaagaattaacgaaagaattaaaagaagaaatccgtgatattgttattttttatcaaaggaaactcaaatctcaaaagggattaatcagtatttgtgagtttgaaaacagagaaatagaaattacagaaaacggaaaaactaaaaagaaaacggttggtttaaaagtagcacccaagtcgtctccgttatttcaggagtttaaaatttggcaggttcttaacaatttacagtttcaaaatgtagaaactaaagagattttcccaattgacttagactttaaacaatccatttttgatgaagttaatattaaaggaagactttctgcaaaagatgttttagatatcgttggctattctggtaaagaatggaaaacaaattttaaagatattgaaggtaacaataccaatgagaatctctacactgcattcctgaaaatcattgctaatgaaggaatacaatttccaaaagaatttaaactgactattgatgatgagattaaagtttctaaaattcattcttctgctacagttataaaagaattcgtcaaagaaaagttatcagaattagggattgatatttctatattagatttcaatccagaattagatggaagtgattttgaaaaacaaagttcttataagctttggcatttgttatattcctatgaaggtgatgattctccatctggtaacgaaaaattgtatgagcttttagaaaagaaatttggtttcaaaaaagagcattctaaagttttggctgaaattggtttttctcaggactatggaagcttgagttcgaaagcgatgcgaagaattttcacttatattaaggaacacaaatatagtgatgcttgtaatttggctggatataatcattccaaaaattcgttgacaaaagaacaacttgaaaacagagttttgaaagagcaattggagattctaccaaaaaattctttgagaaatcctgtagttgaaaagattttgaatcaaatgataaatctcgttaatgaaatatgtaaagaatatgggagaccagatgaaatcagaatagaacttgcccgtgaattgaaaaataacgccgaagagcgagcaaatatgacttctgaaatcagcaaagcaactttacttcatcagaaatatgctgaagttttgcagagagaatttggaataaaatcgccttcgagaaacgaccttattcgatacaaattgtatttggaattggagaaaaatctgtttaaagatttatatactgatgtacaaatcaaaagagatgagctttttacagataaatatgacatcgaccatattattccacaatcgagatttttcgatgatagtttttctaataaagttttagttccaagaggtgcgaaccttgataaaggaaattttacagcttttgattaccttgaaatcaaagggaaagaaagattagaaaaattcctcaacctcatcaaagaactttatgataaaggaggaattacaaaggcaaaatatgaaaagcttcagaaaaaaggtgttgatattggagatggatttatagaaagagatttgcgtaatacacagtatattgccaaaaaagccaaagaaattctttttgaaattacgaattcggtagttcctacaacaggaagaatcacagataaactccgtgaagattggaatctcgtgaatacgatgaaagaacttaatctggaaaagtataaaaaattaggtctgacagaaacagtaattaattctaaaggagaagaaaaacagagaatcatagattggactaaaagaaatgaccatcgccaccacgcaatggatgctttgacggttgcatttaccactcataatcatattcaatatctgaatcatctgaatgcaagaaaagatgagagccacaagcaacataaagtgatttcaaatatcgaaaatctaataactaaagtatttgaaaagaaaaatggttctaagcaaagaagatttgttgagccaattaagaatttcagaatagatgcgaaaaagcatttggatgaggtcttaatttctcataagactaagaataaagttgttacgaagaatattaataaaattaagaaaaagggtagtgtttttgcaaaaacggaacttacaccaagaggacaacttcataaagaaaccatttatggaagttcgaaattcctaaaaactaaggaagaaaaagtatccggaaagtttgatttagaaactataaataaagttcagaatgagaaattcagaaatgctttattagaaagattagaggaatttgatggagattcaaaaaaggcatttacgggaaaaaatgttttagctaaaaatccagtttatttggataaagcgaaaactgaacaggtacctgaaagtgtaacattagcttggtatgaaacggtttacaccataagaaaagccgtcaatcccgataattttaaagattttaagaatattgaaaaagttactgataaaaggttgcgtgatattttgaccgaaaggttgaaagcatttaatggaaattccaaggaagctttttctgacttagaaaagaatccgatatggcttaataaatccaaaggtattgctgtaaagaccgttacaattacgggaattagtaatgcggaagctttgcattacaaaaaagaccattttggaaatgaaattttagatgaagatggaaataaaatagcggtagattttgtaagcacagggaataatcatcacgttgccatttacgaagatgatgctggtaacttacaagaaagggtagttagcttgtatgaagctgtagaaagaattaatcaaggactttcagttatagataaagattttaaccaaagtttaggatggaagtttcttttcacaatgaagcaaaatgaaatgtttttgttcccgtcagaagattttaatcctaaagagattgatttgctagatgaaaagaatttgagcctgatttctaaaaatatgtttagggtacagaagtttacaatcagagattattttttcagacatcatttagaaactactgttgaagataattcgacattaaaaggtattacttggaaaagagagggattgaatggaattagagattttctgaaagtaagactaaaccattcaggtaaaatagttcacataggagaatattaaaacaaaataactatgataacccgctccatctacatcggcaatcctgcttaccttaaactcaaagatgagcaaatgtacattatggaacctactaccaacgagatgaagggaaaagttcctgtggaagatttgggactgttgatgttggaccattttcaaatcacggtttcgcatcaattgatacagaaaatgatgggaaacaatgttgtggttgtgagttgtgatgcgcatcatttgccacacggcattatgttgccactttatggacatacagaacattcggacagggtgaaagatcaattggaagccagcgaaccgctcaaaaaacaactttggaaacaaactatcgaatgtaaaattgagaatcagaaagaagttttggtcaaattagggaattactttgagccgatgctggagtatcaaaagaatgtgaaatcgggtgatattaccaatatggagggcattgcggcgcaacattattggaaatatctgattagcttagattttctgagacagcgttttggggattcgccaaatcagtttttcaacttcggatatgcagtcctaagaagtattgtcgcgagagcaatagtggaaactggtttgcttccggtgttgggaattttccataaaaataaatacaatccttactgtcttgcagatgatctgatggagccttaccgaccttttgtggatttattggtaatgcaatggctgaaaatgaatcctgagactgaggaattgacgaaagatttcaaagcatacattctgcaaatcgcaactaaagatgtgaggattgatgataaaacgagaccattgttagtggctgtaaaaacaacggcttcttcgctttacaaatgttatacaggggaaaaacgaatgatttcttatcctgaattgagttaagaaattatattaatcattatactttttaaattgtacagtatacaacaataaatgaatgctgaaaggtttaacgcttaccggattatgtgggttctagtattatacgacttgccgacggagaccaaagctaatatgaaagatgcgacccgctttcgtaaaagcttgatcgatgatgggtttaccttgtttcagttttcgatgtacgttcgccattgcccgagccgggagaatgccgaggtccatatcaaaagagtgaagtttatgcttccaaaagcaggtaaagttgcgataatgtgcatcacggataagcaattcggggatatagaaattttctttgccaggaataaagaagaaccgtctccgacattccagcagctcgaattgttttgatttttaaatcctaaataaacaaaaaatccactgaaattcagtggattaacttttgaggttgtgttgtatctcaaagatacggaaaaatgaaagcaattcacaacacgaaaacgatttatacgctaattgcttgggttgtgttgtatctcaaagatacggaaaaatgaaagcaattcacaaccccaaaaactacgacgataaccaaggaagtgttgtgttgtatctcaaagatacggaaaaatgaaagcaattcacaaccgactttacgctttacgcgcatatctaccggttgtgttgtatctcaaagatacggaaaaatgaaagcaattcacaaccaatggcgaaactatcagcaaagcagacttgttgtgttgtatctcaaagatacggaaaaatgaaagcaattcacaaccgccgtcaggcgaagaaacatctttcggttgttgtgttgtatctcaaagatacggaaaaatgaaagcaattcacaaccaaatacaactgtaccagcaggcagatcatgttgtgttgtatctcaaagatacggaaaaatgaaagcaattcacaacacttcctttatcgtgaaaataagcttagttgttgtgttgtatctcaaagatacggaaaaatgaaagcaattcacaacgctctactttcttaccattcattgcaatgtgttgtgttgtatctcaaagatacggaaaaatgaaagcaattcacaacattcgttggaactggatctggatttgactcgttgtgttgtatctcaaagatacggaaaaatgaaagcaattcacaacgatgctcttttgttttagcaaatgattttagttgtgttgtatctcaaagatacggaaaaatgaaagcaattcacaacacaaaatcaaattggtgcttaaaaaagatggttgtgttgtatctcaaagatacggaaaaatgaaagcaattcacaacaaatttctggatgaatccttgaagtaggaagttgtgttgtatctcaaagatacggaaaaatgaaagcaattcacaacgttttgttgatacaaatataaaacatttaggttgtgttgtatctcaaagatacggaaaaatgaaagcaattcacaactagtattccgattatctcgcagtcaggtttgttgtgttgtatctcaaagatacggaaaaatgaaagcaattcacaacaaatcttgataataacgatttaaacgaaaagttgtgttgtatctcaaagatacggaaaaatgaaagcaattcacaacaggtgtttcaccaattcctgtcgctgtgtagttgtgttgtatctcaaagatacggaaaaatgaaagcaattcacaacattgtcttaacgccttcttttttttggtatgttgtgttgtatctcaaagatacggaaaaatgaaagcaattcacaacctgcggttctgatttgttgagaaacttcgagttgtgttgtatctcaaagatacggaaaaatgaaagcaattcacaactactccgacttcattaagaagatttttacagttgtgttgtatctcaaagatacggaaaaatgaaagcaattcacaacgctctactttcttaccattcattgcaatgtgttgtgttgtatctcaaagatacggaaaaatgaaagcaattcacaacatgtggagcatagatttggatttctcaatagttgtgttgtatctcaaagatacggaaaaatgaaagcaattcacaactaatgacgaaatgcgacctgttatgactgagttgtgttgtatctcaaagatacggaaaaatgaaagcaattcacaaccataagggggttagtagcccataaaaacgtgttgtgttgtatctcaaagatacggaaaaatgaaagcaattcacaacgcctttggttataatacaagtaaaatcactgttgtgttgtatctcaaagatacggaaaaatgaaagcaattcacaactttgaactctattcaagaaattttcgttcagttgtgttgtatctcaaagatacggaaaaatgaaagcaattcacaacacaaaacaaaagaggaagtaatatcgagatgttgtgttgtatctcaaagatacggaaaaatgaaagcaattcacaacaaaagacttcactctggagggttggttgctgttgtgttgtatctcaaagatacggaaaaatgaaagcaattcacaactcaaattcaattgaactaatcccaagagcggttgtgttgtatctcaaagatacggaaaaatgaaagcaattcacaacattttcaaggtgataatcatattgaaataagttgtgttgtatctcaaagatacggaaaaatgaaagcaattcacaactatatttagatttacattaattatttttttgttgtgttgtatctcaaagatacggaaaaatgaaagcaattcacaaccaagttcgatcgtggttttaatcgtatgctgttgtgttgtatctcaaagatacggaaaaatgaaagcaattcacaactcactttgcccgattcgtcaaactccagtcgttgtgttgtatctcaaagatacggaaaaatgaaagcaattcacaacaccaaaagacccgattatcgcccaaaattggttgtgttgtatctcaaagatacggaaaaatgaaagcaattcacaactttattcgtcgaagttgcaggattcacactgttgtgttgtatctcaaagatacggaaaaatgaaagcaattcacaactttcgttccagtacgtctgataaattatgagttgtgttgtatctcaaagatacggaaaaatgaaagcaattcacaacgaaaatgcaagggttcaaataaaagaattagttgtgttgtatctcaaagatacggaaaaatgaaagcaattcacaacaaaaactgataaagttaacattgtaacggagttgtgttgtatctcaaagatacggaaaaatgaaagcaattcacaactggaggtgtgtaataataaccgcccgacgtgttgtgttgtatctcaaagatacggaaaaatgaaagcaattcacaacggctgtgggtgtacatcggatttatcactagttgtgttgtatctcaaagatacggaaaaatgaaagcaattcacaacgcttacaattgctgaccctgacgaagatacgttgtgttgtatctcaaagatacggaaaaatgaaagcaattcacaacaagctgggcgcaggctcttatagacagtaagttgtgttgtatctcaaagatacggaaaaatgaaagcaattcacaacccgcagattcttacagctgcatcaaaggccgttgtgttgtatctcaaagatacggaaaaatgaaagcaattcacaactatcgaaagcaacatcagtgaactctttgtgttgtgttgtatctcaaagatacggaaaaatgaaagcaattcacaacagggttagcgtgatgttttatttacagtttgttgtgttgtatctcaaagatacggaaaaatgaaagcaattcacaacaaatgcaacgaattaaaggacatcacggatgttgtgttgtatctcaaagatacggaaaaatgaaagcaattcacaacatctgctgaaaactttcttgtaaagaatacgttgtgttgtatctcaaagatacggaaaaatgaaagcaattcacaacatatgaatcaagaaccgatatcagaacagggttgtgttgtatctcaaagatacggaaaaatgaaagcaattcacaacacagaaagcggacaaacgattaaacctctagttgtgttgtatctcaaagatacggaaaaatgaaagcaattcacaacctcaaacaattggaggacaaaaatctgtctgttgtgttgtatctcaaagatacggaaaaatgaaagcaattcacaacgactacaaatatagcgaaagatacggatgcgttgtgttgtatctcaaagatacggaaaaatgaaagcaattcacaactggtggcaattttcccagcactatcgactagttgtgttgtatctcaaagatacggaaaaatgaaagcaattcacaacccatttggtatcttcaccattgtagattgggttgtgttgtatctcaaagatacggaaaaatgaaagcaattcacaacacttagcgtagttacgtagtggcctatcttgttgtgttgtatctcaaagatacggaaaaatgaaagcaattcacaacggtccgtgtggagctaatgtgtgaaaatctgttgtgttgtatctcaaagatacggaaaaatgaaagcaattcacaactcaattgaggcatagatttgcgaattttgagttgtgttgtatctcaaagatacggaaaaatgaaagcaattcacaacagatatatcatatagctgatccatccgacagttgtgttgtatctcaaagatacggaaaaatgaaagcaattcacaacttcaacaacaagtatagaacccattggtgcgttgtgttgtatctcaaagatacggaaaaatgaaagcaattcacaactgcgggtcatttgcttaaaaggtggtacaagttgtgttgtatctcaaagatacggaaaaatgaaagcaattcacaacactaatgagttataattggcatttgaaaccgttgtgttgtatctcaaagatacggaaaaatgaaagcaattcacaactatggctaagaagcgaggcgaggacgcaaagttgtgttgtatctcaaagatacggaaaaatgaaagcaattcacaacttaatatcggcgtaactctcattaacgtaagttgtgttgtatctcaaagatacggaaaaatgaaagcaattcacaacggttaattgttacgcaaaagtaggttttatgttgtgttgtatctcaaagatacggaaaaatgaaagcaattcacaacccggcaatttgagcaattccaacagccagagttgtgttgtatctcaaagatacggaaaaatgaaagcaattcacaaccgaggatgaatttttattgaaaatttacaagttgtgttgtatctcaaagatacggaaaaatgaaagcaattcacaacaaatagaaggtaattccatgtttccaacttgttgtgttgtatctcaaagatacggaaaaatgaaagcaattcacaacagataattacacaaattgcatttctaattcgttgtgttgtatctcaaagatacggaaaaatgaaagcaattcacaactaaagctgcaaccaacgacataaaaactatgttgtgttgtatctcaaagatacggaaaaatgaaagcaattcacaacaattcctgcatgagttccttcgtcaaatatgttgtgttgtatctcaaagatacggaaaaatgaaagcaattcacaactagttggagtggatttacatcaaaagagaggttgtgttgtatctcaaagatacggaaaaatgaaagcaattcacaacgacctattcttgataaaaacgacaattggagttgtgttgtatctcaaagatacggaaaaatgaaagcaattcacaactagttggagtggatttacatcaaaagagaggttgtgttgtatctcaaagatacggaaaaatgaaagcaattcacaacgacctattcttgataaaaacgacaattggagttgtgttgtatctcaaagatacggaaaaatgaaagcaattcacaactataatcaatatccggaagcttaatctttagttgtgttgtatctcaaagatacggaaaaatgaaagcaattcacaactctctcgataatgcacaaaaaaaagacttagttgtgttgtatctcaaagatacggaaaaatgaaagcaattcacaacgtttggcttcatatcccatagtacaacggcgttgtgttgtatctcaaagatacggaaaaatgaaagcaattcacaacaaagtcattattgcagatattcaatgcaacgttgtgttgtatctcaaagatacggaaaaatgaaagcaattcacaacgggtggctgggctattgttttaattaatgcgttgtgttgtatctcaaagatacggaaaaatgaaagcaattcacaacttgatttgataatgcccaaactatccattggttgtgttgtatctcaaagatacggaaaaatgaaagcaattcacaacatgtgatagatcataacactgaatatttttgttgtgttgtatctcaaagatacggaaaaatgaaagcaattcacaactgaaagtatagtattcccggtcaaatactggttgtgttgtatctcaaagatacggaaaaatgaaagcaattcacaaccgttatcgccacgataaagaacaataaattgttgtgttgtatctcaaagatacggaaaaatgaaagcaattcacaacaagcaaagggatgagatgagaagcctattagttgtgttgtatctcaaagatacggaaaaatgaaagcaattcacaacgttttgaaggatctttgacgtgatcggtgtgttgtgttgtatctcaaagatacggaaaaatgaaagcaattcacaacaaagttgggaagaaatgaaagcaactgattgttgtgttgtatctcaaagatacggaaaaatgaaagcaattcacaacgcttcggaagctgcagactttggattgagtgttgtgttgtatctcaaagatacggaaaaatgaaagcaattcacaacggttaatccataaaacattcagcctgctcaaaaaacaggctaaattattttttctgataagtagtcgttatcaatccaaaggctttctgccggatatgatgttaaacaataccactacaatggcaattaccaataaaacatgtaccaggtaaccggtgctcattcccgggactacgcccagcattcctaatagccaaactacgatacagatcgctgcgactaaccataatagacttctcataatttaatattttttagtgtgattgatgtgatactatcacatactgtgccttttttcattcacagcaaaaaaaatatttatttatgagaatcatgtaagtgaagcaatatcgggaaatggtcgctgtagccacccatgtaccgagatccggaataggttctggcagggaagtacagctgttggttgcctttattacgtagttttgtgttgttgtagatctcagctccgatatatttaactgaaaaaacatctgctaaagccttctccgtaaaaaggatctggtcaaacagaacccccttcttcctgtgaaaacaggaaaaccggccttgactgaaaagtaattcgaacggatttgacaatatctgatcttcatgatgttttttcagcaactgtacggattcgttatcaggattgtcattcagatcgcccatcaggataatggcttccttcctgtcatggagttctgaaaaaaggatttgcagctttttgcagatatgattccggaattcttttttaacatctctgtttctctttgacggaagatgcacagcgaagacatgaaatttttttaaattatataaaaatactgcatgcaaaacatcacgtgtctccaacgccgggtcacctgttgtaaactttagaaactcagacttctgcaatttatatttctctttatcaaacagtaatgccacgcttagtcctctggaatcaccggaagattgataaatgatttcgtaatgacggatcggagaggaaccatcagtaagatcttccagcacggactttgcgccaatttctgcaaggccgatgatggatggcagccgttgatagtcctcctgaataaagcggaaaacattgttgatcttacggatcttcagacggtatttgtaatcatcccagttatgcagcctggaactaggccatccttcttgatcaggcggatagagattttccacattatagaacatgaatgtttccatgcctgccatttctaaccctgccactttttgcgacgcatatagatgaaggttacgatcacgataactgccatcagtcccagtgtataataatagccttttttatgatgaagctccggcatattatcgaagttcatcccgtacacacctgcaataaaggtgataggtaaaaagtaaaccgagtatatcgccagcagtttcattacctgattggctttctgatcagaaagcgcaagaaacatggagatgaggttgacggtctgcgcatttacatggtcaaaatcagcgatgacatctttttgtttatcgagaaggtccatcacttcgacttcttccagcgccagtgttttgaatttcgagatccattccccggagatgttaagaattctggtattgagtcctgattttcttttcagcttatacagcctgcggatctggttcgtgtggttggtatttttcagaaagatttcgttctctatcgtatccatgatttccagcagattacggctttcatcatcaaaggttttgatgattcttaatgccagcttcagagccaggtggtctctggagatactgtcggggttttcctttttcagctcttcacagacctcgtggatgcttttgctctttgccctgtgtgtcgtgatgatcagcttcggaagcaaaaagatgcccagcttgctgctgatatcgctgatattgttgagtgtccgcctttccaagtcagtggattccctggccaggaaaaattttacatcaccgacctcttcatacttcggaaggtgattggggtctatggtatcttccagcaaaagataattgatatggtaacgctca

SEQ ID NO: 2205 - DNA, 24188 bp, synthetic construct
  source 1..24188: mol_type = other DNA
  misc_feature 1..24188: note = Synthetic
accagcaccggcgtgccaaccttgaggcgtgcctcctcggcattcaagtatttcctcatctctatctcgggattgcacatcgcctggaactcaaacatctgtttggcgggaatctcgtaatagtcgcgggtggtgcggtcgcgagtgatgaccgacatcttgtattggcaatgggtaatcaactctgccatggcttgctggcggagcgacttcttcacgaagatgaggttgctcaccacgggcctgagtttcctccggtgtttcccgttttcatccatgtagtcacgatactgcatgggaatgaagaactctagcccattctccttgaaatagtcaccaaccttggcctggctgttggaaaacagcctgatggcataccatggggcaaggtctttcccctcattgccgtcgagattgtctggagtctggtttattgtgtttacatccataaatgaatgatagacgcacatttatcaccttgtccggcctatgccctcaaggcttcaacaaaaactttcactttctcgacatcttttactgccacttcgctctcaaacttcgagttgatgtcgatgccggcaaactgtggatggctgatggctttcactgcctccacgtcgtcgggaccgatacctccactgatgaggaaggggacatcatagttgtaactatcgagcaaggcccagtcgaacttctcgcccgacccacctttttgtgcacattgattgtggaagaggaaataatccacctctccgagatagggcttgcacttgtcgaaatcctccggacgctccacattgatggtcttgatgattttcacgcctttacggatgtcgggctcaagcgtcgccctgaggttctgtatcatcaccggactctcctcgccatgcaactgcacgaagtcgagtttgaagttggccacccttgtgacgatgttctggggcatgtcgtcaacgaatacccccaccctcttgggcttgttctcttgatatctgaagatgggttttccacccagtgtcggaacctcagagtctatcgatgtatagtcggggatgaaccctccccttgaagagtactgtgtcacaaacctgggactgtctttccagaacaccagtcctatccagtccacatcgagtgcactcacctcgcgtatattctgggctacacgcaagccgcatactttaattatcatatatcttttgattctattatctggttttcttccaattcggcttttccggaaacaccggaaactggcctatcttcttttggattgcaaagttacgaaaagtcgagcgcagaacaaaaagaatcttgttctttttttatgccgagacgaagtaacttcggcacgaagtgtcaaagttacgaaaagtcgagcgcagaacaaaaagaatcttgttctttttttatgccgagacgaagtaacttcgctgcgtagcagcaaagttacgaaaagtcgagcgcagaacaaaaagaacgtgaatattttttcatttttatataataatcgtgcacaggcatcgttaataaaataaacaccaatcaatgatttgcctatgaaaatttttacccaagaagaattccaaccctctgcccgcacattgaacttcatccgtgaatttgcttacacctatcgtgtaatcgacatgaacgggcaaagtggcgtgtattgccttaactgatacattatgtctacactggtatccccatcgttattggctgccgacttcaccaacctgcagcatgacatcgacatgctcaacagcagtgaggccgactggcttcaccttgatgtaatggacggcgttttcgtgcccaacatctcgtttggctttcctgtgctcgaggcggtggcttccatctgcaagaagcccctcgacgtgcatttcatgaccgtccaccccgaggagtatatctcacgcacagcgaagttgggcgccatgatgatgaacgtgcactatgaagcctgcacccaccttcaccgcacggtggcagagattcaccgctcaggcatgaaggcaggcgtgacgctcaacccatcctctcccgtttccctgctcgaagacatcatctgcgatgtcgacatggtgctgctgatgagcgtgaaccccggttttggcggacagaagttcattgagcacaccatagagaaggtgaaacgccttcgccgcctcatcagcgagagtggcagccacgcactaatcgaggtcgacggcggcgtgcagtcggaaacagcgccccgcctggtggccgccggtgtcgacgtgttggtgagtggcagttatgtattcaaggctgccgacccgatagccaccattcacagtctgaaagtattgtaagaagaagaagaatcccccatgctacgaatgatgagcatgggggattcttgtatgctgacggttctgtcaatccagttgcagcaccatggaatgttgcttcgccatgcgccgcagattgaggatggcataccgcatacgcccaagggcggtattgatgctcacgttggtggcctcagcgatttccttgaacgacatctcctgatagaagcgcatgaacaccacctcgcgctgcgatggtggcagcatgttcatcatcttcttcacatcagcgagcacttgttcgttgacgaaatggttctccacgttgaggtcgagcaattcattccctccgaggttggaaaggtcgttgtcctcagtaggctccacgattttctccgacttctgctcgcgataccagtccatgatgacattgtgggctatcctcacaagccatgctgagaatttcccggagttggtgtatttcctctgcttgagtttcacgatcaccttgacgaacgtctcctggaagatgtcgttggccacgtcctggtctctgaccacgaacatgatataagtaaagagtttggattgtgttcttgacaacaacaaatcaaacgccctattgttaccgtcgatgtatgacaatgccaactgttcgtcggtcatttcattcaataattccattccttaaatatgttgataattaagtaatgttgttccgataggcaatagtgttaagttgttactgttaatagtgaaatactgaaaaaatggagcgccgaggcgtcaatccgttgcaaagatatagacttttgctgagcccaacaaattttcggctaaaaattttgtcgtttcggggaaaatccctatttttgcatcgataaggttcgctacacgcgattagcaaagggaacggggtgtaagtccccgactgtctcgcagctgtgaactcctttatcgccattggcacgatgccactgcccatttgggcgggaaggcgccagttggcgggagtgtagtcagaagacctgccttttcaagcctttcacaggcttgtcgtcacctctcgatgtaaggggtatgcgacatacacgttgattttcagaaactgatagtgctggggctttgctccgcgctcttatgctgcgatatgcactgtcatgtcatgtccacccgctgtggtggcatatgagcaggagaatgacaaccgaagtgtattatataagtttaattggggaaaagggcgtcgccgtgaggtgccgctcttttttcgtaaataggagtcagccttgcatcattatggccggatgagcagcgagacaagggcccgacttgtttgagccaaaccgagtcgtcaacaaataccgacaatgccaaacggcctgattctcagtgcatatgctcattcaactccaaattggaaggaataccaagcataattttttcaatttcctctggagtgaacgtgatttcgaaccgctctttcgatttgctgaggaaatagcggtagatgagtcccttgtggtcattcgtgagcgcgtcgacgagcataatcatcgagaggtcctctcctctcaggctcctctcgatattctccctgagcacaccgagtctctccctgatggtgtcgggcgagatagccgtttcatcgagggtatagacataccccacgttgtcaccttcaatgatgatatcgtcgagagtcgtcacctcgtctacatgcagcggcaactgcagcctgccggtagtcacaaaattctccaccctctttcgtgccagttcctgtgggttggccacgagcgcattcacgtttttcaggtcctcggcagagatgtcgatgatgagccgctcgtcgctctggctgtcagtatactcatacctgagattgcactttgccgcgatgaaattcgccagggtggctctatcgttggagaaattgagcagaatgccctgttttacgtctttctgatggtctttcagcctactgatattcagcacggaaggattggtggagacatgatagacaatggttctgtcatcgaggtcgacgtgtgtcacctcacccaagatgcccaagtcaatcggacattgtttgttgataatctctacctgatttttcaaactgtctacgcaccctatgagcatgctgacccataatgccatgaagagtgctgatgcaacgtattttctcatcactgtaatttttctgcgaagttaagacaaaaatcggaattatcgataatccatcctgaaaaaatcgaattgtgccttgccattctccccatagcagaagagtgccacacgtattcccttccagaaaccgctacgcatggagaaggcgtcgcctgccgccacatagtgcttgccgtcggtgctgtagtagaactggtggaggttgttcttgctgtcgttggtcacgcggaagaagagccgggcaaatttgcctctcttcaccaccacctgctcgccgttggcatccacgtagatgccctccgggcagatgccaatggcgcggaactgcctgcccatgcagcacaagccggcgcggcattcccccgcgctggtgagcatcgtggtgctctcgctggtgtagcccatcactttctgtgtgagcatgttgtggctctctctcaacccaccggcgggcagggcatggagcgtgagccacccctttcgctccgtgaggctccaatggctgtcgcgtgggttgtggttccactgccattgcagcgccagacgagtaccgccgaagtcgtcgtcggtctgccacttcgcaggctgggaatcgggataaggcgaggtccacaccgccaccggctcccctatgccgttgccgtcgatatccactcccatgagcggccagtcgtccacccatcgagccggttgcaggtgcaccacacgcccgaggacaggcgtctcctggaaatgatagaaccaccagttgccctcaggggtgtctaccagcgcaccctgatggggtccgttgacggctgtcgacccctgttcgagcaccactcttttctcgtatggtccatagatgttctttgagcgcaacacggtctgccatccctggcctaccccaccctccgggataatcaggtagtagtatccgttgcgcttcatccatttggtgccctccgccacgggtccggtgtataccgttaccccgtcgtcgaggagttgtgtgccgtcgtccgacattctgtgcacgatgatgggcccggcgccatggcggctcctgcccaggtaggccttgccgtcgtcgtcccagaacggacaggggtcttcccatttctccaccctcttcacaaggtgcagcggcgaccatggtcctgccgcctccttcgccttgctcatatacaggccctcgtcgggtgtgcagaaatagacatagaactctccgttatggtagcggatggcaggagcccacgacccaccggcgtagtgacggttgtcgtcccatcccggctcatcaaacctactgtacacttgtgccacatacttccagttgagcatatcctccgattccagcacctgcatgcccagaaaatggaagtccgacgccaccatataatatttctcgcccacgcgtatcacgtcggggtcggagaagtcggcattgattaccgggttgacataggtgccgttgccctggtcgccccaggtcaccctgttggattgtgcccatgtccaaacactgatggccatgagcaagatgatacaccgtattctcatattctcattcatttctatcttcaatgggttaccggccttcaacgtcctcattcactatctcgggccggcagtcgggctggatggtggtcacttcgaaatcggagaaccggatatggcggacgtgacgcacgaaaaagccctttgccggcaggttgccccacatcgtggcctccggatactctttctccttctcgtcggccacgcgctgtgctatctcctgcatttggtcttccgtcacgccacccttgtggtggatggtgacgtggtcgatacacacattttccacgggatgtccgggcaggccggtgatggagcaccccatcgacccggcattcctcacctggatgtggtggaggcgcaccccgtcgattctccccacgttgtctatcacctgtccctccttgtatcccctgccgcggttgccgagacggataaagatgggcgactccgtgccctcgacggtgaaatcggagatgctgacattctcgagcacacccccgtcaacaatctcgagcgagatggccgacgaccctatccactgtccgaagaacttctcctcctggtcctcgctcggcttcaccacgatgcccgagatattgatgttgcggaagcctccgttggtttccgtacccagtttcacggcgttgcaatggctggagaccacgcagtcggcgatgcggatgttctcgcagcaccttggcgatgtgctcttgagggtgataccgtcgtcgtcgctgtcggctatcatccccctcaccaccacgtcgtgacacccatcgatgtcgagggcgtcgttgttgtagttgttgcggttgcgcaccttgatgccctcaatgcgcagacggtcgcaggccaagtaatgctgcatccagcagccggagttcttcagcgtcacgtctttcaccaccacatcgcggctctggatgaagcgcagcagatggggacgggtgatgccctcatcgttccacgagagtttggggaatgcccggccttgtccgtcgatggtgccaaaaccgtcgataaccacatcgtccacattgtcggcatagatgagttgcacggtctctgtctgcgtgcgcagagagacatacgaagagcgcatgggcttatagtctgccagtgacgtgctgccatagatggtggctcctgcctccaggtgcaggttcacgtgcgagcggagcacgagggtgcctaccttgtagttgccggcgctcaccaccactcttccccctcctgccctgtggcagtcgtcgatggcgcgctgcacggcctcggtggagagttgtgtggtgtcgctcactgcgccatagtcgcggataaggtaatctgtcgcctcggcccggagactgaaggacagcaacaagcaacatggtataaataggttaagaatcgtttgtttcatggtgccgtaacgggttttgtggtatacaacggcaaagataggaaataataggcaaaaaccgcctcacggcaggaaattattccaaaaaacgattcaaaaatgattcggaagggtaagaagcccacctataaggaaccgctaatgcgcaaggcggtttttatctgttattcaatgattgcatgactatgtttgcgacagcaatttttcattttttccgcatttgtcggaaatagagacagttgtcgcaaccattcagacagaaaaacaagaaaaagtgatgctcgccatgctattccgtcctatctttgccatgtcgaaagaaacgaacgggtttccagaggcatcaacaaaagaaatattaacaacaaaaaaaatacaattatgaaaaagtcaaagatttatttcgcagcactcctttgcatgaccatgcaaaccgtttccaccttcgcacaggatgtgacagttcccacaacgcagttgcccgaagccgccaaggacttcgtacagaattacttccccggacaggtcatcgactacgcagtctttgactccgacttcgacggcgatgcctatgagacctgccttaacaatggtgtggaaatcgacttcgacatggcaggcaactgggaaatggtagactgcaactacaatgccgttccctacggcatcgttcctcctcccatctccaacttcgtggacgcccactacggcaataccgacatcgtcaaaatcgacaaggagcactatggctacgaggtgcaactctccaacgacatcgaactgaaattcaccgccgacgggcaattgctcggatacgacgactagcaacccctttctttattctaccatcatccggtggggcctatgctccatcggatgatttttttgtatggcgagaaacacccggcacatccgtttctcgatgctgaatttgcagttcaatggcggacttctgagcagtccgtcccctcttgccggatggctgaacaagatgttctctttaatgggataagaaggttggtgaaaagtcaatgcgtaattgcggagacgcttacttttcatcgggtcgctaatcctcatcgggttgacgacttttttgccttcgtcttcagtgccgtgtttttttgggggggtaagcaatgttgataggtatgcttctattattaatgttcaatggttaaaactatcatatcctaccatctttttatatggaaccacactcctgtgtttatccctaaatcgtgaataatatcttcagaaaaactacttttgcgacaattttcaaggccttttttgccacttgtcgcattgcctcgcgtttgtcgcatgaactataaaagaaaagcacgaaaaaatttccaccatgaggaaagccatcataactttgcaatgcagaaaggaaaaaaaccttcaacggattgaaataacaaacataaaaaaaaaatacgaaaatgaaaaattatcttcacacaatgatgttggcagtcgcagcccttttgtcggtcacaatgacaagttgtgaaaaagacgaattaatcgcgatgacacttgatggtaactggaaaggtaacatgtatgtatcttaccaaatcaacggtcggggagaatactatgacgcttcttattcagaagtatgcttcctacgcaatccttccaaattcgcatccggtgacggttactggattgattactacaacgactacagaagatatggatgggaacgcaactacatcgcaaaccacatcaaatgggaagtcgtaaatggaaacatcaaaatccatttcatagaggacaattcatatgtgacaatttacgaatactgtctcaccgacaatcacttctctggatacattgagatgtataacggaacaaggcaaagattcagtctggtgcatacttcctcgcccaactggagcggtttttattggggaagcgacaggttctatttcaacgccaacaccaacaacctcggcatagatgaaagtgcatcctacgcaaacaggtcttacatggacctggacgaagaaacctcttctaacaacaccaacaattcaagcgaaccagtgcaactgcagcgtgtattcaagacgaaatacgaataaaaacaactgttgaattctaataccccttttcctgtgctcgcggtcttttaccgagggcacgggaaacttttatagagttgctgctatcggtttacaaataggttttagtacctgaagaagaaagatttgctaaagttgtaacaacccctttctttattctaccatcatccgatggggcttatgctccatcggatgattttttgtatggcgaggaaaaactttaaggcaacaaaaaagtccaccgttgaaggacgatggacaaggacctaatgttttcacaacggaataatccttattgtgatttgcttaaaattagtgctgcaaatataagaaaaaaaacgcaaaacaacaaattgatacatatttttttgtaaatttgtcgcaatttactgaatcttataacatactcatttattttaattggagaaaatactactaacatgaaaaaaatacttggtttagatttaggcacgacaagcattggatgggcttacgtccatgagaaagaaaacgacaatgaagaatcatccattatcaaaattggtgtaagagtaatacctttgtctgttgacgagaaaaccaatttcgaaaaaggaaaatccatcactaccaatgctgacagacgtttgaagcgaagcatgcatcgcaaccttcaaaggttcaaattacgcagaaagaatctgatagactgtttgaaagagcatcgtatcatttctgatgatacgcctttattcgaatgtggcaataacactacattcatgacataccaggcaagagccaaagccgtcaccgaggaaatatccttggaggattttgccagagtgctgcttatgattaacaaaaagcgtggttacaaaagcaacagaaaggcaaaagacggtgaggaaggcgaactcattgatggcatggagatagccaaaaggttgtatgaggaaaaccttacccccggccaactgctccttgatttattcaaaaaaggcaagaagaaccgccccactttctatcgttcggatttgcaagaagagtttgataaaatatgggaggtacaatccgcttattaccccgaaatcctgaccgacgaattcaaggcctctttgcatggttttaacaagacccagacgtctggtgccttctatggaatccacaaaatcagcaccgccaaaaacagcgggaaggaaggctatcagcaatcacttctatggcggacggatgctttagtaaaacgacttgctattgaagaagcggcgtatgcactcgccgatatcaatggtgctatcaacaactcaagcaaacgcttggccatgatcagcgacagaagcaaggaactctacttcaaccatcagactatcggccaatacctcatgcaacgccttgatgagaatcccaatgccagtctgacaaacattatcttctatcgtcaagactacatggatgaatttgaggccatttgggagaaacaatctttgtatcatcccgaactgaccaaggaattaaagaaagatatccgagacatcatcatattctatcagcgcgacctcaaaagttgcaagaacctggtgagttactgcgaactggaacattcggagaaagagataatcaaagatggaaagaaaaagaaaatacagacaggatgtaaggtttgcccgaaatcatctccattgttccaagatttcaaaatttggcagatactgaacaaccttcaggtgtctgtcgttggttatcaacgaaagaaaatcaagaaagtcgacccacaactttcgctatttcccgacaacgctgtcgactttacacaaagattcttgaatcaagaagaaaaagacatcttgtataaggaattgtccattaaagaaaaaatgaataaaaaggacatccttaaactcttattcgagaattaccgagacctcgacctcaattacaaggaagtggagggcaaccgaaccatggcagcccttttcaaagcctatcaggaaattatcagtcaaacaggtaacggagaatttgacttctccaaaatgcccgcagatgaagtattgtccgtcacaactgaaatctttaccgggttaggctataagaccgatttcctcactttcgacccattaaccaaaggcaaggaattggagaccttgccggcatatcggttgtggcatctgctctattcttacactggcgacaaatccgtgacgggcaacgagtcgctatatagcaggattaaagacatttgtggtttcgaaaaagaatatgccactattttggcaaacatctccatgcctattgattatggcagtctaagtgctaaagccatacgaaagattttgccgttcatgatgaaaggatatgagtatagtgaagcctgcaaaatggctggatataatcattcttcccattctttaaccagagagcaactcgaacagaaagaatacaagtcacggttggaagaaatcaagcgcaacagccttcgtaatcctgtggttgaaaagattttgaaccagatgataaatgtcatcaatgaaattgtcgcaacctacggacggcccgatgagatacgaatagagttggctcgcgaattgaagaagagccgggaggaaagagagcagttggaagaatatatcaggaaaaacaccgatgaaagtgagaaaatacgcaaggttctggaatcggagtttggcatccaacacgtcaccaaaaacgacattctccgttataaactctataatgaattgaaacagaacggctacaagaccctgtattcaaacacctacattccccgcgacgaaatcttcagcaagcgtttcgatatagagcacatcatccccaaggcaaggttgtttgacgactctttctcaaacaagacgcttgaagcccgcgatgtcaatatcgaaaagggtaatatgactgcctatgactatgtggcagggaagcacgacgagcaagtgctttccgaatacgaaagtcgggttgaagacttgtttgcccaaaaggtcatttcaaggacaaagcgaaacaatttgttgatgaaagaatcagaaataccgtccgacttccttgaacgtgatttgcgcgattcacaatacatcgcaagaaaagcccgtgagatattagaagagatggtgcctttcgtggtgacgaccactggttctgtaaccaaaagattacgcgaggactggcagttggtcgacatcatgcaagaactgaactgggataaatataatgctttgggactgacagagagttacaccgacaaaaacggcaacatcgtcaggcatatcaccaattggaccaagcgcaacgaccatcgacatcatgccatggacgcactgaccatcgcttttaccaaacggagtattgtgcaatatctcagcaatctgaatagccgaggcaacaagtcgggcagcatttatggcatcgaacaaaaagaactgcatcgcgacgaaaaaggcaacaaactcgttttcaatgctccattgcccctaaatgttttcagagcagaggcaaagaagcatttagcgaacattcttgtttctatcaaagcaaagaacaaggttgtcaccctcaatgtcaacaaatcgaaaaccaaaagtggccatcacgaaaaagtgcagttgaccccgagaggtgccctgcacaacgagaccgtatatggaaagattcacaattttgagaaagaatacaagaaggtcgatgcgaaattttcagaagagaccattctcagggtttgcaatatgagataccgccatgctttgttggaaaggctgtcggcattcgacaacgaccccaaaaaggcgtttaccggtaagaatagtcttgaaaagaatcctgtatggatagataagaatcattctcattgtgtacctttgaaagtaaaactgttcagggtgatagatgtatttaccatcaagaaagcagtagacaaagacctgaagattgaaaaagttatcgacaagaagattcgtgaaatccttcaacaacgattagacacttttgatggcaatgccgccaaagccttctccaatttggatgagaatcctatatggctgaaccaacaaaagggcattgccataaagagagtgaaaatcagaggtattgccaatggtgagcctatacgtttgaaaagagaccgaaaaggccaaatgattaaagacgaaaaaggcacgcccttacctaccgactatgtcaatacggccaacaaccaccattcagccatcttcgttgatgcgaatggcgaatggcaagaacatgtcgtatccttctacgaggctaccacaagagccattatgggatatcccattgttgacaaggattacaatcaatctgaaggctggcatttcctgttctcaataaaaagaaacgaatattttgtgttccctaacgagaagacggcattcatcccacaagaaatcgacttgacggataagaaaaacctaccgttaataagccagaatcttttccgggtccaaaaatttactaacggagactatgttttccggcaccatcttgaaacaaatgtagaaatggaaaatgcgctcaagggaacaacttggaaaagaatacggagtattaaggaactcaaaggaatcgttaaagtccgcgtgaatcatattggtgaaatcgtagcggtaggagaatattagtctatgataaaaaagaccttatgcttcagcaatcctgcatacctgtcgttgaaaaatgcgcagttggtcatcaaactgcctgaaatcgagaaagcgacaacgttcaccgaggatttcaagaaatccacagtccttacaaggcctatcgaagacatcggcgtggtggtgctcgaccatcaacaaatcaccatcacgtctggtgttctcgatgccttgttggaaaacaattgtgctgtcatcacctgtgactctcggtccatgcctgtaggtcttttattaccactggttggtaatgccacccagaatgaacgatttcgctgtcaactcaatgcatcgcttccattgcgtaaacaattgtggcagcaaaccatacaatataaaatcaagaatcaatctgctgccctcaaaaggtgtagcaaatcagagacgaaatgtatgcaggtctgggcaggagaagtgagaagcggcgacccagacaatctcgaagcacgtgctgcccagtattattggaaaaatctgtttccgcatattgatggtttcgtcagagaccgtgaaggggaatcgccaaatcaccttctcaactatggatatgccatccttcgagccatagttgcccgttctttggtcgccagtggtttattgccgactttaggcatccatcatcataaccgttataacgcttactgtctagcagatgatatcatggaaccatatcgcccgtatgtagaccttctggttttcgacatcacccaacaatacggagtagatatagaactcagtaaagacatcaaagcagaattgctgtcaattcctattctcgatgtgaacatcaatggtaagcgaagccctttaatgattgcagtctctcaaacaacggcttcactgtacaggtgctttgatggagaaataagaaaaatcacatatcccgaaatgtgatgaaagcagaaagaattagtgaatatagagtgatgtggctcttggttttatttgatttgcctacggatacaaagcagaatattagggattataacctattccgcaaaaggctcatcaaagatggttttaccatgtttcagttttcgatttatgtaaggcattgtgccagtatggaaaatgcagaagttcaccggaaacgagtaaaagccattctaccgccatttggaaaagtgggaattatatgcatcacagacaaacaatttgccaatattgaattgttttatggggcaaagccaaaacgccccaatgcaccagggcagcaacttgaactattttgaaaaggagaattccaagtttacctatggaatcctccttttatcatgcaccaattttattttctaaataagtctataactttctgaaaataaacacattgcacagattcagatgtatgcttaggtgcaaagatactaatttttaagcaaatcacaacaccttcctccatatcctttggtctctgaaagatgtatgcttaggtgcaaagatactaatttttaagcaaatcacaacattccatatccgtatgactttgaatggactgatgtatgcttaggtgcaaagatactaatttttaagcaaatcacaacgggcacggggaggatgcggatgctgtcggcgatgtatgcttaggtgcaaagatactaatttttaagcaaatcacaactcctcgatcacatcgccgcattccgtgcaagatgtatgcttaggtgcaaagatactaatttttaagcaaatcacaacagaatctcgaagagggcgaaggccttgggggatgtatgcttaggtgcaaagatactaatttttaagcaaatcacaacgactcccgaggcggccaccacaacaagccagatgtatgcttaggtgcaaagatactaatttttaagcaaatcacaactgcggggaggttttgtatagcaaaccgcttgatgtatgcttaggtgcaaagatactaatttttaagcaaatcacaactttcatccgtggcgacatcaggaaagaaagatgtatgcttaggtgcaaagatactaatttttaagcaaatcacaacccgcccgcatcatcttgtcggtgatgatgtgatgtatgcttaggtgcaaagatactaatttttaagcaaatcacaacgctggggcatcctcgtctgtctgctcatcgatgtatgcttaggtgcaaagatactaatttttaagcaaatcacaacgcttcatgccgaagaggttcttgtctctcgatgtatgcttaggtgcaaagatactaatttttaagcaaatcacaacaacccggcgatgacagccttttgtcttccagatgtatgcttaggtgcaaagatactaatttttaagcaaatcacaacgcacaggtgctgcggcatacgacaagacacgatgtatgcttaggtgcaaagatactaatttttaagcaaatcacaacgtaccgaagtcgataagcggatgacctaatgatgtatgcttaggtgcaaagatactaatttttaagcaaatcacaacgcgcgtgtcgggcatcctgctttccttcaggatgtatgcttaggtgcaaagatactaatttttaagcaaatcacaacgccctgggtgcttaacagttggttgaggttgatgtatgcttaggtgcaaagatactaatttttaagcaaatcacaaccgcatgtccgaccagttcggcaggaagaccgatgtatgcttaggtgcaaagatactaatttttaagcaaatcacaactatcctcttttaattccaaataattcattgatgtatgcttaggtgcaaagatactaatttttaagcaaatcacaaccaacaaggatgcgaagacggtggcggagatgatgtatgcttaggtgcaaagatactaatttttaagcaaatcacaactccgcatccgctggcatatcaatggtcacgatgtatgcttaggtgcaaagatactaatttttaagcaaatcacaacccgtcttcgagagactgacctcaccgaaagatgtatgcttaggtgcaaagatactaatttttaagcaaatcacaacctattcctgtagttggacctgtgattgatagatgtatgcttaggtgcaaagatactaatttttaagcaaatcacaacttctgctgccacttctctatgccgtcgcggtgatgtatgcttaggtgcaaagatactaatttttaagcaaatcacaaccttgtcgagtgtcatggcttattggttatgatgtatgcttaggtgcaaagatactaatttttaagcaaatcacaacatactggcgtttcttcaacctgcggtagaggatgtatgcttaggtgcaaagatactaatttttaagcaaatcacaactcgtacagacctattactaatttcaattagatgtatgcttaggtgcaaagatactaatttttaagcaaatcacaactcaaataagattgttgataattttgaagtagatgtatgcttaggtgcaaagatactaatttttaagcaaatcacaacgcctacgacaaatgatattggttttagtgggatgtatgcttaggtgcaaagatactaatttttaagcaaatcacaacctaccaacgacgaaggaagcggcagcgcaggatgtatgcttaggtgcaaagatactaatttttaagcaaatcacaactgacaacgccgatgtgccatacgtcatcggatgtatgcttaggtgcaaagatactaatttttaagcaaatcacaacgatgcaatatttcctcccgagccagcggatgatgtatgcttaggtgcaaagatactaatttttaagcaaatcacaacaaccaaggcgacaaccccaaccgcaactgggatgtatgcttaggtgcaaagatactaatttttaagcaaatcacaaccgattcctgtagtaggtcctgtgattgatagatgtatgcttaggtgcaaagatactaatttttaagcaaatcacaactcgcaagccgaggttaataagaaaacagccgatgtatgcttaggtgcaaagatactaatttttaagcaaatcacaacaacgcagaaatcatccttctggatgtcctcgatgtatgcttaggtgcaaagatactaatttttaagcaaatcacaacctcttggtgacggtgccgcgtgtgccgtcggatgtatgcttaggtgcaaagatactaatttttaagcaaatcacaactactggcattatttattatcgtgactttcagatgtatgcttaggtgcaaagatactaatgcctgtgtcaattgcaaaaccgcaaaaacttctacatttgttttgcactccattctttttccattatatttgcggaaaattggaatgtgatgaaaaagatacggttttcgctgaccacacagattgtcatagcattggtgctcgccatcattgccggtgtgttgctgaatgaccacgccgattttgtgaaccagtatatcaaacccttcggcactatcttcctcaacctgctgaagttcatcgtggtgccattggtgctgctctctatcatcgcgggcatcctctcgatgaacgacatgaagaaactggggagactggggctgcgggccgtactctatttcatgttcactacggtcatcgccgtcttcctcggactgggcttgtcgacactcgtcaggggatggcttcccaccatcgacatgacctcggcagccgcctcggcaagcgagacggaagtggccagcatctctttcatggaccaaatcgtgaatatgttccccgacaacttcctgaatccgctgagcaacatgacgatgattcaggtcattgtcatcgccatcttcttcggcgtggccatggtgcatgtgggcgagaaaggagcaccggcaagggaactggcactcagcatgaacgaggtggtggggaaagtgctccactacatcatggcgatagcacccttaggcgtattctgcatgctcacacccgtagtggtggaaaacggaccaagcgtgctggggtcgtatgccgccctcgtggtgcttgcctatgcctgtttcatcacccacaccctctgcgtgtattcgcctttggtctacttcttcggccgacagtcgccgctgaagttcctcaaggagatgcagcccgccatgctcttcgccttctcgagcgactcctctgtcgccaccctaccctattccatgaaatgtacagaaaaactgggcgtgaagaaagacatcgggagttttgtcctctctctcggtgccaccatcaacatggacggcgtggccatttatctcggcgtggcatcggtgttcatggccacctgctgcggcatcgacctctccctccaacagtatctcgccatcgcctttgcctccacagtagcctctgtaggcacaccgggcattcccggtgggtcgctggcattgatggccatggtgttcacatcggcacagattcccgtggagtgtgtggcagtggctgccggcatcgaccgcatcatcgacatgggaagaaccgtgatgtcggttaccggcgacgcctcctgcgccgtggtcatgcaaaaccttaccgacagcaaagaatagatagggtgtaatcttttactccctcattactcctccaattactccctcattatttcgccatttttacagcatgacgggcaacaaaccccaatggctatgcccacgcctaaggatggcggtcatttatgcggacgcgatgcgtcgccggatgaaaaaactgccgatggccagggcaatgacaaggaaggtgacgatgaatgcccagatgttggtgacacgtgaggtagccccgatgctgtacttgtaatcatcgggaatggtacgttcaccagagacgcggtagtggatgacatggccatcatattcacccatgcctacatccgtaactcttccaggcatgacgaggtcgtagttggtgttgaatgccagaaatgtaccatagcgcccactgtcatcctccaaagagtcggacttgagtatcgaggaggtgtaggcatctgaatgaaaatgattgtcgagcacctttttgaagtcgtctaccttctcatccgtgtcattgagtacatcgggatgcatggccaactcatcacattgactgacgaatgcctccttgctgacgggcggattcttcaccatgtcgtagttgtcggcaacaatcttgcatatctcagcaaaccagttggcattgagccattggttgaccttcacctccatcttgtccaatacctctttcttttcctgcccactacagtttcgagtcaggtcaggatggccggtaaaccagtatgaggcagaatcggcactgaggaagcgactgatggggatggggaagacggacgggccgtcgtagacgaacgtctcagtgaaggtatagtcggtatagaaccacttgaagaccttctccaacttgctatttgccttgaagccctctgccataagcaggtggtcgctcatgtcctgcaccgtcgagaactgtttcttgacatgtaccatcacactatcggaaagatggctgtcgggattcttcccttgaaggctatcaacctgagtctgagtcatgggtacgggatgtcgcagggagtcgctaccgatgaccgaccatgtaagttcccagtgcttgtcgatgaggctgtcgaattcctcttccagcggaatcatcagattcttttctgatgtgtggaaagcgtattcgcggatgcaggtgccgtcctcgttgatgacggtcagcatgcgggcgtctttgttgttgcacgatgccatgaagagcaccagcatcatcacggctatggttttactgttggttttcataaatcatccgttttattgaacgataggttttcgattgttcccttttccgctccaagtagcacacatatagttcccggggtgtactcccctcgcagaagtcgggtgtatgttctgtttggttggttgccattgtctgttgcggcacttctgaactgccgccgcgtacagcgaagaacagaccgaccagaaagacagcagccattgtcgtgactgtccgcaggaggacaacccataccggcgtatgagttttggctgtgtctttttccatgccgctcacagcggagaaactttggaatgcctcacgataaggcttcaggtcatcggcgatgtcctttttttggaaatagttgtaaagcgtctgttcttcctccaaagtggtttccgcattgaggaagcgctccatcaactgtcgtatgtaggtctcgttcattttgattcagatttaaattgttcgatgatgcttctccgtgccctgctaagcgactgcctgacggcagcctcgctggttccgatgaggcttgcgatgtcggccatcgtcatttcctgcatgtgccgcatgcggagcacggtctgttgcatggtaggcagggcgtcgacaagttccatcatccggtcaatctgctcgtttcttgccgattctgactcgttatcattagcgatgtcagcacgggcaatatccaccgtcactcgtctctgcctgactttgcttagagacaggttgcgaacgaccaccctggcgaatccacggacattacatattggctcgtcgcgaagttgccacagacggagcatggcatcctgcaccacgtcctcagcctcctcgtcgctgcccaggattcccctggcaacactcagcagtgtcgggcgcacggtcttcacttcgtccataaaactctctgtcatcatatcttttggtcgttcttttgcctatatgacgcaatcatgcttattttgtgacatgaaaacatgaagaaaataatccggcctatagaaaccgctgtcggcacactggagagacccggtgtgccgacaggagtaaagatgttcagccgaaatacgccaacagcatttgtgacagcatttcgatgagcatggagattcccaacaggatgtaggaaaagtcaatgataagttgtttcatgatgatgttgattgattattcgtctctatattccaggatgtcgccgggctgacagcccagttcacggcatatcgcctcaagggtggtgaaacgcacggccttggccttgcccgttttcaggatactcaggttggcctgcgtcagacccacacgttccgccaactcgccaagagaaatcttgcgtttggccatctccacgtctaaattgaccacgatgtgtcccataagcattcagatggtaagatcctgttcttccttcaacttcagcccgatggcaaacacctctgccataatcagacagaatacaccaaagataagactgtcggagtcctctatgtagatttgcctaatcggcacatgattcagcagttcgctgacgataattataatatatggtatcaacaatccccatcctgcccagcgcagcaaggagacattctgccatacaaacacttcgtcgcgattgacattcaggatgaacctcaccaatgacaccagtgagcgtatgataagatagaaacaagccacacccaaaatgactatcagcaaaccgacaaaaaactcataagcggagacataatcgccattacggccttcttgccaaccctcattgaaggcttgcacgtgttcattgaagttcaataccacgctcatgattacttgcaatgccatcaataccagcatcaagacacagaatacattcaatttcttcttcatgacttttatcgtttcattttaaagatttatcgtttttcgatatgcaaaagtagaatgatattttgaacccaacaaataaaatcaataaaaatttatcgaaatacgatatatttaacatttcataacaaatgtatggggtgatatgccctgcaaacaatccagaatcaaccatcacttcgacaactgctaatttgtcatttcaaaaagccaaaatggcataaatatacgacaaaacggcataaatatacgctttaagacgtcattttactcgatttattaaaaaataggcataaaacttgcattattcattttaaaataccgacatttgcacgctgaaacgcaaaacaggtttttcttggtaacaaccgttttatcatcaaagagaaaagaaatgcaaaaactaaccatgatgagttgggtgttcctgctcttgcccataggggcacaggcaggcaacatgagcctggaaaaggaagaggctttaaagaccatcgagactttagaggccgataccctggaggctttagtgaacattccgcagaccatcaaccctgccgacacacaatatgtgtggaacaaggagttgaatgaagtggtggtgaccggtcagggtggtggcgtgtcgaaacgccgtctctcctccaatgtcaccaaactctcggctgccgacctggcaaaacttcccacggggcgcatcgaccagatgctgcagaacgccgttcccaacatgcaaatcacgctgaccaacggtcagcccggcactacctcgatgattaagtcgcgcggtctgtcgtcggccttcaccaactccaccccggtcatctacgtcgacggcgtgcgcgtagacaacctcaacaccggttccgccctcttcaacgtgatgaacaacgcctatggcaacatcaacggccagaccgccgcatcgagtgccatcggcgacatccccatggagaacatcgaccatatagaatatgtacccggtggcgctgccacgacactctatgggtcggatgccgccaacggtgtgatacagatttttacgaagaaccacggcagtggccgtttcaatgcctccgtcaccgcgcaggtaggcttcgacgtggccaatacacagttctaccacttcgaccgcacgaaagacctgctccaccagaccggtttccaacagcgctacggtctgtcgttctctggcggcaatgagcgcatgggttattcgctgggagcaagcatgagtcagaacaccggtacgctcatccacaacggcaacgagcagaagaaatacgacctgcgcttcggctcctccatccgcatgaactccatgctgaaatataccaa

SEQ ID NO: 2206 - DNA, 24185 bp, synthetic construct
  source 1..24185: mol_type = other DNA
  misc_feature 1..24185: note = Synthetic
ggcccaccttctggcagtaggtcatcacggccacgtcgctcgctatcacggccgatatgccggcctccttggcggcgtcaataatctggtgcatcagctctatgtcgtcgtcatagatgatggtgttcaccgtcagataagtcttcacgcccctttcgccgcacgtagctgcaatctcgcgcaggtcgtcaatggtgaacgtgcttgccgagtgagccctcatgttcagcttctcgatgccgaaataaatcgagtcggcaccggcctgcagtgctgcctgcaggctctcgcggctgcccacgggcgccattatctcatagtcggaaatgttagtgtccataacttattgtgaaatcttgttgtcaatacccatttgtcaaagcctttcggccattataaaaaatgcccgccgttaaaggacgacgagccagcctcaatgttttcacaacggaataatccttattgtgatttgcttaaaattctgtctgcaaagatactaataaaatgctaacactcaaacagtttttcatatttttatcatatttgcccaagagcctgtttaacctttatcggtcgtaagccgatatcttgtttgtttctgcatgcagattgatgtttccttccatcttttttagatattgctgtcttgccgtctgctatttagcaggcataacgggctatgtatagaaaatagcggacggcaagatattcaatataaaaacggcaatagggctatcttagcttcattcctataaaaataagaatttctctcccgattataaaaaacttaatatttagtcaggcattaaatcagattatctgtttgtcaacgtgtaatgtatagcaaactatcttgccgtcggcttttttgacggtatatttaacttctccattaagatttaagccctttcgttgttcttcccatgttatttcttttaccggacggttgtttatggctatgattatatctccaatttcaataccggccttttctgctattccgcctttgtataatccgttcactatccatccttcataaatatccgtgcggtcaaaagttgccatatgggttacagatgatagcatatacattcctttattcttgttgcgtttcacccacactgaagagttttccggatctaagacaatatcgtataacgaccatattttatttccaatcagacctaaatatggcttaccaaatgacagagcgcctttttcattaacagaataatctattacgatgtctttaagtgtatctgtcatacagaattgtgcggctcttataatatactggtcagagccgccgccaatgccgccggcttgtgtcctgaagtatgctttcggtatgtcatcaatattcagagaagatgctgcctcgttagtaagactgattgaggatccacatcctaaatccattctgaaccatccttccaaggtgttcttctcgtcaatctgaagtttggcctttacatcaatacggtttttctcaaatcgtgcgtcaagttttatatagttatcaagcaaatcatctttaaacggttttttaagctgttttatgtatccttcgctaaaattgatttccaaaggagatgtcagtaggtgagtgttgcctaacagaccgtcggtatgtctgccgagaatgtcacgcagtttaattataggagtaatcttgttttgatattccatatcaccgcagtgaatcttgacgggctcgatgaatatctctacgctttgaggtccgctgttgcctgctcctccgattttggccctgccttttctgccgaaagcattttgaagattatttactttcagataatcttggtctaagtatagaaaatcagccccggtgtcataaattagggtaacaggtatggtgtcattaagcgtacactgaaaatacagatgcctgtcaaagataaatggtattgccccttcaggaatggccgcaatgccttttaatgagaagaaaaacaggaagagagaaacaaaataaagatttcttttcataggcttaaatatttaattagtattgtattaatctgagataagctgtctctattatgtgccgacgtggcgtctttccgttttaggcagccggcatggtcagtttgcaggcaggcttattatgtttccgttgaagttctccttcactcccactgcggtctcggcctgttccaccatctggttaagctccttgttgggcttcaccagtgccgccatgctcaggaaagttctgtagtaggccttctccatgtcgtgcttgcccacaagtccgtatgcctgcgccgtgttgaatatcgtggccatgctgttgcggttaagttttagcgcctcacgccatgcgtatattgccgaccagtatttgccctgcttgtagtagccttcgcccaatgcgcgctttactacgaacagcaccgtatggtcgggctgcatcagttcgattgatttttccagatagtcaatgccctcggccacgctgtccatgtcaacacatacgatgccgagccggtaaaggcatcccgcattttgcatcttgcttttttcggctgccttggtgagccatctgcgtgccataaggtttttgcccgtctgcatgtaggccatgccgagcgagtagaccgtattgtaggtagagtcgccgagttcaagcagcctgttgtaagcatttattgccttgtcgtagttgcgcagcaggaagttggcgtcggcatattcgcgcagcacgggcagacacgcagagtctgtctgcatatactttgccgtaatgtcataagccttctgcggcgacgatatattgtcgtcgctgttgtatatgcgtgccatatatgccgtcacgatgccgtccatagggcacctgctcagcaacctgttgccccattcaatttgttttgccgtgttgtccatatatctgtagcagtcaaacaggcggcgcatcgtctctaggctcagactgtctgtgcctttccttgccgtggcttcgagcattgccgcgcatttgcggtattcgccacgcataaacaggcagtgcgccattttttcctttatcgcgtctgagctgtctgtctgcagcgcctcgccgtaatatctcatggcgttgaacgtgtcgtttatcctcatgcaactgtcgcccagcgcttctgttgagttattgtcggctctggctgaggctgccgtcagggccattagcgatagtataagactgatgattttcatggcaataaaatttttattttagcgatatattcttttctttatgcagaaggcaaatttctgttcatgttatgcaaatatagcgaaaatataagaatgtagtacagaatacatcatttttaactaagttatttagtttatattcatggtcttcattgtttgccgtgtatttttctttgtcatgatatgcagttaagcttattcttgtagcactcagcatgataattcttttcatggcattatgtctacatactgatactttctgttaaggctgtgatgcaaatacaactctttgtagaaaagtcgtggcaaacatatttttcattttgtgaaacgtaaaaagtcttttttacataaaaactgttgtgaaaaacagtataatacgggatattttgattaaatttgcgtattgatttataatcgaaaaacagcagaaacaatgtttaccaaaatcgagatagagcggttcagaggcataaggcatgcttctatagaaggctttaagcaaattaatcttttctttggaaagaataattgtggaaagtcttcgttgctggagtctttgttcttggccagcggcttgtctaatccgttgctgcctatccgtgtgaacgttatgcgtggttacagcaaggcacgcttgaatgatcttaaacttgatttttataatttagatacaagtcgccccatctatatccggatggaaaatgaagagaagcgtgatttgaatataagcctttttgaacaaaaccaaaacaatgtatccataaatgctgatgacaagaacatcctttcaaatgttcaagagggaaaatacggattgaaatttgattttaaggtcaacgacaggcattatgaatcgcagatacgttttgactcggcaaactcaaccgaggcaacaagcatcgtgtcagaccggtatgctgaatcgctgcgatgcacgtatttaagtcctaaatatgactttaacgcgtcaatacagggccttaaaaatattcttcagaataaggatgagcactttattgtggaaggacttaaaataattgagccgcgcgtaaccgactttatattcgcagacaatgaaatgcttgtcgacataggactcgccaaacgtattcctgtcaatatgatgggcgacggagcaagaaagatagtctctcttcttacagccgtatacgattgcaaggacggtgctctgctcgttgacgaaatcagtaatggcttccattattctgtcatgggcagcctgtggaaagttcttataaatgcagctgtcaggaacaacacacagctgtttgtaactacgcacgataacgactcgataaaaggtctgcgtaatgcggcgttaaacgagtttgatgatattgtggccgcttttaaactgctgaaaacttctgatgatgaactaaaggcgtatcactattccttagaaagtttggattattcgataaatcaagaaatagaagtgagataaaaatgactaaaattttcatcgaagccaggaataaaaacaccgctgaatatcatttcattaaagcaatactgaatatctttttcccggaaagagatgttgattttatattcatggacggtattggaaacttatttaaggaagccattgtcaatcagataagtcttgcacaagagagtggcgaacaagttatcgttcttgctgatgccgatacgataaccaaaggatacggatatgccaagcgtaaggcagaaatagacaacggtatggctgcccatgcattgtcattctcttatttcctttatcctgacaatcagaacgacggagacgtagaagtgcttatggagaaagccgcgcggcacgatttacattctaagttctttgattgctttgaggactacgagaaatgtgtttctggcgtaaaagatgagtcgggcgaacaaaaatacaatgtgcctgatctgaaagggaaactgcatacttacatgtcagcacaaaaattaccgggcaaattgcgtaatagattcggttctggcgattggttattcgataacaaagattattggaatctggatgttgaagcattacaaccattaaaagatttctttaccaccaatcttaagtaacatgaattagtcaaactcactttacaacttatgaataccactgacaccgaacacagaaagatacttgacgacatcgaggccaacccgtcacgctacgaaataaggcagctgctcggcgacaagatttttagaatagacagcagcgacggcagtatgtggctctgccgtaacgacggcggcaccaggcggctgataacgctcgttgaacacggagaagtgaaattcctgaccgaagccgacatcgagccgtcagccatgcggctcatcaaacatcagtgcccatacctcgccttcaaggcccattaccgcttctgggtcttcccgtttacaggcagcaaagcggcagtggaatggaccgtgcgccccgacggcagctactacgccgactccgacggcttcggcatgaccgacgacgaggaaataaccctgcacggattcatagacacagacggccgtccgataggacagttcaggctgtacaagagaaaatgaataagactttagataagcactgattaaattaagaataaatatatatggatgaaacaattgtgattttgggtaatggatttgatagaaacttaggaatagatttatcatttaattcttattgtaattatcatttatgccctgcttgtaatccattaaatattgataaaaaaagatggagtgattttgaaaatgaaatacgtgaaaagattttatcatggtataataataaaagaaatgaagaatacgctaaacttataaatgaagaatggatagcctttaaaagatatttttcgtttttctttacttatacaactaataataatttaaaaataaatgtatcatcctgcgcatatttattcttgaagaatttctcaaataaaagtaaagtttatacttttaattatacttatccttatgaatatgtagaacttaatttacaaaaggaatttacattcgttcatggacattattcttttgatccttatgatgaatataggaaaatattaataccatcacaatcacaaaatatgattgtaggaattgattttaaacgtatgcctgaaactgtaaagaataatcattattttattcctataataaaaaaattaaatgatgcatatgttgaaactaatattataaaagatcttttaaaagctaaatacgtaatcatatttggattatctgttggaatcacggactcggattattttgatgaattctttacctctatttccaataaaacttcaaattgtcaaacaatttattatataacaaaagatgaaaaaggttatgaagcttttatgaaaaatatagacatattagggtacgacaagcaaataatttgttcaaatgtaaatatcattcctttatatacagaatttggtacagataatgatctttttagaaaagtattatctttaatttaaaatatgatgattatttaatacaacaccataaataagcttatttttttttacaataattagggcactataaaatattttgtgtaaatgtaaaatacagaactcaaaatagagttctgtatttttattttatatatttaccaatgaataagattatgaaagaaaagaatcaaatagtgcctgatgaggtgttaagcaagtaattccttagccagttcaatacagaatccgatttaagcaaattcttgaagcagttgcatgcccaggtgttagagaagatgttggaaggtgagatagatgctcatttgggcaattaaaagatttctgtagcaagaaataatagtggaagctcacgcaatggtatctatcagaaaaggacccaaacagaacatggtgaggttgtcatctctatttcccatggccgtaatggccagtttgagccgatagcagtactcaaacatgaaaacagtggactttctatagaaaagcttgtcgtctctctgtatgtcaaaggtatgagtgtttcttatatagagtaagaaatgtgtgggatttatgaaatagaactctccatgtcggccatttccatcattacaaataaggtaaaccagactgcaaggtaattactgattttgttttgaaaatccaaagttgaatcaattatattgaaaaatcgtatcggtttaattcatgattgaaaatattctgaaataagacatgatttgtttggatttaatttgtacctttgtcatgtctgatgaagattttatttagtttttatagcaacactgcgttaagtgaatcttcagacgggactaaacgtttagtaatttattttgaataggtcttataaaaacgtgttgtaaaattaataaacaatagaatatgataactaaatatcaagctaaaaaaatcattgaaatattggcacagcgaaaccgatcaacaggctattttgattctcatgattttatagatttatatcgtgcaaattttgaacatgaatacattcagatgctcaatgataatgactcaaaacatgataatacagcgtttcaaataacgaatagtcaaattgcaagatttttgagtgtaaattcagatgaactgaaaataaagaagataaacatctctgacagtatgaacgatcatggcaataagacatctaatgctaagtggaaattcttgtctataataatgcctgcaatattattcttaagttttgtatttgctcctatattctcacaaaattgtaatgctaaagaagaatttgatataccaccttacaaatgtaagactatgtatatacctgacactacatatatcagaaaagacattgtattactccaaaattttgtaaatcaaggatgtagtaagaaaaatccactatacaaccatataaaaatttatataatgaaactaatgatatttggataacaaaaggggatattcgccagtacacaaaatctatgataaataaactgaacgaaattatatattctactaaaattgacgcaaaaacgttttctatcgacgatatgaagcattatgaaagtaaatttaatcattattttaatatagacagcgttgcataccccttttatgctattaatataagtggttccaatacttatttacaatcaaatgatattggctataaatatcctatggctgaaataattgtgaaagaaccgattacttggtatgaggtttataaaatggatagaaaaaatctaactaaaggatatgaatggattaacaatgatgaagagaatagtaaatgggtggagaagacatatcctattgagacaagttataaggtatttgataattacccagaatacgccattcaacattacgattttaaatttggagacacaaaagggcctataacgattatctacaatttacaaggagatttggtgagaattcatgattttggagacataatgaatgaagaaattaaattagctgaaaactctgcatatttggaggattataaaagtaacaagtataatgttgcttctgaaaactctttaactaagcggtacattgaaatgattttaagtggcgaaatggaaaaaatagaagctaaatatatggggaaaatgtttgggcaggctcttattggggcacataaggaatcagaaaaaacagcaagaaaatttataaaagccatagacagagaaaaactgcacagagcaaaaaaatatattcagcaacttgaaacagatcatgaaacagatttttatatggggcgatgtgttcgcattgataacaaatctttctatttttcattagtgaataaagatgggaaagctacttgcatatttaaaatagattatattcaagatggaccttttgcagttaagaagaacattacacttataggtaaaggaaactaaattaaggtcatcgtaaaaaagttttgaatgaaataaattgatttttcattgtcataatattctgttatggtattgatgcaaattcaatcctttgtagaataatcgtggcaaacatatttttcaattagtttttcaattagggaaacaaaatttacctctaattgcaatataaaaatgtgaataatttgccatgcgctatttactgtatatatggtaaaaacttatgacaaaaatatttttcaatctggaaaataaaaagtaaacgtatgttaatgaagtgacaataagaacgtcatttaattaacatacgtttataaataagtcggaacatatcattaaaatcagccatttctgggcctgaaaccataagtttgagcctcagaaatggcaccttttcatccgtaaacgggccactttttatgcgtaactgggccggttatgttttttaacacttctgtttttctctcttatttgctgcaattccctgtcagtcagcgtcttaacaaaacactccgttttttgcccttttctgccccaaaccgcggtatggcgaagagcatgcgtgttctgagagcgtcaaacggtcgggaaaacatgaagaatgtttacaaattagctgcgctatattcataagatttaatctgaaaaactgttatagtttattgcttcattaataatataattgtttataacgcggctcgtaaaaaacatagtttttatttgtcgttgctcccgcttttcaccatctttaaataagatagtattcggctcggcaaagccaagttaaaaaacatagttttttatttgccattgctctcgcttttcgctatctttgtacattaacttaacttgcaactgatttaattgaagatgaaacatatattaggactagacctcggcaccaacagtataggctgggctttggtgaaagagagagaaaacgagaatgaacaatcctctataacgaggcttggagtaagagaaatctatcttactgcagatgaacagagtaattttgagaaaggtaagtcgattacaacaaatgccgaccgtactcttaagcgtagtatgcgtcgaaacttgcagcggtataagcttcgtcgtaacagtctcataagtctgctgaaagactatggttttataacggctgaaactctgttgaacgaaaatggtaacaggacaacatttgaaacttatcgtcttagagccaaagctgttacagaagagatttcgcttgaagaacttgcgcgtgtcttgcttatgataaacaagaagcgtggctataaaagcagccgtaaggcaaaatctaatgatgaaagcggacagctgattgacggtatggaagttgcgaaaaaactttatgatgataatcttactccagggcagtatgttgtatcgcttttacgaaagggcaagaataatatacctgacttttaccgttctgaccttgttgctgaatttgacaagatatggaactttcagcgacagttttatccggatgtgctgacagacagtctaaaagaggaactgaagggtaaaggcgacaaggagacttgggctatctgttcaaagccgtttgctattgaaggcataaagcgaaagactaaaggatgggagcagaaaaaagaagattatgcatggcgtgctgaaagcctgcaacataaaatagaccttgaaggacttgcaatagttttgcagaaagttaatggacagataaaaaattcgagcggatatctcggagctataagcgaccgcagcaaagagttgtttttcaataagcttactgtcgggcaatatcagatggccgagcttgataaaaatcctaatttcagtcttaaaaatcaagtgttttaccgtcaggactaccttgatgaatttgagcgtatctgggagacacaggcaaagtttcataaagagcttacgccggaacttaagcatattatacgtgatattgttattttttatcaacgtccgctgaaatcgcaaaaaggacttatcagcctgtgtgaacttgaaagccgtgagattgaaattgagaggaacggcaagaaggttaaaaagacaataggtccgcgtgtgtgtcctaagtcttcgcctatgtatcaggagttcaggatatggcagactataaacaatattcaggtgtcgggcatggttgttgctgactgtcaggttgacctgtttggcgaaacggtcggcaaaaagtttggcaaacgctttctcgaacaggaagaaaaagaaattctattcaaggaactcaacttcaaaagcaaattgacgaagaaagaaattcttaaattgctttttgaaaactacaaggaacttgaccttaactataatgaggtgaagggcaacactacgatggctgctttgttggaggcatgcagcaaaatcattgaaatgagcgggcacggcgagtatgatttttctaagatgtcggctgatgaaattacgggtatagtgtttcctgtattctcaggattaggattcagcacagatatattttcgtttgattcatctgttgagggcaaggctttcgacaagcaaccttcttatatgttgtggcatttgctctattcatatgaaggcgacaagtcaaagacaggcaacgaaagtctaataagcaaaatttctgaatgttatggttttgataaagagtatgccgctgttattgccggcataagttttgagccagattacggcagccttagcgtaagggccatgcacaagatactgccttacatgaaagacggtttaggatatagcgacgcttgcctatatgccggttaccgtcattcaaaaaggtcgttgacaaaagaagagattgaagctagaccattgaaagataagatagacttgctgccacgcaacagtctgcgtaatcctgtagttgagaaaattctcaatcagatgattaacgttgtgaatgcagtcgtggatacttacggaagacccgacgagatacgcgttgaaatggcacgcgagttgaagaaaaccaagacacagcgtgaggagactgtaaaggcaataagaaagactactgctgaaaatgaaaaatacaagaaggaacttgaagaagagttcggactgaaaaacgtaagccgcaacgacattgttagatacagactttatcttgaactgaaggacaacggatttaagactctttattcgaacacttatataccacgtgaaaaactgttcagcaaggaatttgacattgaacatatcatacctcaggctaagctgtttgatgattctttctcgaacaagactcttgaggcaagaagcgtgaacctggataaagccgactctacagcttatgattatgtgaaagttaaatatggagaagatggacttgaaaaatataaggaaaagataaatcagctatgtgagaaaaagattataagcaagacaaagctgaagaggcttcttacaacggaaaaagacattcccgatgggtttattaaccgcgacttgagcaacactcaatacattgcccgcaaggcttgtgagattcttgaagaaatcacaagaagagcagtgcctacaacaggttcggttacatccagattgcgtgaagactggcagcttgttgacatgatgaaggaacttaactgggataaatacgacaaacttggactaacagagataatagaagacaaagacggaaggcgcatcaggcatattaaagattggacaaagcgtaacgaccagcgtcaccatgcaatggacgcgctgaccattgcgttcacaaaaccagctttcatacaatatcttaacaacttaaatgcccgaagcgacaagggcggcagcatatacgcaatagaacgaaaggaactttatcgtgacaacaagggcaagcttaggttttatccgcctatgccgcttgatgaattccgtaccgaggcaaagcgtcatcttgagaacattcttgtgtctataaaagcgaaaaataaggtggttacacgtaatgtgaacatcactaaggcgaaaaaagcagaaaaaggaaagcgtaagagaatacaactcacaccacgaggacaactacataacgaaaccatatacggacgcataagacaatatgcaacgaaagaggagaaagtgaacgcatcatttaccgaagacaagataatgactgttgcgtgcaagcgttatcgtgaagcgcttcttgtgcggctgaggcagcatgacggtgacgccaagaaagcctttacaggcaaaaacagccttgcaaagactcctttatataccgatagtctgcatactgaaaccgtacctgaaaaagtgaagaccgtaatgcttgcgcctctttacacaaaacgtgaagcagtctcacctgacttgaaaatagaaaaggttatagacattggcataaaacggctgctccaaaaaaggcttgaacaatatggaggagacatgcaaaaggcattttccaacctcgacgaaaatccgatatggcttgatgaagaaaaaggaatatccattaagcgtgtaactataagcagcgtgtctaatgctgaagcactgcatgataaaagagacaaccgtggacagcttatacttgacaaagatggtaagaagcagcctacagactttgttcaaacaagcggcaaccaccatgtggccatattccgcgatgcagacggtaatcttcaggagcacatggtttcgttttatgaggcaacggcgagggcaatacagcatctgcccataatagataaggaatataacaaagacttgggctggcagttcttgttcacgatgaagcagaacgaatattttgtattcccgaacgaagagacaggattcaatccgaaagagatcgacttacttaatccgaaaaactatgccttgataagtcctaatttgtttagagtacagaaattatcttctaaagattatgttttcaggcatcatttggaaacaaaagttgaatataataaagaattattcggcgttacatggaaacgcataaatacattaagcaaaataaaagatatagtaaaggttagaataaatcaggttggaaagatagaagatttaggtgaatattaattataaaaataatttatgataaagcgcacactatgtttcaccagtccggcttatctctcgttacgcgacgcgcagctcgtaataaagctgcctgaggtggagaagagcgacctgccggacagcatgaagagagacagcacaagaaccataccggtggaagacatcggtgtggttgtgctcgacaaccggcaaataacgcttacgcacggactgctcgaggcgctgctcgaaaacaactgtgccgttgtaacctgcgactcgcgcggcatgcccgtggggcttatgcttccgctttgcggcaacacgctgcagagcgagcgcttcagccgacagatagaagcgtcgctgccgctgaaaaagcagctatggcagcagactgtcaaggccaagattgacaaccaggcggcagtgctcgacaatatttcggggatagaaacaggatgcatgaagcggtggtcggccgatgtgcgaagcggcgaccccgacaatcttgaggggcgtgcagcggcttattactggaaacagatattcagggatgtttcagggctatcgggcttcacccgtggccgcgacggcatgccgcctaacaatcttctcaactatggctatgccatactgagagccgttatagcccgctcgcttgtgtctgccggcttgctgcccacgctcggcatacatcatcataaccgttacaacgcctattgtctggcagacgacatcatggagccttaccgcccctatgttgacagacttgtgtatgacatggcggcaggacacgacactgaagaatattctgaactgacgaagccgcttaagatgaagctgctctccatacctacgcttgacgttgtgattggcggccggcgcagtccgctgatgattgccgccacgcagacggcagcatcgctctgcaaatgtttcagcggcgaactgcgccgcattgcttatcccgaactctaataagagtatggcggctgggcattgacgaaatatgtttctaataatctatactatggaccgattcagcgaataccgggttatgtggatacttgtatttttcgaccttcccaccgacactaagaaagacaaaaaggcttatgcgctttttcgtaagaacttgcgccgcgacgggttcaccatgtttcagttttctatctatgtacgccattgcgccagcatggagaatgccgcagttcacataaagcgtgtaaagtcgttccttcctgaatttggcaatgtgggcatcctctgcataaccgacaagcagtttggcaatatagagatattttatgggcacaaacctgtagagccgaatgctccggggcagcagcttgagttgttctgagacggatgttttttataacctcttacaaataaaaaatcccgtcgtaaggcgggattttcgttttatgcaaacatcatttttattttctgattttctttgtatttgtctatgcatcagatatttacgcatatcgtgatgtttgttattatgcaaagataagaattttaaagcaaatcacaacaggcagtttggtcattgttgaagccattccgatgtttgttattatgcaaagataagaattttaaagcaaatcacaactggagtttgagaatgttgataaaactggcagatgtttgttattatgcaaagataagaattttaaagcaaatcacaactatcaactcatgtcagtggcggtattatatgatgtttgttattatgcaaagataagaattttaaagcaaatcacaactatcgcaatgttggaaactatgccagcggtgatgtttgttattatgcaaagataagaattttaaagcaaatcacaacgggtagcgacgataggagcgtagtggtggagatgtttgttattatgcaaagataagaattttaaagcaaatcacaacagtactcaaatgcgagataacagagtgcagatgtttgttactatgcaaagataagaattttaaagcaaatcacaactcagcgcgagcaggacaagatactcgacttgatgtttgttactatgcaaagataagaattttaaaacaaattatcgatttaatgattaatattgtttgcaataaaaatatccgcagccctcaatgggagagggctgcggatagtaattcttcagatgtccatgcggccgccgttggcgtggcggtccgacgtatgtgtctgtatgggctacattaagtccatgtcctgataagtgtcgctgccgaagtgatccgtcgcgttgtcgtcgtcgaagccgtcgctgtctgtcatgccgtcgtcagtcatgtcatggctgtcgctgctgtcgtcatacggttcgatgtcttcatagctgtaaatgtcgtcgtcttcgtctgccggtgatatgtagggcaggtcgaagtcggtgtcgagctcctcgggtatctcgtatcctccgtctacaagattttcgtagtagtcgtccacctggtcgttggcgtcgagtatttcgcccatggcggggtcgtcggaacacatgtccatgaaagcctcttcctcgtcgggcgtcatatttccgtcgagccatgccgaaaacatgttctcgtcaagggtaaagttgccgtagtcatccatgtcgcatttcctccgttcttagtgtctttaaaaattgttctttagccatcttgtgcttgttgtagaaggtgttcatgttcattcccatcatcatggccgtctcctcgttggtgtgtccgcatagatatcgcagtcttatcagcctgctgtatcttctgttgggcatcagtctcagtatggtttcggcgtcgtcggcctgaagagatgagatgtctaactctatagatgcgggaatggtgtcgattcttacaccctggccgtcaaatttttcagaaatttgttctgtcggcatttttgtcctgcgctcatatctcttgtagcagtagaagaggcacacggcctttagccatgtgaagagcgtgctctggtatctgaacccttcgagcttgcattgtccgccggctttgtcgggagtcattatgtggacgtatatttcgcttataaactccatgcacgacgagcagtctgtgtggtagttgtcgtacacagacttgaagagcggatagcatttacggtaaaagaagtcccttgtgacccgggcgtcgcgctgcagcagtgcccggaccacttcacggtcagtgatattcatgtcagcttatgttgttcttacttcttgccgccgatgagagacttcagcgagaacggctttttctgatagatcatcagttcggccttctcatcgtagcattttacggtgagcacgcccgagcgttctccgtctgtcttgttggggtcggcggtaagcgtcagcttgttgccgtttttggtgacgtcgacccattccgggaaggtgtaggtccagtcgtcgtagttgcagtttaccgtcacctcgtggttgtcgctcttcttgcctgacgacttaaattctaccgacgacaccgacaggctgagccttacggggtctttggccacctcgggcggaacggcagagtcggctttctcgagcacgacggtctcttttttcgtcacggtccttgtctttcgcgttatcagcttgatgttgctcctgcatattgcaatctggttgtcgcacatggccttcttggtgcttgagtcgtaggccttcttggctgcgctgaactttgcaatggcctgtttctgcgagcttacggtctgcttcagctgcagcttctgtccctgtgcaaacaggcggtcgccggcggtctgtgcgttggcctgaagagacaacacggcaatgacaacggttaaaagaagtttggcaatagtactcatagttcaaaaaaaagattatggattataacttaatgcgtctgtaatgttcttaactctggtgtggaattctttggctatatcctgcatgtcgctgacctcaaagtctttagccttggcttccagttcggcctttgccttcagcagggcgtccttggccttgtcgcggttgaggcttatgttcttggtgtcaggcttgttctctgttatctttttggcaatggccagtgcctccatgtatttcttgtaggcgtcgatatagtggcgttcgtatccctcgtcgtgcctgtcgcccgtggcgaggctcttgtcggccgtgagagtgagggtttcggtcttggtgcgcagcgagtcgttggtggcttttatctcgagagctatctgctcctgctccgccttcttgttgtgatatgacacgcctcctatggctattatggcaaccgctatggctgcgcaggcggcagctatggttattcttgtcgacttcttgagctgtcgcttcttgccgtcgaggttttctatcgccacgcgcatctgtgccgctgtctgatagcgcacgttctggtctttgtcggtggcgcattctattatcttgcgcatgccgcggtctttgatctgtgcgagtggaattttcttgtgcagctgtttctcgagcactacgtgcgactgtccttcaaacggcacatggcccacgatgcactgatagagcagtatgcccatggcgtatatgtcggtggtctggttctggtgtttcaggtcgcctatggcaagctctggcgcggcatattcagccttacccatgaaggttccggcagttgtcagtccgcggtcgttggtggtgagcttgttcacctgcttcgctataccgaagtcgatcagcttgatgtgtccgtcctcggtcagcatgatgttcgacgggtcgatgtcgcggtgtacgtatccagcgtcgtgcagcgctatgagtcctgaaagcacgttgagcattatggtttttgcaaagtgtacggagtctgcctgaaactcttttagcagcttcttggcaaacggattctcgtggccgtcggcgtcggtgcacttgccctcaaagatgctcgacagcggaatgccgttaagcagctcgctgacaacgtggtagtgcttgcgtgtcatcgtgccgtgcttagtctcggtttcgatgaatccgagcatctctatcaggttgtcgttgcgcaggcgtattgatgcctcgcgccgtgccctctcgatggcgtgtggcggcaggtcttcataaagaaactttatggcgacggggcgcgatatgttggtcgcgatgtctatgcagacgcccttcatcaccttgcccatgcctccttcgcctattggcggattggcggtgtcaacctcaaaacatatgttttttcttttctcttcttctccctgtagtcttatttttgccatttttttattgttgtttttttcagttctttgcttgtaaaggtgttgtgtgttaataaacaggcaggccgtacttgttctcctcgtcactgtcggtggcaagaagtattatcagccatattgtgcctatgagcggtatcagcgatatgaaataccaccatccgctgtggttagtgtcgtgcaggcgcctgacaagcaccgataggtatggcacggtgagcagcaggatgcataatactgaacagatagataatgatatcgtgcagccgtcgtagcctcccagcagatagcctatgacggagaatatggtgagcgaaacgatctgcacaataaatgtgaaaagccagaaccaccagaattctgacctcgatgcgcgcccgctgaaggtggcatatttgtttatgcatgatctgactgaatctgtgaatgtcatgacaatatgtgttataataaaaaagtgccggaaccgctctgaccgctacctgaggcgcagcatgcaacgcgtcgctgctgcagcctggtgtccgggcaaatccggttctgacacaacgttgatgaaatgttattgattctgctgtgtgctaagttcagaaggagtgaacactacgctcatctcgttgccttccatctcgtagatatactgaagtccgatagaattgcgcgacagtatctttacaagtttctgcattcccggctctgtcagcttctttgacagcgtgctcttcaccgagtctgccgcaacgttgctgaagcggtcgtcgcttacctttatcctgtatgtgaagaggctgtcgccctgcttgtattcacattttgtcagcaccgttccgttagcaaggtctttgcccggctgtgagtttatctcttcaacaaagttctgcagcagttcaatgtctttgttcttttgcttgcagcttacgcacaaagacgccgtcagcacggctatggcggcaaatatgattagctttttcatgttgtgtgtgttttacaggatattaaacgtggtggtgtaaattacgtcgcccgactcgatgacttccaccttgtattcgccggccttccagaatccttctttaggcgagccgaactgtcctaactctatcatctggttcttcttcgacttctcgagtgttactgtcatctccgaggttactttctttcctggcatgcagatggtctttccgttaggtcttgtaaccctcagctgcaggtcgaagtcctgtgccttctctctccatggcgcaaactctatgcgtgcctgtatgtatcttgcgttgaagctgcgcagaggctggtcgtaggccgtcttctccacgccgtcggcatcgagcaggcggaatgacatgttgacaatcttgtcggtgagcacgcttggcggaaggtccttgcgtgcctcctcttccagtctgttcattgattcgcgctcagcctttagagccgtctggtattcgttcttaaagtcggtgtctacatcctcaaatcttgagaagtagcttgaaaacactgccgtgaagtcttcggtctttgcggcatatacctgtatggctatctcaaccttcttgtcttcaacggtaagcttcacggtcttgtgcttgcggtttacctcgttggcagctattatgctgggtatgcgcttatacgacatctcgtcagcgcccaccttgaatgcctttctgtggaaggtgtagagtatgggcgagttttcgtcgaacgttatccagtagagcactccctcgcggcggaagcatacactgttgtcagacgtgtcgacagaaggttcgtatttcttcttctgcaaatagttgtaaagttttagctgtgcgtctttctgagccggagtcagatcgcctgccgatgctgatgccgtaaacgctaaaagcaggcagataatgatttttaaagttttcatcgtcttataggtgttattgttcttattcttttatattatggctgtcctttcgtggttcatgtcgtacactatcatgcgtatgtcaacatacgacggcgtcgacgtcgactttctgagtgttgacacaaactgccgcaggacgttgagcatttcgcttgttatctgttctgatgaaaagttctcgatgtatacggccagggtaacggcatcgttgcctacggttacgctttctattgtcagtccgtcggctatcctcgtggggcactctcttgccgcttgccgccatgctgcctgccagccatagcctccggtcatgttctgccgttgctccacctgcaggctccatttgccgtctgtgtttgtggctgtgcccagcttgcggttgttcttgtcgtagaagacgcatttatactgtgtgcctgccctgtaagagtaaaccagtcggtgccatccctgactgttgtccacggggcggcctccggctccgtagcatgccgtttccgtaagctggttctgcttgttgtacttatattttacggtgctgtatccgcttgccgtgtttgccggcttgccgtcggcgccgtaataagattcgctgcttagcatgcgcatcccgttgtatgtgtatgtatacttgtgtatcttctcgctcttgtcggcaacggctttaccgttgatgtcaaagtatgccttcgaggtgatgtcgccggcttcgttgtatgtgaatctgcactcgctccatccctgtctgccgtttatgctctttccgtatccgtcatagcacattatcttggtcatgttgccccgcttgtcgtagacggtgcggccttcagccgcgatgttgttggctaccacgggcttgccgtcaatgccgaatgaaatctgatggctcaccttgttggcaattctgtcgtactggttgtagtatttgtgcaccttctcgttgtcgcatcctcgtgtgccgttctgcgtgaagaacacttccgatgtcttgtttccgcgctcgtcatattcgcgctttatgacagcaaggttctgtccgctgatgtttttcagcctgccgtcggttccgtagtattcctgttgcacgcacatgttgttcgagttgtatttcatcacctctttgtgatatcccccgtcacacagtgccggcctgtttccgctgctgaagtaggagcgttcggttacgttgtcgcgtccgtcatatttgtatctgatctcatattttcctgcggcaagctttccgtttgtgcccatggaacgttcggccgttacgttgcctttctggtcgaactcccactcatagtatgccactcccgacaccgacatcagttttccgtcggtgttcttgtgcctttctgatatgcagttgccttggctgtcgtactcgtattccacgcgtgagcagaaattgttgagtacgcacgggcggccttcggtgtcgaggaagtagcgcgctgtctcgtttccgttgtcgtcatattcatagcacaccgttgacgctccctgtgacgtcatggccggcttgtccttgtcgtcgaagtaagagaacttcgtgcagtttccgcgggcgtcatattctttggtgaaatagcagaagtgcatgtctgagagcattatgcgctctttggccgcacccatgtaggtgagtcttgccaggcgtccctgcttgtcgtattttgcctccagaccggcgtatcccagtttggcaggtgcgtatatctttccgtttttgtcgaagtaatattctgtgagcatgttgcccagcgagtcgtatgtgcttttcttgtgggcaaagtaagccgtctctacgagttcgcccgacgcgtcgagcagcttgtggtcgataatgttccccttgtcgtcgttgacaaatttctgtttcgaatatgtggcttcgtcatccgtgtcgttgaagtatgccgcatttcctttggcatcgacatacgaaatgcccgacaggtatccgttgtcatcatactcgttgacatatccgctgacgcctttaacgtatgtcagcctgccgtctactccgagatactgtctcttcttgcatgtgccgtcgtcgttgtattcgtagagaatgcccgcaaatgcgtcgtccttgcgtatcatcggctggccgtttatgtcggtgtatttctctgatgtgcggttgccccatttgtcgtaggtcagcagcaccaccgggcagttgttgccgtcgctgctcggctttccgtccaccgtgaggtaaacaatcttagacaggttgccgtcatcgtcgtaggtgaatttcttcacgcctaggccgaattgtgtggccttgggcttgccgtcttttccaagatagtgttcctctattacgcgtccttcgtcatcaaggacatatctgcggccgaagatgccttgtccgtcgggcaccctgacattgccgaatccggcatattcaaccttcacgagatgtccttcgtcatcatattcgagaatgtactttgatatctttccctttccgtcgagagaaacatcgaatgcgctttgaaagagcttcacctgtgcgttgagcgtcatctcggtgccgagttcgtcgtccagcttgaaggtgcaggtcttcatgttgctgtcgtagtcttttacgtacagcaccttgccgctgcggtccatgaatttctcagagtcaacctttccgcttccttcggtgtagagcagcgtcatgtcaactatgcggtctttgtcttcagagtcgtgatggtcaaccagcttgcccttgctgttcacgtacgacacgcggcggagcttgtgtcttgaatactcgaagcggtacgacgcctcgcggtgagacattt

SEQ ID NO: 2207 - DNA, 24185 bp, synthetic construct
  misc_feature 1..24185: note = Synthetic
  source 1..24185: mol_type = other DNA
ccatttcctagtttccttgttactttgtcaccttgttctttctccactaaactacgaaagcgagcagagctcgtggtcctttgttaccttgcaactttgttactttgttactttgttactttgtcaccttgttaccttgtcactttgtccaaagtagttcctccttattaaatataggaccatctttgcacacacacacatgatgtaccgcttctgtgccatcagcctctatttggcggattttctccacacagcaaaggcaggcacccagaccacatgccatcaggttttcaagagatacttggcaggcaacatcttctttttgagcatagctaaccacggccttcatcataggtgtgggaccacaacactgaatcatgtcgaaccgctcctgctgcagaacagaatgttgagtgacgaaaccacgttcaccggctgaaccgtcttcagttgttaccaacacgcggccatacttcctgaattcatcaagctgcaacaagtcggcggcagtacgggcaccaagcagaaaggttacctctacatctttattacatttcatcagcatcgcaccctgatagagcagaggagccacaccaactccacctccaacgagtaagaatctgcgctctcctgccttgggaacagcaaaacttctgcccaacggcaacacacaattcaagatatcaccggcatgaagctttgccaatcgacgtgttccgtcgccgatggcagccaccaacagccacaactcattatgctggcggtcgacaaaatgtatcgagatgggacggcgcaagaatgttgtagggctgtcgtcgacacgaacttccacaaactgacctggctccatctctggcaaccgctcatcactcgtcaggcgaataagcacatagcgagcatgcacctgctcaacggcacttacagtcagatccaaacaatatttcttcataaacaaatctctctgataaggtatcgtgttgcaaagttacaaaaaatcgagcgcagaacaaaagaaaccgtttcttttttatgccgagatgccataacttcgcggcttttgtcgcaaagttacgaataagtaagcgaaatgcaaaacaaaaaccaaagtttttgatttcatttccgaacgagaggactcgaaaacttgttttcgcttgcaccatcaagaatttaggtggaaccaaagatacaaaaaatcgagtaagtaaacaaaaagaaatcgacttctttttttgctgaagagtaaatagcagaaaaaagcagtaggttcgacatcatctgacggcaattgaataccgattgagaaatgtcgaacctactcacaggcgattgttaaagcaaagaaaaaattgagtggaaaacgacacctgcgagagttacttcttgggcaggaacgtttcccatgtttggtcatcaaagaagatgcgaatctcagttatcttacgttgtggtttgtcaatatttttcacaacgtattgctctatgtttttgggtgtagaattaacaccctgtacaaaaccacctgcctgagaggcaatcgatggggcagtagagggcgtctcaaaatcaagcagcgcttctttcgaatcagtagaaccaccagtcgaagctacactttcacctttagacacatctatatacatgggaccattgccgaagagcaaccagtcagttgaaatgctgggcaaactgttcttgatcgcttcgacaatattaagcgatgggttagtacgtccattaaaaattccgctaagggtagcgggggagatttttatgaactgagcaaagacctgttgggtcatgtgctgactctccataatgcgtctgattctatctttcatcttctcgaaaattatgtcatttttctaagcaagtccattttgggactcaaaatagggaaattgctttcggtttacaaaggtaaagcaaatttttgaaacgtgcaactttttaaagaagaatttcagagatagatactttaaattttcgattttaaattattaaatcataaacgcaagaaatgttgatttttgatataaaaacacgaatgtaaatttcaagagtctaaatagaatcgagtaaaaacgtgagtcaaaatttgtaaaatgctgaatttcatagtcgtatttgagcatttaatcatgtaaaacgaccttatatgcacttccagagggataggtaatctgaaaaattccctattaaattaaatgaattttatataaaacactggttattaataacttataagttatcaaaatgggatgcataaatatgtgttcatgattttaaattcgcaaattcaagttttaaaatgcgaatatcaagggtttgaatgtgaaacaataaacttaaatacacgtttacaaaacatcggttattcgaatattcgaattatttgatattcaaaacttcgaataactaaatctaaataaacgtgaagactaaatcgcgcttttcccattttttcaaataatcgccattttcgaagaattctgaacaacggttcaatcagttgaaaaaagggcccaaaatgagaggggtaaaatggccgcaagtgcctgatttcattgggtttgaggccaaaaaaagtgctcctcgggagcactcattctagaaaaaatagcggcattttttgagttaaaacgctcaaattttcaatgcaaaatgaaaaaaatcagctctttcatgagctctccctggcccgtatttggattttcgaagccttttccgcgcgcatcaatctctctcatttttgaaatgatctgcatcgttttcattccgctgtagtttctcatgcccgttatgtagtctcttgccgcccatccagatctgagatccagatgctgcgcaacagcattttcgttcgtcttgttgggcgcataaaatgcaatcatgagattttggaaataattgaagagcatcgggagaatcgaatagagagaaccggccttttgattgttgtcaaaatatttcacaatctgatttgccttgtagacatctctgttgacgatggccgaccggagttcgaagccattaaattctttgctgaccccaatctccttctcaacgatttcgggagtaatccttctgccctctcctgtcaacgaaatgagcactttgtcgagttccgatgtcagtcggctcaagtcggcaccgatgtggtcggcaatcatctgggttgccttgtagtcgatgctgacatttttcgattgcagataactttctatgaaacctggcagctcgcgatcagtcttctttttgctttcgaacaccactcccccatttttctctgtcagagaaatcagcgagctgtttgctttcttgcgcttgtcgagcagtccatttttgtggcacagcaccaaaagggtggtcggtgttggcttctctgcatactttgctagcgcctccatcgaacgcagattctgtgcctccttcacgatgacgacctgccgttcggccatcattgggtagcgacgcgccatgtcggccacctgtgccgccgtggtatctgctccaaaaatgatggtctggttgaagtctcgctctgtctcttccagcgcattttcagcaacaaagtccgaaatcttgtcaatatagtacggctcctcccccattaatatataaataggtgagaacttccgcgcctccagatcacgcatgattgcctcgaacgttggtccaagattctttcctgccataggttgttcagatatgtttatcgtgcaaaattacaaaaaaaacttgttaagttcgctcaattgcatgcagaaaacaaaaaaaatccatatttttgcgaacgaatcagcgtttcaagtgtttgcattattgaaaagcgaaacgaaaagatgacgtcatgacaagcaccgcccttcgcgccaatcaaaaccaataatggatttcacaacaaaaaaacgaacgaacaatgatgaaacgaatactgactaccttcgccctcgtctctgccctactgctgactgttgcggctcaggagaagaaactcgagactggcatgcagaagaccacggctccggagaataatcccgcccccggcacgctgatgctcaacaaggatttctcgccgacagccttagaggctggtgagcaactctactaccctgtcctgctccactgcgacacggccctaatcacgcgcctattccaccaatgggacaaatacgtcgaccaacatcctaccgacgaggccgcgtggcgcaacttctacgaggtctacgaggcttactacctgcgctcgttcaacgccccgggtggtcgtacgaagcaggaactcgcccggcagaccgaccttatggagcggctggcccgcggcattccctacacctacacctacgacatcattgccctgcaggaacaattcaacatggtgggcagtcatgaacacatccgcgcccacatgcacaaatatgccgtcaaagccctcgaacgcctgcccgatgatgcccgcgcctccgacctgcaactgctcatcggcacactctaccagacgggtgacacgacaagcctggagcgtctgctcaacatctacttcgaccgcgacatgtgtccgtcctacgtgctacaataccacttcaacgaacttcaaggtatggagcagaacgccgtctacatcggcacccacgaaggcgacatcatcccgaaactcgtcatccagtacgtcctgcggcaacatcgcgacaaggtgctctacgaccagaacttctgctacgaccacatctacaacgccgcatgcttcagccaactgggcatcgccgagcccgactacgacaagtggatccgttccaatggggtgtggaaccgcctgagcgtgcaatggctctgcgacaactgttcccggcccgtctatttctcggccaacagcatcgccttcatggccgagcactggctcaccaacgacctcaaggcctgcctctacaacgaaggacttacgatgcgctactcccccacgccctacgacaacttcaaagtgaagcgtcagaacatcgacaagcgctacctcctggagtacctgctctactccttcgaatccgaccacgacgtgcaggggcagcggtggaacgacgaccagacctacctcgcgctaaactacgtcatgctcctacaggaccagttgccatggtatgaaaagaacgatcgcgagggctacgaccgcctggctcacctcatccagcgcatcctgaagcagaacaccgacaccgacgccgccgaggaagacatcccgcccacgctgaagttgccgcgactggctttctttagcgagaaggatccgagcaaggaggacaagatgactagcgtgaccgtggaggaagacaccgatgccgacggtaaccgcgtgaaaattaccacccgcaaaaatgcttcgggcgaaacccagaccatgaagcacatctatagccctgacggcaagaagcgcaccgacgtttacgaagacggcaccacgcgcacatggcagttcggcaacctgcccgagggcgtcagcatcgacgacttcatcgatagcatcaacgaaggcagcaccgtggaggaatccgttgacgaagacggcaacaaaaccgtgaccacaaaaaccatcactaccagcaacgaacagacgaaaatctcatggaagaagtaaaaaacacggagtatggggctctctatcagcgctacgcccgtcgcctctacggcttcttcctgcgccaactcaaccacgacacacaggcggctgccgatgccacgcacgaagtcttcctgcgtgtcctggaggctacctcttccgaaaaaacgcatgtagcactcccctacctcttcaccatcgcctacaacctgctgcgcaaccgctaccgccgccaagcctacgagtccaactacctcgccacgctcgaccgccaaccgctggaggcttccgacgtggaactacgcctcgatcgccagacgctactcacagccctccgccaagtgctcgacgaactgccgcccccactccgcctgctgttctcgcttcgttacgaggaagagctcacggtgttgcaagtggcgcagatactcgaaatccccgaaggcaccgtgaagtcgcgcctgcacaaaaccatgatcatcatccgtaaaaaactgaagaaatatgaagaataaagaagttaaaggagttcaaggagtccatgaagttctttctccacttcgttccgaaagcgtcgcttcgcgccgagcgcaaggagtccaagacattactcttgaggatattattgacgccgctcgcgagctgcacgacgaggagaatgcgcagatttcagccaaggacctcgaccagctaatcggtcacaccagtacacatcgccctgcaatgcgtccccgctggtgggcagccgcctgtctcctcggtttcctcgctggctttggcgtgaagagcgccctaccctccagcaattccctcgccgtagtcccctctaccgaaagcacactctctgcagtcccatcctccccccccgacaccattctcctgcgcgaagtcgtccacgacaccgtctaccagacccgtgtcatcgtgtgcgatgccgaaccaaaggcaataaagacagtggtagctcaaaacgaacagaagccggaacccgtcgaaacaacgccctccgttggctgctccatgctctgcgacgacatcccctatgcctatcttgctcataactgacagctgtccagcctccgcgcccttctttcgaaatatttatgtaaaccaaaattattactaacgtaaagacgagtcaacgtaaattaaaaataagtattaaccgggtcaacccctatcgcaaataaggctgaaagtagtcaaccaaaatcgttaaactacattaccagattccttaccgcaatctggtaacgtcgttaccgctatgtggtaatgccgttacctgcatgtggtagtgtcgttaccgctatgtggtagtgaagctaccgacatgcggtagtggctctaccctattgcggtagtggctctaccctattgcggtagtggctctaccctattgcggtagtggctctaccctattgcggtagtaacattaacgtgagttcgacgtaagagttatgcaattagtttgcttttgtcaatgatttcaatattcattgacggctttttgggcagtagattgtaggcaatgaggcctgcaaagagattggttgcaaagttgtcaacagagcggtgcctggtatgttctatctggcagatgttcttgagttcgtcgttgacagtctcgatgaccgaccttttcctgaggaggattttgtcatagagattcatcagcgagttcttcatgttctttttcagctttgtcaccaggtgtatgtcattaacgaagagcatttcgaagaggtcctggctgatataccccctgtcggcgaagagcttcccgaagagtctctcggtgaactccctgttcttcagcggttccctgtcgtcgacgtttcccggtgtgagctgccactggatgatttcccccttgtcgttgatgaccagatgcagcttgaatccgtagaaccatcccatcgtgcacttccccttggccgcccatcccttcatggtcttatgctgcttctcccgcttgatgtggcaggataccaggggcgtggagtcgatgatggatatgcccgtgcacttgcccagggcacaggtctggaggaacagcaacaggtgaagtcccacctgagcctgacgctccacgaagcggttgtaggatacgggattggggaaatccttgcgcatgtgctggcagacataacccagatagaatgacttcaggtcacggaaacggcgcgtatggaacagtatgagtatcgtcatgatctcactgtcggacatgcggctgggacggttgcgatggcgcttgcctggcacctgaatagtatgttttttcaactctggggcaaaaaatttgcagaattcgtcgagaatacagaaaatttctattaaatttgcagtcgtcatgggaatgggtatttgtttgtaactctttgattatcacctataaagttactaaaaatattccattcccacaacttttttaacacttttcttacgtcgaactcacgttaacattaccgacatgcggtagcgactctaccccatttcggtaacaccgctaccattgtcgtttaacgattttggttgtctaaattggtctttgtggtgagttaggataactttggttaaaacttatttttgttgcagatttatcagataatttgtccgttcacaagctgtttttgtgttaattttctgttaaaatcggaatttgctgccatatctgccacattgctgccattcgtaacacattgattatcaacgactcttgcagcagtggcagaattgcagcaaaaataaattatcaggtatgaacatcggccttctcttttgtctgtttggacttataaaaaagccttataagcaaatgacagcaacagggaagccttatttacgattcatctcttctttaattctgaaccacaattcctcaacatcatcctgaagccactctaaatcacaatcttcagggtcgaagtttttaggaatgtcataccattccaaacgatccttgtcttctgccgacttacgtttcttcttattcaaatcgagcaagaatgcatacccccatactccaccacaatcttctggcgggcactccccatgagccttcaacagtttaatctcgggttcctcatcaagagcatagtcacgcgcacccttcacccacatgtcatgatcccatgaatcgccgaaatcgtattgaaacttcatccgctcgacttttggctgtaacaccatttccagagacgttttatcactgttctcatactgaacacgagagaagaaagccataaatccattggcccgttgcttcagttcacgtgaatttaaataaaaaacattactcttcgagacaaactgatacaggtgttcatgcctccaccccatggctttaatcaacacatatgccaatagttccaatgtgatattcgaaggaactacaagctcacgccaaatgttgacgggagcctgattcagcttaatgcgaatatggtactcgcgcttgggcttgccgataaacttgcacttaggaagttgtatgccagacaaatacgcttcctcatcgattgccgagtactcttcatcatctttgccatcttctgaatgtaacaaatactcattcttcaccctctcaccgaactcattcctaaggaaattcatgagatcttcggtgggccacaaagaatccaattgatcattcttgtctaaagaaccgggagtctttttctttaccatagttattgaaaattgttgcttaatagttttgtgttgcaaaaatgatgattatcccctgcggagtacctccgtgaccatttctgagaggcggacatcgagttcgtgactgtcggcaagaacattccagatgccgtcctccgagagcacgccccgcttcagatcgcgtggcagcaagcctgcctcatcggcggcgaaatccttctgccattcctcactgccataataaacgttgagtgcagaaagcgattcctgtgcctctcggtatttgtcgagggctgccgataattccatcaccgctgccgaagcgcggtctaagtgctgctccatttgctggatgcgagccgtttgttctttcgttatttccataggcttttccatttactgactacaaagatacaactttttcttatcctatcgacctttaccgccaacttttttaggttttctttgttttctcggtatttcgttccaacaaaaaatagataaaggtattagacattatttggaaatagaccataaaaaagtccaccgttgaaggacgatggaccaggacctaatgttttcacaacggaataatccttattgtgatttgctaaaaattagtgctgcaaagatacattttttccgtgaaaaagcaaaattattcgtatcttttttgtacttttgtcacataaaaaccataaaagaccataaacaatgaaaagaatattaggtttagacttaggaacgacaagcatagggtgggcacttgttaatgaaaaagaaagtgacaacgaacaatcgtctattgttcgccttggagtacgtgtaaacccactaaccgttgacgaaaaatcaaactttgagaaaggaaaatcaatcaccaccaatgcagacagaagaatgaaacgtagcatgcatcgcaatctccagcgatacaaactgcgcagaaagaatcttattgaatgccttattgaaaatggaatcattagcgaagacactcccctctttgagttgggcaacaaatctacgttcaacacttacaaagcacgcgccaaagctgttgaagaagaaatctccctcgaagacttcgctcgtgttctactcatgatcaacaaaaaacgaggctacaagagcagtaggaaaatcaaggaaacagaagaaggagaactcgtcgacggcatggaaatcgccaagaaactctaccaagaagatatcacacctggtcagctactacttgaattatatcaacaaggcaaaaagaacagacccgctttttatcgatccgatctacaagcggagttcgacaagatttgggacgtccaatcaaagttctaccctgccattctttcccaagaattcaagaagaccgttacaggcctcaacaaaacacaaacctctgcgacattctattccataaaaagcatttccaccaccaagaacagtgggaaggaggcatatgcccaggcgttgcgttggcgtaccgaagctctgtcaaagcaacttgacattgaagaagttgcttatgtgcttgctgatataaatggggccatcaataattcgagtaagcgtttagcaatgatcagcgaccgaagcaaagaactctacttcaaccatttaaccgttggccagtatctcatgaagagccttgagctaaatccgcatgcaagtcttaagaacatcatattctatcgacaggactatctcgatgaatttgagaccatctgggaaaaacaggcacaattccatcacgagctcacccctgagttaaagaaagatattcgcgacattgtcatcttctatcagcgcaatctaaaaagttgcaagaatcttgtcagctattgcgaactggagcatcaagaaaaagaagtcgtaatcgatggaaagaaaaaggtaatcttcacaggctgcaaggtttgtcccaagtcctctcccctattccaagacttcaaaatatggcaagtactgaacaatcttgaagtttcagttgcagaacataaaccccaaaaggccaaagaacaatcacaagcgtcgctatttggtagtgccgaaatgagttctctacgaaggtttctcgaacaagaagaaaaagaaaaacttttcaaggaattatctgtcaaggataagatgaacaagaaagagatcttaaaactcctattcgacaatccacagagccttgaccttaattataaagaggtagaaggaaatcggaccaatgctgctttcatcaaggcataccaggatattatcagctttaccggaaatggtgaatatgatttctccaagatgaaagccgatgacattcttgcacttattaccgaaatatttcagggattaggctatcgtaccgactttcttacattcaatcctcttcttaatggtaaggattttgaacagcaaccatactatcgtctatggcatctgctctactcttatgctggtgacaattcaacaactggcaatgaagcattaatcaaaaagattggggaaatttgcggctttgagaaagaatatgcggccatattggcgagtatcactcttcctctcgactattgtagtctaagtgcaaaggccattcgcaatattctaccacacatgatggatggctacgagtatagcaaggcatgcgagatggcaggttatcgtcattccgctaggtcgatgacaaagcaggaactcgatgcaaaggcatacaaggaccaccttgacattctgaaacgcaacagcctgcgtaatcctattgttgaaaagattctcaatcagatgatcaacgtcgtcaacgaaatcatcgacacttacggcaaaccagatgaaatccgaatcgaactggcacgcgaactcaagaagagccaagaagagagggcgctcctcgacgaagccatcaggaagaccacggctgacagcgagaaatacaggaaagagctggaaaccgaatttggcattcagcatgtcacgaaaaacgacatccttcgctatcgtctctatctggaactgaaaccaattggattcaagactccatattccaacacttacataccccgagaagagctattcagcaaacgtttcgacattgagcatatcataccaaaagcccgtcttttcgacgattcgttctcaaacaaaacgcttgaagtgcgcgatgtcaatattgaaaaaggcaacatgaccgccattgatttcgtctctggaaaatacgatgaacagggcgttgcagaatacgaaagcagagttgaggaactatatgcacacaaggcgatttctcgcacgaagcgaaacaagttactcatgaaggaggccgacatccctgccgatttcctcgaacgtgatttgcgtgattcacaatacatcgcaaaaaaggctcgtgagatattggagggaattgtcccattcgttgtaactacgacaggaaccgtgactagtcgcctgcgtgaagactggcaactagtaaatctgatgcaagaattgaactggaataagtacgctgcattaggattgaccgagtcatatactgacaaaaacggcaacgtggtgaggcacattaaagactggacaaagcgcaacgaccatcgacatcacgcaatggacgcactcacgattgccttcaccaaacgcagcatcgttcaatatctcagcaatctaaatgcaagaagcgataagggcagcagcatctacggcatcgagcagaaggaactccatcgagacgagaaaggacacaaactagtcttcaatgctccaatgccactcgatgagttcagagctgaagctcgcaaacaccttgaaagcattttggtgtctattaaagcaaagaacaaagtggtgaccaagaacatcaacagggcaaagaaaaagaatggccatcaggagaaagttcaactcactccgcgcggtgcccttcacaacgagaccgtttacggcaagattaaaaactatgaagcggaatatagaaaggtagacggtaagtttagcgaggaaaccattttgcgggtatgcaatctgaaatatcgcaatgccttgctgaaacggctttcagaattcaacaacgaccccaagaaagcctttacaggcaaaaactcccttgagaagaatccactttggcttaacgaggaccactcgcattgtgtgcccacgaaagtaaaactctatcgcattgtcgacgtattcactattaagaaagccgtcgataaagacctgaagattgacaaagtcattgataagaagatacgcgaacgccttcaagcacgactggacgaattcaacggtgatgcagcaaaagctttcgcaaatctcgacgagaacccaatttggctgaatcaggaaaagggaattgccgtcaagagagtgaaaatcagaggcattgccaatggagaacccatcagaataaaaagagatgtaagaggcaatagcattaaagatgcgaatggcaataccattcccaatgattatgtcaacactgctaacaatcatcatgttgcggtattcagagatgcagcaggaaaccttcaggaacatgtcgtttctttctatgaagcaacaaccagagcaattatgggttatcccattgttgataaagactacaacagtgatgaaggatggaagttcctcttctctatgaaacaaaacgaatactttgtatttcctaatccaaaaacaggcttcaatccccaagaaattgacctgctcgacgaaaagaacatgccgctcgtaagtcctaatctctatcgtgttcaaaagtttacaacaggagactatgttttccgccatcacttggaaacgaatgtggaatcagataatgtgctaagagatgtcacatggaaaagaataagaagtatcaaggaacttgagagcattgtcaaagtccgagtcaatcacattggaatcattgttgctgttggtgagtattagcatatgatcaaaaaaactctttgtttcagtaatcctgcatatctatcgttgaaagatgcgcagctggtcatcaaactgccagagatagtcaacgctcaaggccttccagaattggtaaagaagcagggagagataacacgccccgttgaagacatcggagtagttgtccttgaccataaacaaataactattacaagcggagcattggaagctctgctagaaaacaattgtgcagtcataacctgtaattctcgttctatgccgactggtttattgcttcctctaagcggaaacaccacgcaaaatgagcggttccgagaccaaatcaatgcctcccttccattgcgcaagcaactgtggcaacaaaccattcaatataaaatcaggaatcaagccaaggttctcaccctttgttctgatgctgaagtcaagtgtatgcaggtatgggccaacgaagtgaggagcggcgaccccgacaatctcgaagcacgcgcagccgtctattattggaaagtactatttggcagaatagaaggattcataagggatcgtgaaggcatccctccaaacaatctcttaaactatggctatgccatccttcgagctgttgtagcacgttcgcttgtggccagtgggcttctaccaacactgggtattcatcatcacaaccgctacaatgcctattgtttagccgacgacatcatggaaccctaccggccatacgtcgatcaactagtctacaacatcgttgagcaatacggcgatgacattgaaatcagcaaggacatcaagtctgaactgctagcaatccccacactcgacgtagtcattggtgggaaacgcagtcctctcatggttggtgtttcacaaactaccgcatcactatacaaatgcttcagcggagaacttcgcaaagtagcctacccggaactgtaacttccatgagcaaccgtcttagtgaatacagagtcatgtggctgttagtacttttcgacctgcccacggaaacgaagaaagacattcgtgagtacacactattccgtaagcgactcatcaaggatgggttcacgatgtttcaattctccatctatattcgtcattgtgccagtatggaaaatgccgaagttcacagaaaacgggttaagtctttcttacccgaatttggaaaagttggtattctttgtattaccgataagcaatttgggaacatcgaactgtttttcggcaacaaacctcaacagccaaacgcgcctggccaacaattagagctattctaaaagtgagattccatccagttggacggaatctcacttttctttgcttctttttttcttttctaaaccccaatgtaaaatcctgataatcaggctattatgcacatcgagatgtttatgcttgtgcaaagatactaattttttagcaaatcacaacagaatgcaaagacgacattttcgaaatgtggatgtttatgcttgtgcaaagatactaattttttagcaaatcacaacgaactcctcggatgagaccattcgtggtgtgatgtttatgcttgtgcaaagatactaattttttagcaaatcacaactacacgggcacactctcgtcaaacgtgagcgatgtttatgcttgtgcaaagatactaattttttagcaaatcacaacgccctgaatgaaatcgttcagaactcaccggatgtttatgcttgtgcaaagatactaattttttagcaaatcacaacttgtcgggttcggtgtcataagcctctattgatgtttatgcttgtgcaaagatactaattttttagcaaatcacaactcagtttcttattttccattatcaaaatcggatgtttatgcttgtgcaaagaattatcaaaatcggatgtttatgcttgtgcaaagatactaattttttagcaaatcacaaccggttgccatcgctccaaggggcgaaggtggatgtttatgcttgtgcaaagatactaattttttagcaaatcacaacacttatgcttcctctttcttattcaattcggatgtttatgcttgtgcaaagatactaattttttagcaaatcacaacccaccttcctcgtggccagggaatggctgtgatgtttatgcttgtgcaaagatactaattttttagcaaatcacaacggtcgagttcggcatacacctccgcgtggggatgtttatgcttgtgcaaagatactaattttttagcaaatcacaacagtcctgctgttgctcttggttctggtgttgatgtttatgcttgtgcaaagatactaattttttagcaaatcacaacaccagcagtgcttttgttctcatcatttggatgtttatgcttgtgcaaagatactaattttttagcaaatcacaactcagtttcttattttccattatcaaaatcggatgtttatgcttgtgcaaagattgtgcaaagatactaattttttagcaaatcacaactaccaatcagaagcattcacacaagtaagagatgtttatgcttgtgcaaagatactaattttttagcaaatcacaactgttctccctgggcgccttgttctccctgggatgtttatgcttgtgcaaagatactaattttttagcaaatcacaactcccttctgccattcaacactcgcccacacgatgtttatgcttgtgcaaagatactaattttttagcaaatcacaactggtctgaatctttcatctctgccctcgggatgtttatgcttgtgcaaagatactaattttttagcaaatcacaacggcgcggccgtagagatgattacgcgcctagatgtttatgcttgtgcaaagatactaattttttagcaaatcacaacggcagcgactgggcgacatcgaacaagaacgatgtttatgcttgtgcaaagatactaattttttagcaaatcacaactagcccgtgtcaggatgcaccgccagcgtcgatgtttatgcttgtgcaaagatactaattttttagcaaatcacaacgacccgtcgcagttggaggtggcggggattgatgtttatgcttgtgcaaagatactaattttttagcaaatcacaacaaatagatactgtttaattgcatagtttttgatgtttatgcttgtgcaaagatactaattttttagcaaatcacaacactcttcttctttggcttctcgtcggctgggatgtttatgcttgtgcaaagatactaattttttagcaaatcacaactgcacgctcaagttgtttcgacacgtcggcgatgtttatgcttgtgcaaagatactaattttttagcaaatcacaactccgcatcaatctccacgctcgcctgcacggatgtttatgcttgtgcaaagatactaattttttagcaaatcacaacttgtgatcgtcatcgactgacccatcagacgatgtttatgcttgtgcaaagatactaattttttagcaaatcacaacagtccggcgttgttgatgcttgaaagtgggatgtttatgcttgtgcaaagatactaattttttagcaaatcacaacgacatcatccgccacctctaccctgacgctgatgtttatgcttgtgcaaagatactaattttttagcaaatcacaacctccttgacgttgacgtaggtgggaaccgggatgtttatgcttgtgcaaagatactaattttttagcaaatcacaacccgatacaatcagtacccttgcggatatcagatgtttatgcttgtgcaaagatactaattttttagcaaatcacaactttctggacttcggcatcaggccgtactctgatgtttatgcttgtgcaaagatactaattttttagcaaatcacaactgaaatatgccgagatgctctccggctggagatgtttatgcttgtgcaaagatactaattttttagcaaatcacaactggcgttcctcggggctgtctggttcttcagatgtttatgcttgtgcaaagatactaattttttagcaaatcacaacgtttctatggtcaaatactatgttagttgtgatgtttatgcttgtgcaaagatactaattttttagcaaatcacaacgggtgcgagctccgggaatgcggggctgtagatgtttatgcttgtgcaaagatactaattttttagcaaatcacaactgcccttgcttttcaagccaagaaactatcgatgtttatgcttgtgcaaagatactaattttttagcaaatcacaacgattgtgttgtgaatctttgcgatggaggtgatgtttatgcttgtgcaaagatactaattttttagcaaatcacaacaccttcatgcccgatgaataatgacaagagatgtttatgcttgtgcaaagatactaattttttagcaaatcacaacattccgatgatggtttccgtgtcacgcatgatgtttatgcttgtgcaaagatactaattttttagcaaatcacaacgtatagcacgaggtcgttcgtggcggtgcgatgtttatgcttgtgcaaagatactaattttttagcaaatcacaacgatggtgcgagctatctcctcgcgcacattgatgtttatgcttgtgcaaagatactaattttttagcaaatcacaacacgcgctggcggtcgagctggtcgctcatgatgtttatgcttgtgcaaagatactaattttttagcaaatcacaactatggcgttggttctactacatcaagcagtgatgtttatgcttgtgcaaagatactaattatttagcaaatcacaactcagccagcgacatcaaggagcgcatgaaagatgtttatgcttgtgcaaaggtactgaaaaagattggaaaggggaagggaataggaggaaaaatgtggaggacgaaaagaaaagattggagattctattgcattttgctcacttattcgtatcgttgactacggtcgaaggtacttttgcttagaaaaactcaaatacatttggtttttctctcctttattcgcctttggctatcgccgaaggtactttcgttcggaaaaggaatcaaaaactttggtttttgctttgcttttcgctcacttattcgtacctttgccaaaaatatggcagaactgaaccttcccccctactctgtccgactgggcggaacacaagagcggccgaccatcttcgacgtgctgcgccgacgctatgtggcgctgacgcctgaggaatgggtgcggcagcacttcgtgcacttcctcatcgacgagaagggctatccgcagacgctgctggccaacgaagtgagacttgcagtgggaggaaaaacgcttcgcgccgacaccgttgcctacgaccgcgaattgaaacctcgcatgattgtggagtacaaggcaccgaccattcaactgacgcagaaagtgatggagcaagtgtcggcctataacctgctattgcacgtagacttcctcattgtctcgaacgggctggaccattattgctgccgcatgaactatgagcagggcacctacgaattcctgaccgaaataccaacctacgaacaaatcatttcaacatgaaaaaactattggccatcctgtttttggcacttactacggtgagcagccatgcacaaaccgctggcgccaagcggctgtttgagacgattgaaggacgggtgccctatcgcattcctgccatcgccacgtgcagcgacggaacattgattgccgttgccgactaccgctattgcggcggtgacattggctatggggctgtcgacctgcactaccggctgagcgaggacaacggcctcacatggggcacggagcgaatcctggctgacggaaccggcaacgaagatgatgtgaagaatccacagacggcgtggcgctatgcctttggcgactgtgccatcgtggccgacagggagagtccagaggtagtagtgctttgcgttggcggcaagaccgtctacagtcgtgccactcggcagaacccaaatcgtgtagtgctcttccgcagtcacgataatggtcgcacatgggaccaaggtcgcgagctaaccgaccagatctattcgcttttcgaccgcagggcagaaggtcctgtgcagagtttgtttgtgggttcgggcaagattcatcagagccgctacgtgaaggttgggcaatactaccgcctttatgctgccctgtgcacgctctcgggcaactttgttgtttacagcgacgacctcggcaactcatggcaactgctgggcgatgccgaccactcacctgcccgcgacggcgacgagccgaaatgcgaggagttgcctgacggaagcgtgattctgagttcgcgctactatggccgtttgtataacatctttacatttacgaatgcagagaagggcgaaggctcatgggatctgcgggcgaaagctctcgacatgaaggacattcgcaacgcgtgcaacggagagatcatgttgctgcccgtcactcgcacaaaagatgaaaagaaggtgtggatagccctgcagagcgtgcccttcggccccgaccgccaaaacgttggattctattatcacgaattgcttgctgagcacgagggtgccgccctgttcgcctaccgttggaagaaaggtctgcaggtgagccatcagtggtcggcctacagcacttttaccctgcagcacgacggtcgcttgggcttcctgtgggaagaaggccccacgggctataacatcgactatcgcgctttgtcggtcgaggagattacaaacggggagtatcaataaatgtagggacgcgacgtgtcgcgttactggagccgggaatgctaatcgaaactgaaaaatgtagggacgcgacgtgtcgcgttactggagaggaaaaaccaatcaaataacgcgacacgtcgcgtccctacatgaaaaagcgagtatgaaccatggagaaacaaaaatcactcaatgacccatgcaagcaatacagaaaaacgcctcgcgccaaatgggccgattacaatgaaggcgactacttcatcaccgtatgcactaaaagcaaaactcacttctttggggaaatccatgatggtgaaatgcatccgtcgagcattggacaagtcctctcagaagaactctcagattctgaaagacatcatcctggcatcaaggtactttcctttgtcgtgatgcccaaccatttccatgcattagtaagaattgagaactgcgaagccgcacgccgagtgctcagttgcgacgaaagagttttcttaagtgtagggacgcggcgtgccgcgttatcgcataacaggactcccctactgtccaccttcattggagggctgaaatcagccgttacacgctgggcacatgccaacaacataccttttgcctggcaaccccgctaccatgatcatatcatcagaggagaaaaagactggaataacatagcagactacatagagaacaatgttacactctggtctttcgattgctacaatgaaaagatgtagggatgtgccgtgttattgggttgagtatccctactccagtaacgcggcacgccgcgtccctacatgcataaactactcgtagagctggaacatgcgctccatcatctgccacttctcgtcgctggtggcggtgggatcgcagttttggaagcaggccatatactcctcccactcctgctggcgcggcagcgtggcaagacgtgccatcgccgaatcccagtcgaagtcgagcggtgtttcaacgatcatcaccagacgggtgcccaggatgtagatatccatttccagaatgcccacctcgcgaatgccggcttgaatctcaggccaggcttcgccacggctgtgacgtttgcgatactcggctatcagcgccggttcatccttcaggtccatcgtctgcacatagcgcttcacgggcacctggtattgtttcattacgtttccttcggtcataatcattgtcgcttcgcgacgtttaaggttcaaagtttaatgcccttcgggcgttgaaagttcaagtgtcgctgtcgcgacgttcaaaggttcaatgcgccggcgcagatcaattgtcgctggcgcgacgttcaaagttcaacgtacaattgttgcgactgcaaatataatcattttttctcatttccactccactttccttgcttttcttcgagtttttttaagagtatcgacgtcaggataaaacggtgaggatgaggactgtctgtgagtggacaaaaaaacaaatgacaactgaagttgcaaagggcgttatttggtgattgcaggaatttttcgtatctttgcagtcagaataaagaaaggacaagcatgccgaaagaaaggaacaaggcagatgcctaccgcgaaaaagcttatgagggcgacacccgggcgatgaacaacctgggggtgtgctacgagcgcggcacgggcgtgaaggttgacctggagattgccttccagtggtatatgaaggcagcagaactgggcgacgtctacggttgcttcaacgtcggcgagtgctactatcacggcaagggcgtggaggcggatgccgagcgggctttccaatggtatatgaaggcggctgagatgggcgacatgcagtcgcaagtaaatgttgccaatgcctactatctgggaaacggcgtggagaccgaccaccaccgggcattcctttggtatcgcgaggcagccttccagggtcatatcctcagccagaagaacgtgggcgctgcctattggaacggcgacggcgtggagaagaacctgcaggagtgcgtgttctggtatgagctagcggccaatggcggcgatgcacaggcacagttcgccaccggttggttccttatgacaggcacgggcgtgccgaaggacgagcgcaagggccttcgttggatccataagtcaaccttccaaggctatcagcccgccatcgactattgcaaggaacatggcctgagttggtactaatcatcgacagccaagccatcaaaacagcatctttcttaccctcctttctttatttttctttgattctgacacgcacgacaacacccctgcaacttctgaatcatcaatcagttttcccttctcctctttctttgcatccccaacgcaatgcctcatgtcggcagagcacgactttcgcgtgcccaaatcatcgcttttgtggtactggaacaatgctttcgtgatgctggaacaatgctatcgtgacacaagaaaaatactcccatttagtaaattaagtgattttattcagtaaattaagttattttatgttgcaaattaagttaatttactgaacaaattaagttaatttacagaacaaattaagttaatttactgaacgaactcaatgctctaggataataaaggcatgcatccagctactccaaaacattgttatagcaacacaaaagttatcttcctgcaacatcaaaccattgttccagcaatatcaaagcaatacttggccgcgactggttcgccgctcctccacaccactttgctaagtatttggaaactatatagaatttgtcccctgaaaatgtagggacgcgacgtgtcgcgtaactggatttagctttccccttccaatcgttcggcttttcccctccaagaacgcggcacgccgcgtccctacatgtgagggccaataaatattattttcactcttcccatgccagttttcctgcttttcagcgttatatataaagaaaaaaaacaaaaaattgagaaccgccatgcagtcttttccgtcgcaacaggactctatcaatggagaccttttgtccacgatggaaatacaacagctcatcagacaatgccagcaaggcgacgccgaggctcttggcgcgctctatcagacatacgcccagcgcatgcgaggcgtgtgccggcgctacatcagcgacgaacaggctgttgacgacgtgttgcacgatgccttcgtcatcatcttcacctcgttcgaccggctgcgcgacccacaaaaagcagaggcttg

SEQ ID NO: 2208 - DNA, 24182 bp, synthetic construct
  misc_feature 1..24182: note = Synthetic
  source 1..24182: mol_type = other DNA
ccggggaaagacacctcctgtaaaagtttgtttgtctttaaagacacgttagcttttaggttttcttactcctcgttagcacgaagctgctgaacgtagatagcgtgttccatcttgagacgcttcagtacagacggcttgttatactgctgacgagcacggagctccttgataacacctgtcttttcgaattttctcttgaacttcttgagagctctttcgatgttctcaccatcttttaccggtacgataatcattgtttttgctttacttttttaaatttgactttaatttatttcttttcaaaaatggctttcaccactttcggactgcaaaattactgcttatttctcaaatacacaactatttagcccattatttgcgttttcagctactaaaaacacgaaaaaggcgctgtttagcgtcatttacaacggcgcacaagcctcgtgcaaccacgcacgctcatcttcatcaagcaacgggctcaaacgctcctctaccatggcatgatattggtcaagccattcacgctcctcagatgtgagcatgtccacatctataggtgtcttgtctatggggcagagcgtgagaggttcaaactgaaggaagcgtccaaactcggtttctttgtaaggcgtgatgagcagcgtgttctccgtgcgcacgccgaagtggccttcaagatacaggcctggctcatcggtcacagtcatgccggcatgcagaggggcgggtttccactcctgacgtatctggtgggggccttcatgaacgctaagataagaacccacgccgtgacctgtgccgtgcatgaagttcatgccttcacgccacatcgccatgcgcgccgctgcatcgagctgcgtgcctgctgcaccatcaggaaacttgaggttctgcaactgtagatgccccttaagcacaagtgtgtagacacgtcgttgctcctcgctcactgacccaagggcgatggtgcgcgtgatgtcggtagtgccgtcttcatactgtgctcccgagtcgatgagcaccagtccgtgaggcttcaacgcggcatcagtctgctccgtagcttcataatggacgatggctccatgttgctcataaccggcaatggtgtcgaatgacacatcgcggaaaagcggctgttcggctctcaactgcaagagcttatcagcaatgctcatctccgtctgaccgccctgctccaccgctggcttaagccaacgaagaaagcgcgtcatagccacaccgtcacgcaacatggcgttgcggaagcccttgatctcagcctcgttcttcacggccttcatcatgggcacgggcgatggtgcgcgaagcacattaagcttcgaggcggcacgcatgagcgtgtagtttacctcgttggggtcgagcaatatgttgtaagcatgataatggcgcaaggcgtgagccacgtcggcatagctgtccacaccaatgccctcgcctttcagatactccaagacctctggcgtgagcttctccttatttatatataacgttgtttcgtcgggagcgacaagcagataagccacaaacacgggtgtgcaatgaacatcggtgccgcgcagattggtgagccacgcaatgtcgtcgagagcacacacgagcatgccgtcagcatggcaacatgacagctgtcggcgcagacgtgacagtttgtcgcttgctgactcgccagcatagcacatcggctgcacctccaccttgttgtcgggcacggcagggcggtcttcccagatctggttcaacggatcgagattggtgcgcaacgtcattccgccattggagcgcaggtctgcaatgagcgcctccacctcagcagaagagcagcaagagccatctatcgccacctctgtaagcgacgttgtctcaacctgttgccacaaccactgggcaatggttggcgttcccgccactctctctttcataagttcaaaccctgtgccgctcaactggttagcggcggctataaaatagcgcgagtcggtccacagggcggcactgctcatggtcaccacagccgtgcccgccgacccgtcgaagcccgaaatccattttcgtccctcccatcgtgctggcacatactcgctgttatgcgggtcagtgcttgggaaaatgaaggctgcaagatgctcgcgtttcatcacacggcgcagctgctcaacgcgttctgctataatattagtcataaagaatggtgtttttgtaaaattcacattacaaagttacgatttttaagaaataacaacaaattaaactcaaaataaatggtggatataaatctattttttataactttgcaatcggaaaggttagccgagcctcataatcgcttccaaagaggaagattgaagacaacatggcaaccctgcacagatgtgccaaaccgttatggcacactatttgcaaatcaacagatagaaagcttaaagacaaaagtttaaaagctacaagacataaagcttaaagacaaaaagtcgaaagccgaaaaggaaagcttaaagacgaattgttcaaataaacttaaaaatataatttagttatggcatttttaactaacgagaaactcgtgatcgtcggagccggcggcatgattggttcaaacatggttcagagcgttcttatgctcggtcttactcctaacatctgtctttatgacatctatgagcccggtgttcatggcgtgttcgacgagatgcagcagtgcgctttccccggtgctaacatcacatacaccgttaatcccgaagaggctttcacaggtgctaagtatatcatctcttcaggtggtgctccccgtaaggacggtatgacccgtgaggatctgctcaagggcaactgcaagattgctgccgactttggtgacaacatcaagaagtattgccccgacgttaagcatgtggttgttatcttcaaccccgccgacgttaccgctcttaccgccctcatccactctggtttgaaggctaaccagctgacctctctcgctgctctcgactctacacgtctgcagcaggctctcgccctcgagttcggcgtacagcaggataaggttactggcgctcacacctacggtggtcacggcgagcagatggccgtattcgcttcacaggttaaggttgacggcaagcccctcgctgagatgggtctgtctgacgagcgttgggaagagatcaagcaccacaccgtacagggtggctcaaacatcatcaagctgcgtggccgctcttcattccagagccccgcttacaacgctgttaagatgattgaggctgctatgggtggcgagaagttcactctgcccgctggctgctatgtaagcgacgagaagctcggcttcaagaacgttatgatggctatgcctaccactatcgatgccactggtgttcactacgctgagcccacaggtacagaagaggagatggcagctctggctaagtcgtacgagcacctgtgcaagatgcgcgacgagatcgtagagctcggcatcgttcctcccgtagctgagtggaaggaaatgaaccccaacctctaatttgttttagagacctgtctttcgcaaacatttatttgttaaagatatatttaaaggatgaagcccatacctattgggcctcatcctttttttattgataagtaggtgttcaaaattaatcgcatatctgaattttacaaggccaacacaaaataagaaataagggtataattatccgaaataaagacacatggttattgaattgttttttgtaattttgcaaaaacaacaggaaatttcagtaaaagcatgaagacaattaaggatatgacatttggcggcgagcgtccgctgttcgaatcgcacaacctgcgcatggagaacataaccatcaccgatggcgagtcggccattaaggagtgtaccaacctcgaagccgacggctgtagattcttcggcaaatatccgtggtggcacgttgatggcagcgtgataaccaactgctactttgccccagagtcgcgctcggccatctggtattcgtacaacatgacgatgcgcgactgcgtgattgacggccccaagtttttccgcgagatgaagaacgtggagcttgagaacgtcaccattaacgatgccgacgaaaccttctggaacgtagagaacctgaagctgaagaacgtgacgcttcacgatggcacctaccccttcatgggctgccgcaacgtggaggtggacggactggtgagcgactctaaatatgtgttccagtatgttaagcacgccgttatacgcaacgcaaaaatcacgaccaaagactcgttctgggagaccgaagacatcaccgtctacgactcggtgctcgacggcgaatatcttggttggcactcgaagaacctgcgcctcgtgcgctgccacattgccggtgagcagccgctgtgctacgccgagaacctggtgcttgaagactgcaccttcgaccctgcctgcgaccgcgccttcgaatacagcaccgtgcaggccaccatcagcggacacatcgagaacatcaagaacccgacaagcggacacatcgtggccgacagcatcggctcaataaccatcaacgagaacgtgctacagcctgccgactgtaagattgagacaagaaacaaagcataaaggttatatgcttaagtaggtgtttttttgtatttttgcaaaacaaaaggacgttatgacacaatttaattttgacaaactgacccagcgacgcggcaccaactcatacaaatgggacgagaccgacgaccccgacgtgatacccgtatgggtggccgacatggactttgagacagctccttgcatcgtcagggcgctgcaggaacgtgtggcgcacggcatctttggctacaccttcgtgccagagagctattatgaggccgtgatcagttggttccggcgccgacaccattggcgcatcgaccgcagctggattgaatatacatctggcgtggtgccagccctctcggccaccatcaaggccctcacgcaaccgggcgacaaggtgctggttcagacacccgtctacaactgcttcttctcatccatccgcaacaacggttgcgagattgtggaaagccccttgcaacgctcggccaacacttatgtcatcaactttgacgacctcgagcagaagctatccgaccctgccgtgaagctgttcgtcctctgcaaccctcacaaccctgcgggccgcgtatggacacccgacgagctgcgccgcatgaacgacctgtgcctgcgccataacgtgcgtgtggtgagcgacgagattcactgcgagcttaccatgccaggctacacctatacgccctttgccagcgtgagcgacgagtgtctcaacaactcggtgacgctcaattcgccatcgaagtcgttcaacaccgccggcctgcaaattgccaacatcatcagcaacgatgccaccatacgccaacgcatcaaccgcgccatcaacattaacgaggtgtgcgacgtcaaccccttcggcgtcatagccctacaggctgcctacaacgagggcgaagcatggctcgacgctctgaaagcatatctccatgccaattacgtcgccctgcaagccttctttagcgagcatctgccacagcttgccgtgaccaagctcgagggcacgtaccttgtgtgggtagacataagctccacgggcctcgatgccgacacgctgaccgaccgtctgctacacgaagccaaggttatggtgaacagcggaacgatgtatggacgcgaggctggtaagcagtttatacgcatcaacattgcctgtccgaaagcacgactgatggaagcattgaaacgcataaagtttgaaatatacaacctgtcaaccctttaaaagatatgagagacaattataaatttgagatttgcgccaacggcgtagagagctgtatcgccgcacaagaaggcggtgccgaccgtgtagagttgtgcgccggcatacccgaaggaggcactaccccatcgtatggtgagataaagaccgcacgccgcgtgctcacgacaacacgtctgcacgtcatcatacgtccgcgcggcggcgatttcctctactcgcccctcgaactggagcgcatggctgccgacatcgacattgcccgtgagcttggagccgacggcgtggtgtttggctgtctacgccccgacggcagtcttgacaccgaggccaacgccatgctcatggagcacgccaaaggcctgtcggtgacctttcaccgcgccttcgaccgttgcgccgacccgcgcaaagcccttgaagaactgatagcccaaggcttcgaccgcattctcacctccggccagcagcccacagcccttgagggcacccccctgctgaaagagctgcatgagcaggccaatggccgcatcattctcttggccggttgcggcgtgaacgaacaaaacattgcaaccatagcacaggcaacagccattcacgagtttcatttctcggcacgcacagccgtaaagagcaaaatgatgttcagcaaccccgatgtctacatgggcgccaaggatgccgatgaagacacgctaaacataacgtctgccgagagagtggccaacaccattgcgcagctgtgcaaatagagagtctcgcaacgtgacgaaccatctgtataaaaacgaaatgacgaacctgaaaatgctcgccgtatggctcagccgcataggccactgccgcggattcggtgtgcagtcgccgtcggcttacgcgttcatacgctacgtcataaacgagcattatccttattatgcttacgacgacatgcttaaggcgtggcccgacatcaaagggctgcgcctcaagctgtgccgtctctattttcgcttggccaactatgcacaagcccagcaatgggcatggtgcggcacattgccggaagcagagagacaacacatcggtcgcggatgccacaacacaaaagttgagacgacgcaagcatcacaaccggcacagccagccatgctgtcagccatccatgccaacgccacagtaggcatagtctctctatctgccaccgaagacgagcgccaaacgtttgccgaacagtttgtttcagcaaaagcctgcaaccgcgacaacggcaacgcccttgcaagcgccggaaacgaagaaaagacaatgctcataatagaaggcattggccacgacatcacagcaaaagccatctggcaaaagcttgtcaacgacagacgtgtgggcataaccttcgacctctactactgcggcatcgctttcttcgacaagcgcttcaagcaaaattacatcgtaaatttctaacccaccacgacctaacaataaagacaatgacaatctacacacgccatggcgacaaagcccaaaccacaacgttcgacggcgacagggtgctcaagacctcacccaccatcaacgcctacggcgacattgacgagctcacatcacatctcggtctgctgaaagctctcatggctcaagcacaagacaaagacacgcacaacgacagcatggcagacgagcaaacatacatagagcatctgcaacgccacctccttgccgtgggatggtgtctcatgagcaaccagtccaccgcagaagtgtcctttaccgacctcacaaaagagatggagcaacgcatagacctcatcaacgccaagctgccaccccttcacacctttgtcataccaggcaacaccgtggccgaagcccaatgtcatgtctgccgaacggtctgccgacgagccgaacgagccatcgatgccgtggcagaagagagggccataaaccccgatgtgcttgcttttatgaaccgtttttccgattatctcttcgttttagcccgcaaattaaactttattgcacataaggaagaaaaaagatggaataaaacttgcagataagaagaaaattactatttttgcagccataaaaacaaaagtacgcccctaaacaaaggacaaagcatttaaaaacagacaataacaacaaaaaaacagaacaatatgtattggacacttgaacttgcctcaaagctggaagatgcgccatggcctgcaacaaaagatgagcttatcgactatgcgatgcgctcaggcgcgcctttagaggttttggaaaacttgcaggagattgaagacgaaggcgatgtgtacgagagcatcgaagacatctggcccgactatcccacaaaagaagatttcctcttcaacgaggacgaatactaaaagcttacgagcctggctgtgcgccagcttaaagcacaaaaatataagcggtatagagatttcgcaaagaaatgtctataccgctttttcagttctactaccgccaaagacagggcgaaccaaacacaatgaagtttgcttctttgtttatccgaagttcttgagttctgtaaggttctgacttatctccaacatcgtagtcttatgtttcaaatatccaaaataagcacatgaaacgcctgctattacaccgagaaggtcaaagaacagtccgaatgaagagattgtgtgctcaaagtaatccgtggcaaagatgcccaaaacgcccagtggtacgccaaccacagactcaaagaaatagcaacgcttgtagttgataagattgcatagttgctcagtaggcgtcttcattacattgaaacgataaagcactgtcagtctacaagccaccatcactacgccaagaagacataccatctctaaaatgtagaacgacgtgtcgcggaagattcccatgctatacaataaaggtaagatgacagatgcaatagaaagcgtgacaaagaagttgaacatcccctgcttctgtagtttctcgtaggtagtcttattcttacctttgattacctcttccaaaactcgtttgttatagacctcactctttgagagtcgctcatcgagcatattccacttttgtttcaaatcttctaattccataatagttttctgattttaatgattagacatttcccttagcttcgtcttgacacggttgatgcgcgctccaacgttcgatactgatataccgaggattttcgctatctcttcatagctcttatcgtcgagccacagcagaatcagcgcgcgttccaattcgccgagctggcttatgagctgatagagtttttgaagttgtgccctttccgattcctcaggaaagaggtcgcccatcgacatcgtaaggctcacagtctctggtcgctttatgttatgacgcaggtgtgagatgcaggtgttcacgctgatgcgatacacccatgtcgatggtttgctctcgcttctgaatcgcggaaaggcagtccagaggttcagcaccacctcttgatagaggtcgctgatggtctcgtcatcggtggcatacatgaagcagactttatatatcacctgcttgtagctgtccaccaagcttagaaacttttgttctaattcgcttttttccattttaaacttattcttatcgttcgactctttacctcattagtcgcacgacaattagaaaacttacacacaaggaatgattttattaaatctttgtatcacactaatgcaaattcatcggtaaagttacttcaaataattgagacatgatggcaatgaagaaaactttaaacaccgacaaataattgccaggctgaattactactcctctcagcttctgccccctggatatgaggataaaaatattcgttattagctataccgttagaaaagagaggcttaacaaacaaaaaagcccaccgttaaggacgatgggcgaacctaatgttttcacaacggaataatccttattgtgatttgctcaaattcatgctgcaaatataacgaaaagcaatcatacgaccaaatatttttcggattttatataacttataaaattattattgctaaatttgtaatctattactaaaaaacactgcacattaagcaacaacccataaaaaagaataatacatgaaaaaaatattaggtcttgacttaggcacaaccagcataggatgggctttggtaaatgagaaagaaaacgacaacgaacagtcgtcaatcataaaacttggtgtaagggtaaaccctctttctgttgacaaaaacgagcaatcaaactttgaaaaaggaaaggccatcaccactaatgcagaccgaacgctgaaacgcagtgctcggcgtaacctacaacgcttcaagttgcgccgcgaaaacctattgacgttattaaaagaacacggtttcattacagacgagaccgtgctttgcgaacaaggcaaccgcaccacttttgaaacgcgccaactaagagcacgagccgtgagcgaagaaataacccttgaacaattggcacgtgtgcttttaatgataaacaaaaagcgtggttataaaagtagccgtaaagccgattcaggcgaagacggcaaactcattgacggcatgagcgtagcacgtcagctgtacgaacagcacctcacaccaggtcaatatgttttaaaccttttgcgcaaaggcaagaaatatttgcccgacttttatccctccgacctcactgccgagctgaaggccgtttggcatgcgcaacaagcctattaccccgaactgctgacgcaagaactttttgatgcgctaaaaaacaaaaacgagaagcagacatgggccatctgtgcgcaaccgttcggtataaaaggcatgaaacgtaacggcacaacagccgaacagaaggcagaaaactatcgttggcgttcagaagctttagacaagaaaatagggttggaagagctggccatcgttctgcaaaagattaacggtcagatacatggcacaagcggctacctcggagcaataagcgaccgcagcaaagagctgtattttaaccaccaaacagtggggcaatatcaaatgcaactgcttgagaaagacccaaacacgagcttgaagaaccaagtgttttaccgccaagactatcttgacgagtttgaacgtatatgggagacacaagccacttatcacccggagctcaccgccgagctgaaacatgagattcgtgacatcgtgattttctatcagcgtcaactgaaatcgcaaaagagccttgtgggctattgcgagctggaaagcaaaccgaaagaagttgtggttgacggaaagaagaagaagacaataaccacaggtctgcgcgtgtgtcccaagtcgtcgccactgttccagagctttaagatatggcaaacgcttaacaatgtgcaagtgtcgggcaacatcatccctgaaaaacagctcgacctgttcggcacggcagcaacctataagtatggcagccgctgtcttacagaagaagaaaagcagacattatataaagagctgagcctaaaagagcgcatgtcggcagccgaaattctgaagttgctgtttaagagcggaaaggggctgagcctcaacttccgcgaggtagacggcaaccgcacaatggcggcttttgtaaaagcatgccaaaccattattgtcatgagcggacataacgaatacgactttgcaaaactgtcgtatgaaaccgtcgagtctaccatcaatcagatattcaatgcgttaggaataaagtctggtttcctcaatttcgacccatgtcttgagggcaaagcgtttgagcaccaacctgcctatcagctgtggcatctgctctactcgtatgctggcgacaactcagccactggcaacgagaagctcattacccgcattgcagagacctttggcatggaacacaactttgctgccgtgtttgcagccatcatgttcatgcccgattacggcaatcttagcgccaaggccatgcgtcgcatcttgccttacatgatggacggcaacgaatatagcgtggcatgcgaatatgcaggatacagacattcacgccgctcgctcacaaaagaagaacttgacaagaaacctcttgtcgacacgttgcctctgctgccacgcaacagcttgcgcaaccctgtggttgagaaaatccttaaccaaatgattaatgtggttaatgaggtgtcggcacaatatggcaagcccgacgagatacacattgagatggcacgcgagctgaaaaagagtgccaaggagcgcgaacagatgaccgccgacattacacgcgccacagcccagcaagaagaatatagacgtatcttacaagacgagttcggcatgccgcatgtaagccgaaacgacatcacccgttaccgtctctggcttgagctaaaagacaacggttacaagacgctctattcgcagacatacatcccccgtgaaaagctcttttctaaagagtttgacgttgagcatatcataccgcaagcccgtttgtttgacgactcgttctctaacaaaacgcttgaagcacgccaagccaatcttgagaaaagcaacgccacagctttcgactatgtgcaaagcaagtatggtgaaaaaggcgccaaagaatataaggaacgtatcgactatctttatgctgacggcgtcatcagcaaaacaaaacacgacaaactgctgatgaaggaagccgacatacctgaaggtttcatcaaccgcgacttgcgcgactcacaatatatcgcccgcaaggcacgcgaaattcttgaaagcatggtgcgggtggtggtgcctacaacgggtgctgtgaccgaccgcttgcgtgacgattggcaactcgtcgacatcatgaaagagctcaattgggacaagtataacaaattgggcttaaccgaaacgttcaaggatcatgacgggcgacaaataaaacgtataaaagattggaccaaacgcaacgaccatcgacatcatgccatggatgcgctgacgatagcgttcacgaagcatagcttcattcagtatctgaacaacctgaacgcacgcagcaacaaggcaggtagcatttatgccatcgagcagacatgtctttatcgcgatgcgcacggcaaactgcgctttatgcctcccatgccgcttgatgtcttcagagccgaagcacgccgacagcttcaggacatactggtatctaccaaagcaaagaacaaggtcgttacgcgcaacatcaactccataaaacgtagaggcgagaagaagcaaacggtgcaactcaccccgcgttgccaacttcataacgaaacggtgtatggcagcgtgcgctgttgtgtggtgaaggaagaaaagataagctcttcattcacagaagaaaaaattgctaccgtggcgagtcctcgttatcgtgaggctcttctcaagcggttgggcgaatatggtggcaatgcgaaaaaggcattcacaggccgcaacagtttggagaagaatcctttatatctgaacgacgaccacaccttgagcgtgcctgctaaggtaaaaactgtgacatacgaaacaatctttacacagcgcaaacctatagacaaggatcttaaggttgacaaggtgattgacgagcatgtaaaagaaattctggaagctcgtctcaaagagtttggaggcgacgccaagaaggcgttctcaaaccttgacgagaaccccatttggctgaaccgcgagcgtggcatacagataaagcgtgtcaccattcgtggcgtaagcaacgctgttgccttgcacgacaagcacgacgtgcaaggtaagcccatgtgcgacagcgaaggacgacgcatgccgtccgactatgtaagcacaagcagcaatcatcatgtggccatcttccgcgatgccaacggcaacctgcaagaacacgtcgtgtcttactttgaggctacagcaagggcaatccagcatctgcccatcgtggaccgtgactataataaagatgagggttggcagttcttgttcacaatgaaacgcaacgaatacttcgtgttcccgaacgaaaagacaggatttgaccctaaagagtttgatctgcttgatcctaaaaattatgcggtgataagcgacaacttgtttagggtgcagaagataacaacaaaagattatttcttcagacatcatttagagacaagcgttgagaataataaatcgttatgtgatataacatggaagcgcattacgtccttaaataagcttcaaggcatcgtaaaagttcgcgtcaacaacatcggacaaatcgttgccgttggcgaatattaacccctcataaaacaacaccctatgataaaaaagacattatattttggaaacccagcctacctttcactaagaacagggcaaatggtgataaagctacccgaagtggaaagcaacgatcaattgccagaagtgatgaaaaaacgggctgaaacgacaaagcctatagaagacattggcgtggtggtgctcgacaaccgtcgcatcaccatcacccaaggtctgcttgaagccctgcttgagaacaactgtgctgtgataacctgcgacagccatagtctgcccgtaggcctgatgctgccgctctatggcaactccacacaaaacgagcgtttccgttatcagctggaagcatcgctccccctacgcaaacagctatggcagcaaaccattaaagccaagatagaaaatcaggcagccgtattgtcggcttgcagtggcacacccgtcaaaaacatgaaacggtgggcagacgatgtgcgcagtggcgacccagacaatgttgaaggtcatgccgcggcttattattggcgcaacttcttcagcaccattacaggacttgaaacgttcacacgcagccgtgaaggcatggcccccaacaacatcctcaattatggctatgccattttaagagccgtcgtggcacgagccttggtagcaagcggcatgcttccaaccttaggcatacatcatcacaaccgctacaacgcttattgtcttgcagacgacatcatggagccttaccggccctatgttgacgaactggtttttgcgatcgtaaaagaccagggtgtggagaacttgcagctaacaacaacgcttaaagcgcgtctgctctccatacccacacttgacgttgtgataggaggcaaacgcagtccgctgatggtggcagccacacagaccacagcatctctttacaaatgtttctcaggagaattgcgacgcatagcctatcctgtacgttgagcttaacattataataaggaaagaaatatgaaccgctttagcgaatatcgcgttatgtggatactggtattcttcgacttgcccactgagacaaaaaaagacaagaaagcgtacatgctttttcgcaagcacctacaaactgacggctttacgatgtttcagttctcaatatacatacgccattgtgcaagcatggaaaatgctgatgcacacattaaacgtgtgaaatcgtttcttccagaacatggtaaagttgggataatgtgcgtcacagacaaacaattctccaacataagtcttttttatgggaaaaagcctcaagctgttaacacgccaggcacacagttagaattattctaactcacaaatcgagaagtaagcacacctacaaaaaagaagaactcaactttaacagtgagttcttctttttagacaacatctttttttatttctagcacattcgacattactctgattctcagccaaataccaaattaatgttgtctttgtcaccgcaaaggtaatgaattttgagcaaatcacaacccccattgcagcagctcatgctccgaccagttgtctttgtcaccgcaaaggtaatgaattttgagcaaatcacaacatgactcaaacggtctttatcttgcagagggttgtctttgtcaccgcaaaggtaatgaattttgagcaaatcacaacacctcttttgtcgcaacgtcttgaggctaagttgtctttgtcaccgcaaaggtaatgaattttgagcaaatcacaacactttttattatcatcagagttttcctcttgttgtctttgtcaccgcaaaggtaatgaattttgagcaaatcacaacacgcgcttccaacgttgccgatgttaatgcgttgtctttgtcaccgcaaaggtaatgaattttgagcaaatcacaacctattcctgaggcctacgtttctacttattgttgtctttgtcaccgcaaaggtaatgaattttgagcaaatcacaacacatggttaggatgctcaaaagttgccaaagttgtctttgtcaccgcaaaggtaatgaattttgagcaaatcacaacacgctccgacatcttctcagattgaacaatgttgtctttgtcaccgcaaaggtaatgaattttgagcaaatcacaacgaaaaagatgtggcaaacggcgtccttttcgttgtctttgtcaccgcaaaggtaatgaattttgagcaaatcacaacgtgtggcgattgcagccgtggcagtcttttgttgtctttgtcaccgcaaaggtaatgaattttgagcaaatcacaacagtttttatatgtttaacatgtgggacaaagttgtctttgtcaccgcaaaggtaatgaattttgagcaaatcacaacaccagagttggacctattggtctaatcaagttgtctttgtcaccgcaaaggtaatgaattttgagcaaatcacaactgatgccaaatttcctccacgcgagtattagttgtctttgtcaccgcaaaggtaatgaattttgagcaaatcacaacactttgttgaacaatcaacatccgttgtttgttgtctttgtcaccgcaaaggtaatgaattttgagcaaatcacaacgaactcgcaaacattccgctttacatgctgttgtctttgtcaccgcaaaggtaatgaattttgagcaaatcacaacccagccctaaagaatgcgatattgcagacgttgtctttgtcaccgcaaaggtaatgaattttgagcaaatcacaaccaacggtcataaatcgcatcggaaaaatcagttgtctttgtcaccgcaaaggtaatgaattttgagcaaatcacaaccatgtcgcagggcttagagtatatgggtgcgttgtctttgtcaccgcaaaggtaatgaattttgagcaaatcacaaccaactgtctttgcaacaattgtcgttaaaagttgtctttgtcaccgcaaaggtaatgaattttgagcaaatcacaacgcctcggtttgcttggcttgcttggttgctgttgtctttgtcaccgcaaaggtaatgaattttgagcaaatcacaacagactgtccatcaactgtttgtactcgcttgttgtctttgtcaccgtaaaggtaatgaattttgagcaaatcacaacaccttgtgctggatcttcagattgcgcagcgttgtctttgtcaccgcaaaggtaatatccaccattcccaaccgctcctcaaaacgctttaacgcatcttccatagaccacacaagaagatgtgcggtataggaattgtcttcccaaaaatgtcgactcaaagctcttgatgaacccattttatagtgttaaagagcacacagggcagacgcatcaaattgaacttcccgtcaacagcctatctaagtagtcctcactccatcccgctttcagtcgttttaggttaagactgccctttgttgtcttgtcgttttttaaaatagagagagccattttggttatagtagagaaatttctagcagcattcctaactttccgactgtcatcctctctgaaggtaaagtccaattgccaatgcaaattgttttcaatagaccaatgttgtctgatagcatctgcaattttttctggatctttattactcaacgatgtaatgtagtatctggcttcttcggttgtctcaccagttgcaatgatggttcttttggatgttatgccaactatcgatttgagtccgataaatttttctttaaacatgttctgcataatgtttccatagctgacaacaatgcaatctctctgctcatgccttccatgtccctcattcgttgttgagcatcttgaaactatattatgtctttccctattagcaaagccggaaattatatccttggctaaattaagactatgtttctgattggctttcaaggcaataatgtaatcacccttaccctctatgatcttttctgttatagctgtttgacatcccatggcgtcaatagtcactatggtttttgacaagtctattgcactcagcaacttcggcactatcgttatttcattactctttgccgacaccttctcttgcccaagtgatatactgttttccgatgaccaagctgagaccacccatagccgaaaatcatccttgcctatggggttatcagcatcgcatttactagggccacgcatgagtttgccatcaatggcaactactccctttaactcaccaataatttccttgacccagttcctgaatatctcttcgaaactattggcagggaaaatagaaaagaagcggttaaaggtgtcgtgacttggaatggatttcaagccgtcaaggcgttctttgaagaaatcgaacttctcctttccaaactcagaaatgtcgttccaagattgagctcctgctataactgcagctattgtaatgtatatgatatgctccatcttataagttgttcgtcctaatacgcgagggtccaccatctgtttagataacttaattatgctcattttcgtacttcaatttgttaatcttttagactataaagatacgaaaaatatctaatataagcaagtctaatacattaataatcaatgtcttacaatttgaaatgttgcagtttttatccgaataattttgatgcgtctgccctgaaagagcacataaagtcatcgtacctcgaccgagggacgtgcgtaccacgaccgagggacatgtgtaccccgaccgagggacatgcgtaccccgaccgaggtacgatgacgttaagatgcgtttctcatgacttttaaacacgaacacatcgaatgaaacgaatttttctggcacaagagcaacaatattttctgtaaaatgcttgcgttaaaacaaaaagctgtatctttgttttcgaaaagcttgaaaagaaacgaaatgtgtaattaatcgaaaaaagagacattatactaaagaaacactatactaaagaaacattaatcgaaagagacattaatcgaaagagacattaatcgaaagagacattaatcgaaatataacaattaaatacctgtttactatggctaacttattagacgagacccaaggccctatcaacgacaatggtcgtgatgtgcatgttattgaccgccaactgccggtagagataacctacaaatcaacgctttttgagattgctctgtgggtaaccattcctgtgctaacactgctttatgtgttcactatgggtagccaactgacagaccccaccatggtggctgtaattggttgcgtgggcggactgctgcctggcgtggtgtttgcgtttatgaagatttcggcacgcaactactttatgaagctcgaacagcgcattcaggccgaagcctcaaacatagacaactatcttgagcagcgtgtgcagattctgcaaaacgtggtggggcttgtaaaccgctccgtggagcttgacaaagacgtgatgaaagccgtggcagccctgcgtggcggagccataaacgatggcaaccgcagcgaggtgaacagtcagctcaacatggcttgcggccgcctgtttccacaggtcgaagcttatcctgagctgaaagcacatcaggtcatcatggacgccatgcagcaaaacagctatctgcaacgcgagatcacagccgcccgctccgtttacaacagccgcgtgacacaatggaacaccgacctcttctcgtggccgacaaaaatgattgtggctgcacgtcaaggctacaccacccgcattccgttcacggcatcggcagagacacgcgaacaggcacgcggcaaattcttctaaaccgcattgccacttcctttcaaaagagaaaaagatttttcctcgttaacagcgataaaaggaaacgatttattgcgataaaaggaaacgatttgttgcgataaaaggaaacgatttattacgataaaaggaaacgatttattacgataaaaggaaacgatttattacgataaaaaggaaacgatttattgcgacaagggaaacgatttgttgcgataaaggaaaaacgaggaaagacttttaagagcgaaaggaagaaaaaattttatcaacggcaaaagaaaaaaagactgaccgatgactaatgatatatacgatccgttggacgaatatgtcaatacgtttcgcccaaagtttgaacgggtagcgagagaaacctttgcagagcttgctaaagaggcgcaggtcgatgtggaagccaaccatgagacatgcagccgactgtacgacaccgaggatgagctggaagatgtggaaaacaaatattggtgggcacgcttcttatgcttccttctgtggggtggcgtgatagcaggtgccatctacctctacaagaatcaaaactcgctcgacaccacaaccgtctacctcattttcatggtgatggtggtggctgtgctgtgcctgctcttcaagatacacccgctgatgagcagcttgagcgacgagaacgatgaccttaagcagcaggcccatgacatagagatggagggatggcagcagatggagcccctgaaccgtctctacgactgggacatgctgccgcgcatgatcacggccacggtgcccaagatagaatttgacccatacttcaccacacaacgtcttgccgacctaaggcgcatatacggttggaacgacctcttcaacgaagggcggtcggtcatctattgccactcgggcctcatcaacggcaacccctttgtgctttgccgcacgcgcaagatggatatgggtgccaagacctactatggctcgaagaccatctactggaccacagaagaggaagacagcaacggcaaccgccgcaccgtgcaacactctgagacgctcaccgccagcgtcacagccccctaccccgtatatcatgagtgtacgcgcctgttctacggcaacaccgccgcacccgacctcacgtttacccgccagagtagcggtctggcaagccgcgaggggtcgctgtcatacaaatggcagaagctgaaactaaagcgcaagtcgcgcgaccttgacaacaacgactatgccatgatgacgaacgaggagtttgaggtggcgttcaacaccagcgaccgcaacaacaaccagcagtttgccttgctcttcacgccgttggcacaggagaacatgctcaagctgttgcaagacaggagcgcttcttatggcgacgacttcgacttcattaaagaccgaatgatcaacatcatcatcccgaagcacatgcagtcggtaaatctcgacatggacccgcgccggtttgccgactacaactatgtgagggcagagagagacttctaccgcatgaacgccgatttcttccgttccatctatttcgcgttggcccctctgctctgcgtgcccatgtatcagcagaccagacccattggagacatgtatgtacacggcatgaagcaagagagcaccttctgggaacacgaggctatagcaaacctctggggacaggaccgttttaaagccccgtcgtgcgtgaccgactgcattctgaagacccaggaaggccccaccgtcaacggttccaaggtcatctacgtctatgcccacggccattacaccgttcagcgcgtttcttacatctcaagatggggaggcgacggtcgctggcacgatgtgcctgtcttctgggacgaatatctgcccataacgggtaaaggcaccatgcacctgaccgaagacaacgagaccgatgccccgacagccacaccccgtcagcgcgttgaccgcataagaaaggtgctttcagccacacacatgaagatgtacaggaaacatatagcgtcaaggttgtaagaacgggcaatgagctatagggcttaagcctggccgtggataaagaagaagcgttatcgacatcttcgaaatgataattaatattaacatcgcgcttcgcgcttattatttttttaaaacattaatttccattaattgaacattcttgcgctccgtgggtgctcaggcgcttcgcggagtatgaaacattaatgtttccacgcgaagcgcgttttaatgataattaatgggtcattaatggaaataactccgcgaagcgcctgagcacctacggagcgcaagaatgttaaaaaatgcgcgaagcgcaaaaatgttttttacattttcacaccttccttagttcctctccgtgggcttcgttcctttggtgttctttcttttcgcccatgagagcgagggctttataaggcagcctgtaggacatacgaagcggcaataaggacggggcacccacaccgagagcacaaggaaccccacggctgctgctatgacccagacagagaccgaagaatagaggaaggcggtgaacagctcatagtcgatccatgccgtccacacacccgtgagcagcaacaccatgagcacgcaccagagaacatttttgaacatcaccaaccccttgttcaggcgcggcgacacacgaagcttgcgacgcgagagcttgcccgccagctcctgtgcagaaccaaacgggcacatgttggcgcaataatagccttgcttgccgaccaagggatagaccaaagccacggcaaccatgagcagcggggcggcaagggccgagagggcagcaacgctcacgccacccgaaaagaggcgcatgaagagagcataagacacgaaggtgcctgtacacaatcccaaaacgacaacgttcagcacaagctgcacataacgccaacgacggctctttgtgagaagcggcacgacggcaccgagcaacaccacgaccacagccgcgatgccgccaacggtccaaccgccatcagggaaagcccctgcggcagatgccgttgcccacgacgcgcggtcttgttcttcagccgccacatgccgcttggcataagccaacccgcggttcatgttgccaatgatggcctttgacgagaacgttgctcccgtcacggcatccaccttctgagccatggcctcgtcaacggtcttgcccttccaccggtcaaacagcgtcttggcataatcgaagaagtcgggggtctcagcgttaggctctgccacgatgctgtctaccaccccgtctttacttatgcttatcttcagcggcacgttgcctccatagcccataacatcctttgcgagcggctttgtgttcacgacgaagccaccgtcgggcagcacaacgagcgtgtcgttgccatcggcagccgctgcttgtgaggcctgcggcttgctccattcgtggccgaagagtttgccgtcacgcaccaccgccgccgtggctatgaggagcacgacgaccacaagcgaaagaagacgtgttaaaaaactcttgttctctcttttttgtcttttctgcattttcttttgttctataacttttgtaagagcaaccccaaggataaaaatgtctttataacattaggctcaacaaagaagctgtttttaccttatcctgattgtcttttccacagcttggtgttgctaaaaaacgatgcttaaaaaaggacatacgccctttttaggcatggcaaaaatacaaataaaaagcgacaaacacagcatcggcaaagagctaaatggcccttcttggagaaatttaacaaaatctgacatacaaacaaaggccagacacgcctcgttgtgcattgtctgacctttgcctttaacaataagtttttgcttttaaacctttctttcgttttttttggaaaaaggttttatttatcgtcccacaccccgttgattgttatctttgaagcggcattgttggcattgcccttgcctatagtggttggatcaaccacaatctggttttggtcatgcagcgtagaggttttgttcaccatcgtgtcctctacatcaatctctaagatctgtatctggggttcagagtaaattttcttttccataattttgtcggaagcgacgatagacatcgcctattttttttctttttttgtttataacacaaccttcttgcctcccacaatgtagaagcccttcttcagacccttggtg

SEQ ID NO: 2209 - DNA, 24182 bp, synthetic construct
  source 1..24182: mol_type = other DNA
  misc_feature 1..24182: note = Synthetic
gacattcgagcagtcgctgttctggaacattgcaccgacgtattgcgagaacatcatcatccgcggtgtcaccgtcaacagcttcggcaccggccgcaccgacggcatcgacatcgactcgtcggtgaacgccctgatagagcataccaccctcgactgcggcgacgactgcttcaccctgaagtcgggccgcagctacgacggcgtgcgcaagaaccgccccaccgagaacgtcgtcatccgccactgccgggtgaaacgcggcgtgggaggactggccatcggcagcgagacggcggcgatgatacgcaatgtctatatgcacgactgcgtgatagagaacgccaacatccccgtgttcatcaagacgcgccggccccgtggaggaggtgccgagaacatctggatggagcgcatacacatcgggaagtcgaaatatgccgctttcctatgggatatgctcggctcgcgcaaatgggtgggcgagctggccgacaggctgccggcacgccccatcaacgagctcacacccgtcttccgccacttccgcttcaaggacatcaccgtcgacgactgtcccaaactggtcagtgcggtgggactgcccgaacagcccatcgacgatgtggaattcaagaacgtcaggtcggccaatatgaaaaccgagttgcaggatgtcggacacttcaccttcaagtaacaccatgagacagctcctgatattactccttctgccgctgctcaccatgcaaacggccctgggccacgatgtgccggactcgctgttcaccaatccgccagcggaagcccgaccgctcatcatctggcaatggatggacggggtggtctcgcgcgagggtatcaccgctgacctcgaggcctatagcagggccggactgggcggtgtgcagcaattccagattggcggaccactgcagggcgagatacgcgacacggccaacgccataggcagcgacaactggagagagctcatgcgacatgccatcagcgaatgccagcggctgggcctctcgtttggcacccacaactgtccgggctggtcgtcgagtgcctatcctacggtgcgacccgaagactcgatgcagaaactggtgtggaccgacaccctcatcgccggcggacgtaccgtcatgcccgacctgccacaaccagaggtagacccccggtggaactactatcgcgacattgccgtgctggcgatgcctgccgacagcgtgatacggcgcgagacggtggtcgatctcaccggccgcacctcttggtccctgccggcaggcatgtggcgcatcatccgattcggacataccaccaacggaaagacgaatgccaacaatgccgcctatggtggcgtcggcctggagtgcgacaagatgagccgtgacgccgtgcggaaattctggaagggctatcccaccctgctgctccaactggctggccatgcggccggaaagacattcaaccgcatagaaatcgacagttatgaggctgggccgcaagactggacaccccgcatgcgcgaggagtttgcctcacgccgaggctacgagctgctgccgtggctgcctgccctgacgggactgaccatcgacagtgctgcagccactgcccggttcaagaacgactggacggagaccatcaccgacctcttcgccgagtgctactatggcgagatgtaccagctggccagccagactcccggcatgcaactgctgatacagccttatgggcaaccattggacacatggaaatgcgccagtcagggcgagagcctgctgtgcaccgagttctgggtgcactccgactggggatggccccacattccgcaggtcaccagcgccgcccgccagctgggcaggaaaatgatctatgcagaagggttcacctgcacacccctcattgcctggaaagacgacccacagtcgctgaaaccctatgccgaccgagctttctgcctgggagtcaaccgactgatgctccacgccggggcacagaacccatggcccgatgtgctgccgggcatgaccttcggcaaatggggcacacagttcacaccggggcagacctggtggcggagcggcggtgccaagctgttgttcgactatttctcacgttgccaggccttgctccagctgggcgactacgtggacgaccacaccaccggcaaggggtcgctgacggccgatggcgactccatcgagtggatttgccggcgggagaacgacaccgacctctatttcgtcgtcaatgccaaagacgaggaacgagaagtgtgcatcacgctgcagggcggcggtcgcattccggagttgtggcatcctgagagtggcagcagggaagaggccctttgctggacaaccgacggccggacgacgagcgtgatggtcaccctgtcgccacgcgaatcgctattcatcgtcatgcgacagcccaccacctcgaccggaacaaccctgaaaaccgtcaaacccacggttgtcaagaccatcgacctcagcaagagatggacggtcagctttccagagggatggggagcgcccggcagcatcgtactcaacagtctgacatcgtggagcgaacataccgacagcggtgtgagatacttctcggggacggcccgctaccgccaaacgctcaccatgaaacgagcgctcaagaagggcatgcgatatgtgctcgacctgggagaggtgaaaaacctggcgcgcgtgttcgtcaacggaaaagaggcggcccacctctggaagaaaccgttcagatgcgacgtgaccgactatctgaacgggaaagcgaatatgatagagatagatgtcaccaacctgtgggtcaaccgcatgataggcgacgagcaggaacccgacgacaccgagtggagcgagccctttgtctacgactatgcaccaggtaaccccgaggtgggacgcttcatgaaaagcattccgcaatggctgtcagcaggttctccacgaccctcgaaaggacgacgaacggtggtctcattcaagtttttcaagaaaaccgacagcctgctaccctccggactactaggccctgtcagaatgctggtcttgaaaaaacgcccctgacggcaagcaccagcgacagcgctacccgtcatccatgccatgccgcaacctctctatctgtagccgcgtacagcggcgcagacaaaagaaaaggtgcacttatctcaagtgcaccaaccctttttgccattcttggctaacgatatgaatcagatttaccttgttcgtatcaacatatcttctgtcctgaataaatccattcacctcaaaaaaaacttctgcctacgaatcttttactaatcaacctaaaaaaccattaataactaacctaactataaacctaaaaaaactatgtatgaatcgtaaaatctttattcgaaaagtatgtatgtcatcatgatcaacaacaatcgttatcgactatgaaacagcacgctgtagttctcgtacaatgacccgtagttcattgtcagctcactcgtgtcacttattctgcgcatccgaaagaagttaactacactcttcatgccatgctttggaaattgctttgtcatcattgttgtatcgttttaaaaatttgttgttttatttgttttacactgcaaaattaagtcgaatactgtccgcctccaacatttttcatgtttttctccttctgttgttgcgacagtcgccctcatttgcgacaaaacggataaactccactttttttctgtcgcatatttggtgtaaaggagctagtttaagcgataagtttttaggagtttgggagtttaggagtttaggagtttggacaatagctttgcttcttgagccttgaactttgaaccttgaacttctcaattaaaaaaaagccggccagaacccgcaagcggtattctggccgtcccatcattactcaagacatattctttgttcctatcctatcagtccgcaactattggcgcccagcgtaccgaggatggcggtggcaacggccaccagcagcttgagaattttcatcatggtgtttcgtgtgattttcatggtattcactccttttcttcattggcttcacctcactggtgagctttctggttcatgggaatgcctgctcttaaggctcctgcgggtcggtgccctcgttgtcgggctcgttcacgacggcattcttcggcagctcgcgcaccgatgcgccctgcaacagcttcttgatgtgcttgccgctgtcggtatcgacgatggtctcgggctggaagataatgtgcaggctcttgatgtgcttcttcacgttgaagtccttcacagtctccgaaccgctggagcggagtcccaccttgaaggtgccgaggttgtcgattctcacgctcttcgaatcctgcagctgcaggcggatggtgtcggccagctcttgcagcacggccaggatgtcggagtgcttcacggtgcagttcgactgcatgatgtcagccagctggctggtggtgatctttacggggtgagcggcacgagcgtaccagctgccggggttggcggcgtttctacggttgtcctgaatcagcttataaaaaatagccatagttgtgttttcctttctttttttaaatggttaaacttttgttgatgtttctcatgtcatccggaagacattgcaaaggtacgcctttttgcagcaccctccaaacaataggtgtataggacggaagatagagttgcggatagcaaactttcccgtcgcctgtcgcctctccgtcagccgccaatgtttaatgaagtttaagaaaatgtcagaaaagtttatcatggtttaaaatcgatgccatcttgtcgttcgctcgaagtcatcttgtcacgaacccccgcgaggcatgcttcttgcagggttaatgtttaaaaacagttggttcccaacagtatttgacgatttcctgaacactgatttcatgcctcgcgccaatacaacggcacccgcagtcaatgtcagggaggatgagaaggcctacaccatggagctggccgccccgggcatcaagaaagagtattgccgggtgagcatcaacaacgatggtaacctctgcatcgccatcgagaacaagatggagcataaggaggagaacaagaagcaccactatctgcgccgtgagttcaactactcgaattatgagcagaactacacattgcctgaggacgtggagaaagacaagatctcggccaaagtcgacaacggcatcctgacggtggttctcccgaaagttgaaaaggaggaaaagaaggttgttaaatccattgaggtctcataaaagacgatcactcaaaaaacagcaagagcggagcagcgccaacgggcactgttccgctctttttttgtattcatcagtcttttctaatagcgatgcttttgtctgtatctgtcaattgctttgtgtctgtaatgggcggatgtgaaacgggatttgtgaaaatctgtgaaattctgaggacagacgctcttatgatgttccttattcaatatttttgagtatatttgcacaaccagcaaatcattactaaaaaactattgatggccatgaaaagaatgattacctccttcgttttggttctcaccgttctcacggtggcaggacagggtgttcagccttcagccggcgacaatgccgtgctcaacgagttgagaaacgacctgcgcaagagttatggcaacgactatccttactcgtatgcccccgtgaagctcaccaagtcgccccgcggctacaagcccttctatatcagccactatgcccgtcacggttcgcgctactactggagtgagcgcctctataaagagctcgacacactgctcaccgtggccagccagcggcatcagctgacggctgagggcgaggcattctgcaagcgcttcatggaggccaggaaggagctgatgaccggtgccaccgagctcacccagctggggtgggagcagcatcagtatatcgcccgtaccatgtacaacaacttcccgcaggtgttcaagcgcggcggtaacgtgctggccatctcgtcgctcgtgggccgctgtgtcatcagcatgtcggcattctgtcaggagttggtgcagtgcaatccgaagatagagatccgcgagcagtcatcgtgcttcacgctcgacggtgtggtacccagcgacggccgcaaccccgtgaagcaccatttcaagaaggtgcgcccgcgctacgagaagagccctcgcaagatagcctccgacccgatgttccatcagcgcatcgtcagccgtgtgttcacctccaccgacggtctgcccggcagcgtgcatcacataggcagcaacctggtcaacctctacacctcgctgcccagcatcggtcatgagggcatgatgggcaacatcgtcaccgacgaggagatggccggccagtgggaagtcagcaacctggggtcctactcatgggtgtttgagccgcaatacgagaccattcccattctcgaggatatcatcgccaaggccgacgccgtcatcagcggcaccagcgaccgcattgccgacctgcgcttcggccacgacacctacatcgggccgctcaccgtgctgatgggcatcaacggtgccgatcgcgaccccgttgaccctgccgaggtgaaaaactgctaccagaactggcagacctgtaaggcctccaacatccagattgttttctaccgtggcaagcatgccgacgacatcctcgtgaagtgtctcctcaacggccgcgaggcacgcctgcccatggccaccaaccagttcccctattaccgctgggctgacttccgacagttctataccgagcggtgtgacaagcataaggagggctatctttctttctggggattctgaattagaaataatgtatctttgcaaggtagttgattgacaagatgccgaagaagaaaatattagtgattcctgatgttcacggacggacgttctggaaagagccggtgagcatgtttttcgagcaggtggaccgtgtggtgttcctgggcgattatctagacccgtaccgtcaggagggtgtgttcgacgatgatgaggtgtacgagaacatgctggagatcttcgagttgaaaaaaaggaacggctcgaaggtggtactgctgaagggcaaccacgaccagcattatgcctccgcacggtttcgcgatttggctgccggttcgcggatggacggcaggaattgggagaagtatcacaaggcattcagcaagcatcgcgatttgttccagctggtgcacctggagatggtgaaggacattccgtatgtcttctcgcatgcgggactgacgctctactggctgcataaggtgaatgcaaacatgtggcatctgcccgacaacagggtctttgtgggtgatgaggaaattatcggacggctgaacatgctcgacgacgacggaccgggccaggagatgctcgccgtggtgggcagccggcggtcgtggatgggcgagatgacgggcagtgtgctgtgggccgatgtcgaggagcattcgatgtcagctgccccgaaaagctatggtatgaacagagtgttccaggtgttcggccatacgcgcctgaacccacaatatgatatgttgtcgtcggaatatatggccatgatagacagccgccaggcatttatgatcgatgaggccagcgacgagaagatagctccattaaaaaactatcgcctcagttaggagggacggaacggcctgatagaacggccaccgcaagtggcctagcaggacggtttggcggagcagtcagcgcgagtgacctgacggatggtccgtgcggaaaataattgccaattacagacacaaagcaattggcaattacagacacaaagcatatcatacttctcacttgtcacttctcacttgtcacttatctaaaaccagaagctggccgacttatgcctgttcggccggcggcgcacatacgacacgtgtatccagcgacggccgttgcgtctcttgtgctcatagagcagctggtcgaagggcaggtggtcacgaatataccggaacatcttgtcgccctgttcttcggaaagcaccaggatgtcggcagcctcaccgcgcatgtgctgcgactggggtgagccgcccactgcctggtttaaccgcgggttgcggaaaccgctcgagatgataatcaccccaaacttcttgcgcaacggctcgagcaccttctcgcagagggcttgcatgttctcatgttgttctactgtcggcacattgtcgatgccaaaatagtcggctgtgcacgaacgaagcatctcgcccagcgagaaatgctccgtcagacgctcgtcgaggtcaacgacgctcaacggctcattcttacgttcattgtttttcatggtagctaaaactttttaataaatgaataatcgactgcaaaagtaagtctttccggcggtcactcaaaggcggaggtgcatagaccagtaggtagatggacagatagcagcagcggatgcgactgtcccatcttgtacatcagccagcaatagcggtcgaaaaacgcccgcgaccgcatgttcttgcgcatgtggatgcgctgaagatagcaccacggatttcgcggcaccctcagtccgaagcaggtgcagaggctttttaccagcaagatgaaggtgcagttgttaccctcatcgtctacgatcatgtccgacacataggccatcgaggccacctctatcaggtcggtcagggtgaacggccaccggagcggctcttcatgctggtagctgagcagcgccacgcactcatcgatgagtcgtgtgtgtgccatcgtggtttgttcgtttgtcagttgcagtgtttcctgttgtgtgttctttagtgtcattgcgtgtcctacattaaatgtgtttttattaaatgtgttctttattaaatgtgttctatttaaaatgtgttctttattaaatatgagtaattcaggtttcgcttatccatcctacaatgcgtatgtatcgggtaagtttcgtttcctacggcaaaactagctgctttccgtgcacaataagttcacaaccccgagatcttgtgttaaaatccccggaaactaacaattattaacagatgaagaatgtgtaagagtataggactatttgtgcttttacattatgattgcagatatctatgacaatgcaaagaaactatttttcagcaaatcacaacccattctaacgagtttttctgtgaggactggatgtttgcatcattacctataaaaagttgagaacctcaaaaaagtatgtgtttgactttattgaggttctcaactggttgtttccaaatcaatggatactgatgattcttctgttttctctttcagcacgagtgctgctgttggtgtttggttagaaagtctcatcttgtacattcgcgctttaaactacatgggggtataccgggctgatgaacaggaggaacttcatggtgctcattgtacttttttaaaagggttcatactgtgacaggttgcctgtcgtttgttgtttctgttgcaaagataggcaggcgaacggcagcttccaactttttccttccttttttcgaagattacatgcgactgtcttcgcattttgcgacaatgaggggaaagtgcctgaaaaactgtcgcaaaaacatgacattgcgggttttcagcatcccttcttccccattattagtgagtatgtgttcgttttggtgcgggtatttgactaagaggtgcgaggtaggaagggttgaggctgtgtgatgaagagaggacgcttggaactaaacaaaaagtccaccgttaaggacgatggacaaggacctaatgttttcacaacggaataatccttattgtgatttgctaaaaattagtgttgcaaagataaagattttccgtgaaagaaccaaatatttgaaaagaaaaatgtatttttgtggcatcatcttaaaatactattattatgaaaaagattcttggtttggatttaggtaccacaagtataggatgggcgttagtgaatgagaaagagaaagacaatgagaaatcttccatcatacgtttgggcgtgcgtgtaaatccgttgacagttgatgaaaagtcaaactttgagaagggaaaatcgattacgactaatgcagacagacgaatgaagcgtagtatgcataggaatcttcaaagatataaactacgcaggcagcatcttattgagtgtctcaaggagcatggcattatcaacgatacaacaccgttatttgaattaggaaaccattccacttttaaaacatatagagctcgcgctaaagctgtagatgaggaaatttcgttggaagaattcgctagagttcttttaatgattaacaaaaagcgtggttataagagcaatcgtaaaatcaaggacacagaagaaggtgaattagttgacgggatggaaatagcaaaaaggctgtatgatgagaaccttacgccaggccaattgcttttggatttgtatcagaaaggtaaaaagaccagacctgctttctatcgttctgatttacaggctgagttcgacagaatatgggaagtacaatcagtattctatcctgagattctgaataatgatttcaagaaacatattagtggttttaataagactcaaacatctggtgcattctatgctatatattccatttccacaacgaagaacagtggcaaggaagcgtatgcccagtctttgagatggaggtgtgatgctctcaaagatcaattgaatattgaaacggtggcatacgttctttgcgatatcaatggcgccatcaataattctagcaagcggctggccatgattagtgaccgcagtaaagagctttattttaaccatcagacagttggccaatatctggtgcagtgtatagaccataatcccaatgccagtctaaagaatatcattttctatcgtcaggactatcttgacgagttcgagacgatttgggaaagacaggctcagtatcatcaggaactgacaccagaactaaaaaaggaggtcagagacattatcatcttctatcagcgaaatcttaaaagttgcaagaatctgattaactactgtgaatttgaacatacagagaaagagattcttgttgaaggaaagaaaaagaccatcatgattggttgtaaggtctgcccgaaatcgtctccacttttccagtgttttaaaatatggcaggtattaaacaaccttcaggtatcagtcgtaggacatcagcggaagagaattaagaaagatgattttcagttggctctttttgccgatactgaaggggaaccccttcaaaggttcttagaccaagaggaaaaggacatcttgttcaaagaactcactatcagagacaaaatgagcaagaaggagatattgaaactcttattcgacaatccacaaaaactcgaccttaattataaggaggtagagggaaataacacgatggcaaccatcatcaaagcctgtcaggaaatcattagtcttacaggaaatggtgatttcaatttctctaagatgccagccgatgatgttcttgctgtcacgacagagattttctctggactcggttataagaccgatttccttactttcaatcctttattggaaggaaaagccatggaggaacagccattctatcaactgtggcacctcttgtattcttatgctggtgacaattccatttctggaaacgaagcactcattaaaaagattcatgatctttgcggtttcgagaaagaatacgctacggtactggctaatgtgagcatgcctcttgactatgggaacctgagtgctaaagctattcggaaaatcttgccgttcatgatgaaaggctacgaatacagtaaagcttgcgaactagcaggttacaggcattctgcccgttcattgaccagagacgaactcagtaagagagagtatacgtcacatttaagtgagttgaagcgtaacagcctgcgcaatcctgttgtcgagaagattctcaatcagatgatcaatgttgtgaatgaaatcgttgctacttatggaaaacccgatgaaattagaatagagctggcacgtgagctgaagaacagcaaggaagaacgtgagcagatggatatcgccatcagaaaaaatacagcagacagcgaaaaatatcgcaaaatacttgaagaggagtttggcatccagcatgcgacgagaaacgacatcatacgctacaagctttacaacgaactaaagcagaacggatataagacactctattctaacacttatatccctagagaagagttgttcagtaaacgtttcgatattgagcatatcatccccaaggctagaatcttcgacgactctttctccaataaaacccttgaggtacgcgatatcaacatcgagaaaggcgatatgactgcttacgatttcgttgctgggaaatacgacgaaaaaggtgttctcgattatgagaaaagagtggaagagttggtcaccaacaatgccatttcaaagacaaagcgcaataatcttttaatgaaagaggccgatataccatccgacttccttcaacgtgatttaagagactctcaatacatagcaaagaaagcgcgtgagatactcgagcagatggttccgtttgtggttacaaccacgggctctatcaccaagcgcttacgtgaagactggcaattggtgggcgtcatgcaagaattgaattggcagaaatacgattctttaggtctgacagaaacatatttcgacaagaatggaaacgttgtcaggcacatcaagaattggacaaagcgcaacgaccatcgccatcatgccatggatgccctcactatcgcctttaccaaacgaagcatcgttcagtatctgaataacatgaatgccagaagtgataagagcagcagcatctatggcattgagcaaaaagaactgaaccgtgacaacaaggaccacaaactggtgttcaatgctcctatgcctctcaacgaattcagagccgaagccaaaaagcatctggacagcattttggtttccatcaaggctaaaaacaaagttgtcactaagaatatcaaccgcgccaagacaaaagacggacatcagcataagatacagctgactccgcgcggagcactacataatgagacagtatacggcaagataaagaactttgaggccgaatatagaaaagtggatggcaaattcactgaggacaccgtttttcgcgtgtcgaatcggcggtacagagaggcattggcccagcgacttgcggcttttggcaacgaccccaaaaaggctttcacgggaaagaattctcttgagaagaaccccatttggctgaatgccgaccattcttattcagtacctctgaaagtgaagttgtataaaattgttgacgtgtttaccattaagaaggctgttgataaagatttgaaaatcgacaaagtaatagacggcagaatacgtgaactacttcagcaaagactcaacgagtttaatggggatgctgccaaggcattctccaatctggatgataatcctatttggctgaataaagaaaaaggaattgctattaagagagtaaaaattaggggaatagcaagtggagaaccgattagggttaagagagatgccaaggggggaatcatgaacgacgagcatggaaatcccattcctaacgattatgtaaatactgcaaataaccatcatgtcgctgttttcagagatgcttcaggtaatttacatgagagggtggtttctttttatgaggctacaactagagctatgatgggctatcccattatagataaagattacaaacaagcggaaggatggcaatttctattctcaatgaaacaaaatgaatattttgtcttcccaagcgatgggtttaatccatcggagatagatttgacagatcctcaaaactattcactcataagtccgaatctatatcgagttcagaagttctcagaaggagactatttctttaggcatcatcttgagaccactgttgaaacagataattctcttaaaaatattacttggaaacgaattaattccgtaaaaagtctagaagggattgtcaaagttcgagtagaccatattggtagaatagtatcggttggagaatattagcttatgatcaagaagacgctttgtttcagcaacccagcctatctctcgttaagaaatgcacagcttgtcatcaaattgccggaagtggaaaaggcagagagtctctcggatgactttaaaaaggctacagttgtaacgagacctatagaagaccttggggtggtggtgctcgaccatcaacagattaccattacctcaggggctctagaggctttgttggaaaacaattgcgcagtcattacctgcgactctaaccacatgcctgttggactattgttgcctttggtgggcaatagcacacagaatgagcggttccgcgaccagttagatgcctccctgcctcttcgcaaacaactatggcaacagaccatacaatataagattcgtaatcaaacggcagtgctgaaggagtgctctgatgcagagacaaaatgtatgcaggtatgggctaacgatgtgcgcagtggcgaccctgacaatctggaggctcgtgcagccgtatattattggaaaagcctattcggccatatacctcttttcatcagagaccgagaaggggtatcgccaaacaatcttttaaactatggctatgctatcctccgggctgttgttgcccgtgcactcgtggctagcggactgttgccgacattgggcattcatcaccataaccgttataatgcctattgtctggcagacgatatcatggagccctatcggccttacgtcgacaggcttgtgtatttcattacagagcaatatgggacggatgtagagttatcgaaagacattaaggccgaactgctttccattcctagcctagacattgttatcggggggaagcgcagtcctctgatggtaggtgttgcacaaacgacagcctctttatacaagtgcttcagtggggaactacgaaaaatagcttatccggagatgacatgaaagcagaacgacttagtcagtacagggttatgtggttgatggttttgttcgatctaccgacagagacgaagaaggatgttcgtgaatacaccaagttccgtaaacgactcatacaagacggcttcaccatgttccagttttctatctatgtccgtcattgtgcgagcatggaaaatgcagaggttcatcgcaaaagagtgaaagctatccttccggaattcggaaaggtgggcattatgtgtatcactgacaaacaatttgggaacatagaactgttctttggtgcaaaaccccaacttccgaatgctccagggcagcaattagagctattctaaaataggagaattccatcactagaatggaactctccttaacctttgcactttttttctttttctaattatctttgcaaactactaaaggtcaaagccttacatagctcgagatgtctgtgacaatgcaaagatactaatttttcagcaaatcacaacactcaccaaagcctcctgtgccccgatgttgatgtctgtgacaatgcaaagatactaatttttcagcaaatcacaacagtcagatggtagctatttttcacgccgtgatgtctgtgacaatgcaaagatactaatttttcagcaaatcacaacagactggcgaggctttgacaattgcctacagatgtctgtgacaatgcaaagatactaatttttcagcaaatcacaacggactgccattcggtgacgctgtggactacgatgtctgtgacaatgcaaagatactaatttttcagcaaatcacaactgtccttccgcggtggtcgaatacgagtttgatgtctgtgacaatgcaaagatactaatttttcagcaaatcacaacgcgggtgcaatcgttgacctcgcctatgaggatgtctgtgacaatgcaaagatactaatttttcagcaaatcacaactaatcggcaactgataccattcttcacattgatgtctgtgacaatgcaaagatactaatttttcagcaaatcacaacggtgctttaggtatggtggaatgagcgagagatgtctgtgacaatgcaaagatactaatttttcagcaaatcacaactctgctgacggtgcttcttttaccactggtgatgtctgtgacaatgcaaagatactaatttttcagcaaatcacaactgataactgtcaaaatgcacttgcgcaactgatgtctgtgacaatgcaaagatactaatttttcagcaaatcacaacagattttattaattcaaattttgaataatagatgtctgtgacaatgcaaagatactaatttttcagtaatttttcagcaaatcacaactaaaactcccacgggctcagcggtcgtagcgatgtctgtgacaatgcaaagatactaatttttcagcaaatcacaacaagggacgtggtttcctccaaatcacagggatgtctgtgacaatgcaaagatactaatttttcagcaaatcacaacatgcgacatctgccagactatacagctctagatgtctgtgacaatgcaaagatactaatttttcagcaaatcacaacagtgtatagtcattgctattacaccatttagatgtctgtgacaatgcaaagatactaatttttcagcaaatcacaacaatcagtttaatttttcagcaaatcacaactaaaactcccacgggctcagcggtcgtagcgatgtctgtgacaatgcaaagatactaatttttcagcaaatcacaacctccttggttgcgaacgttatcagatccagatgtctgtgacaatgcaaagatactaatttttcagcaaatcacaacatccgttccgcaagtggcacgtccgcaccggatgtctgtgacaatgtaaagatactaatttttcagcaaatcacaaccttctggcatgcgacagccgtcagtgcgacgatgtctgtgacaatgcaaagatactaatttttcagcaaatcacaacaggtcgttgaggtagccctcgaagtcagccgatgtctgtgacaatgcaaagatactaatttttcagcaaatcacaacttttgcagggattggccttgagagttgatggatgtctgtgacaatgcaaagatactaattattcagcaaatcacaacaactcgtagccataatggaagtggcagggagatgtctgtgacaatgcaaagatactaatttttcagcaaatcacaactccttgtcctttagtggtatgtaaccgcccgatgtctgtgacaatgcaaagatactaattttttagcaaatcacaaccgacaacttcgtggccactggcaagctcagatgtctgtgacaatgcaaagatactaatctatgtggtagtaatgtcagattgaaaaaagtatcgcaagcataaaacagcttgcgatactttttcctactgctgatgcgtcatcgattattttatgacgactttctttccgttcttgatatatacacccttgcgggtaggagctttatgaagacgctttccattcatgtcgtaccatactgcgttgccatcgcccgaatagatgatgcttattccgtcggtactgtcacaaatgaacttgatatttacgacctttgtctcaccgctgatggtagtcgtgagtctggcctcaagcgttcctgcactcttgatatttgtggcatcgaattgcacttgggcaataccttcagaatccgtcttgaacgtcttctcgaattctgtcttattgttcatcggtacgcactcacctcccatacaccattgtatcatatcgggattgagcgtgttgctcaggatttccaacttggcagttccttcctgattgccatctttagaaaccagaataaggccgttcttgggattgctgctgggattggtttcacagttcagttcgccaaagccccagctgtcctcttctgcctttatttctaccgtcgcattgtcttccaaggccttgccctcgtaacggtattcaaaagaactctcctcagttcccgctgttatagcggtctgagaggcattaacgatattccctgttgtgcggtcaataaggagaacagccacctttagctttgacttgtcctgaatgatactcttcgaggagatgtcgatttccttgctgtatttcatggtctcaccagcagtaaaggctgactttacagagccgtcagcaccattctgaatatcccatgccgctacggcaacgtggttgaactccagtcctgtaaccctttgggcggcattataccagaatgggagcgagctggcatagctgctgttttgactcaggttgttagcctgtgcccaattagagccagtgccgctcattccgtcctcaataagaaccagtgcaacaccgtattgcccattgtcttctgaataggcaaacttcgtatccgtactaatctttattttcgtctttgcctcatcgctccaaactgctttggcttttatctctccgacagttacattgcccatacagttgttgattgcggccttcagggtcgatgctgacggataggcatctattgagcggttaatcaatgagctgggataacttgaggctctgttggctatgggatcgtagtcagatgtctccatcgggtcgctactgtggactgcaataagcaccgccttgtcgccaaaggtctcatgagccttctccattccgtcgaatcccaaaggacaccatccgcaccatgttcccgtgaactcctcgacaaccggtgtgggggtaagcatttcagaaatagtgattagtgaaccggtagacgaattgtcactcgcttcgtttgccacgccgttgactttggtaatggtcaggatcttttcgcatctcctggtatcattgtctgcagggaatggtatgttgactgtcgtactgttgttaaatgccagactgttcacactgcatgtctgttcggccgatgcaatgccgttagtagtgatggtatagctgatcttgctgatggtttccttgccatagttgaatatctttaccggaatgtatgtctggctccccttctgcacatagtaggtgccaaagtctgatggtgtggcactattgctgctgagcgaaactccttcaagttgtagttgcaaggccagttttccgtattgttcaccatagaagtcctcccagctacgccctgtaatgtggtaaaaccaagaattctccatgtcttctccaccacccattactggatatgatctagcattaatatcgaaagagtatccaatgtagcacttgccgttgttgatgctgtaaggagtggtgagctctatctcgttcagtctggtttttaacgacgacttggcgatggtctgagtataggcagcattggaaacattgtcaggcagactgcccgatatccacagggtaacgtcgctgctaattgccgagatgtcgtcacctaaccaaaatcgcacagccttcacagtgcctcctccggcaatgagatgccctgccggtatgcagatagcggtattgatggttgtggcttggctatagccaagataaccttcataagaaagattctcagcatccttatccgtaaaatagccccaccatatctgctcaccgcctacgtgcttgatgggtgtagcggctttcgtgcacaaaggtaggaagcaaagcaatgataccaaaatggtttctgcccatttcatagaaacattttttttgtccataatactttgatttaaatgaataaaaggtttagaaataatacttgtgcttattggagcgatggcccgattgcagttcttttgacctgcagtacaccggagtcatcgtagacgaatgccacgacagagagattctcatgctgccatgttgaagctatgggtacactgatgtgggtatcatatgccgcaccttctttgatgcttatgctctctccccacgcgccgtttgctgctgtccggaatacatgctggtggacatactcgcgattggcagtgccatcaggcatgagttgaatagcagtgatattgtcctctacaatccagacctgaaggttgccgttggtagttccgttggtgctgatgactctcacatccgcttctatctcagaaagagcggtcgatacggaaacctctaaagtcacgggagcaggcttctgcaattcctgtcgtactttggctttccagtcggtataggggcatacgcctgtacggtttaccattcccatgggccactgctctactttccagtattcgttgtagctgttgcctacgtctgtggccagacctacaatacctctttccggatttgggaacaaggccatcggaccaccatgaataccgacggcaataacggcatcctcaccatactcctgttgtaaagagtgaatctcatcggatgcattaggacagtttatgcaccgctgaccagtaaaatcttcgataagtacactacggttcacgacagggggagcctcgtatatcagacggtcttcctgggcgatgttgtcacatgccgccagcccgaaagtagccattgcgataaatatgatttttttcatgtgcatcagaaattgtagttgtatgagatggtgaatcccttttgtgcaggcacatagcggcatactcccccagaacagttgtatcctgcacgtgtgcggccataaccagcctggatgcgatgaccgccaacatggtaggtcaggagtccctgatagtagtgatcgtccgtctctccgcagttccacatatcgctaacggtaatcatccagtgaggcaccagcgagagttcaagcagtccgtaagcccagtcgccctggtcgtctttggtggtaagatactgcaattcgccgcgaagggtggccttcttggaaatctgatactttccgtcggcgatgaagatgtcagagtgaatcattcctccttcgccctcgatgacagtcttgttgtatcgctggttcatatacatcagggtcaggcggaagtcgcgtgtcatgcggcgtgagagctggatgtcaaggtcctgatagtaggtctcgttgccccatttgaagaaaggtgactcatagtcgacaaaggtcatccctgcaagtttatggcgctcgataccatcagcaaaatcatgaggaatgctgcgtatatagctgtagttcaccttcacgttcatgccgtactttccgccaagagcagtcttacgcttgaagttataacccagctctgcctgataagcccactctccgtcggccagctgtgtcgcataagggtagagagccgccaaagcataggtctgatcctgtgtgaaggctggcaggtgattgatgtatgacgaaatgccaatcacgtcttcactttttgaagacatgttctctgagcgctttgcctgcaagaggatgctgaaccccttgtcagaataagaaccagagagcatggcagcacttccctttttaaacacgtagccgttggcgaatgaagggtcggcagtcttctgggcatattctgcgaggatgttccacgcaccagttgtaaggttggcacgtacatcccatgaattcacaaactttggtaagttaataaggtgggtataatcgtaatacaccttatcttctcgcttctcgtatttattcacccatgaaccgccaatcgtcagtcgtgttccgttctgcgacatcgctggtatccactggtcaatactcatctcagcatcggcaccactgaccaacgacttgttccatttccagtagtggcgctgcttgcctgagagcaacttcaacagcaagccgtcggtaggtttaaggatcagacgacctcccaagagggagttgtcgatgccaagcgaccgctcttcgtatgtacggaggatgaaaccagatccaaactgttcatagaaagttccaagggtaagctcattgtcgccgagcttccctttcacccagaagttgggcataccccagcctttgaagtcgttctcaaaccctggcagtggatgttccaaatactccaggcgtataccagcgtcggcatatttactctgaagctgcaaatctgcgtatgtattagtctgaaagtcctccgtcttgactgctttgatcgtctcatcgctttgcggtatgagcatgtcactctggatactcccagagagggtaacccccttctgctcctgtgcgagagagttgacaagagaagagatgaggatggcaagtgtcaaaaggagtttcttcatcataggcgtctttattttgttagttcgcgaatcttttctatcagttctatttccgcaccgtcggtatagccgttgtgcttgtccacaatgtttccctgaccgtcgcaaaccagcacgaacggaatcatttgtattcccagtgcacgcttgaagtcgctgttggggtcaagcagtacgtcgtactcccagccgtgactattgacaaaaggtttgactttatggatgttctgagcctgatcgatggagacggcgaagattttcaccccagtctcttccttccactcatcatagacctctgcaatggcatcgagctcacggttgcagggtttgcaccatgtggcaaaaaagtcgatgatgaacggcttaccgttgtttgacagggtatcagtgcgcacagtctttccgtcgatagtcttcaagataacggcaggcaactgggcagaggctttcagcacagacaatgctagtgcaaggaaaacgagtataagatgatgtttcatttgtctttactattttttcttctctaatttttgtcttcactcattcttagtcttcacgcattttttgtcttcttgatgcaaagataactataatatatcaaaaaacctaaaaaacatgcaagaaaattactatttattattaaatggttgagaaccatgtgaagtgagaagtttttaggagtgtagagttttttaggagtaaaggagtgtaggagtgtgggagtgtagacaatagcccttttgggggagtttgggagtttgggagtttaggagtttggacaatagcccttcttttagaagctagtctaagtgaaaagtgagaagtgataagttgttaggagtgaagagttttttaggagtgtaggagtgtgggagctttctttgaattgagaattgttgcctgcgacttgaacaaaagaatttttgataatttatggccatttgtgccaatttgtgttttatacttaacactaattcccgtaaatttccacaaattatcaaaaataccccagctcttatcccgaactggggtattaatggtgaaatgatacccattgaatgatgactcatttccataggacggtcaacaaaatcagtaggttgaccgtccatttatttaaagttttctcgcaatctgccttaccttggtcacataatcaggacttctacgtagtcgatgctttgtgaggatgtggggatgtctgtgctttttggctgacaatgctgttttttagtaagcttacaagctgtcacctccgaaggttctttttggagcattattgccattgctggctacactgccgaaaggacggtagccgaaggaggtctaaggttttttgtggattcaattcttctgatgcgtcttcaacagttttacagcctgtgaatagggacttgtcgtcacgctctcgaagtaggctgccatggtggtcgtataggtgcatttgtaaacacctctggaaaaaagttcctcatctgagaaagtgtcggcaaggttgagcatctcctgatgtgtcttttcaagcagtgatttagcttcttcaagatttgtgccttggtgcttctccacaatcatcttgtccatctcatggtagttcttgcggtattcgtcgggtaggaaatctctcggatttccctcacggatgttctggacgaacacgcgcatcagcacctgccattcatgaatatgagccaggaggtcgcgcagacagcggtcgtacatccatcgtacgccgcacttcttggtattggctgggaagttgaatggagcagcggcactttcagcactcaacttgttgatttgctcatacagtttctcatagccatcctgcatggaggcgatcagttctcttttgtttgt

SEQ ID NO: 2210 - DNA, 24182 bp, synthetic construct
  variation 21170..21276: note = n is a, c, g, or t
  variation 17121..17412: note = n is a, c, g, or t
  variation 19728..19920: note = n is a, c, g, or t
  misc_feature 1..24182: note = Synthetic
  source 1..24182: mol_type = other DNA
  variation 20469..20539: note = n is a, c, g, or t
  variation 21562..21677: note = n is a, c, g, or t
  variation 18094..18386: note = n is a, c, g, or t
ggctaatgaagtagagtttacctttgatatagagtattataatctagcttcaactaagcgctttctgttctttttgtttaagttaaaggatgttgaagaaaaaggtggacacttaaaagtaaattggctatacagagaaaaagatcaagatattttggaaatgggacaagacttgtctcaaatgcttggcataccttttaatttcaaaggatacgaaaaactgcataagagtgtaagtcttaattaggccattttttacgcattataaaccctcgatcaattactttgttgctctcttttcgaaccaccattagtgcgttttttttctgttgaaaatagtgttctgcttttgtttttaaactgttgaaatcaacttctttttctctaaaataaggaaaaatccaatctttttttaacggaactgcttcaaagtaaatgttcttgcttgttagattatctatgtcttcataatttagccaccaagcttttgtgtgactgtatttctcgctaatgttgaatggataaaatcgaacacctttcatccatattttaggttgaaagttgattttttgaaaatcagcatccaacagattttgatgtcggtttaacaatcgagattgctgtccaagaagtttttcttttttctttctgagttgatcgttaacgttaggaccaagaaaagtaagctgtccattccatttcactttcaagtaatactttagagcaaattcaaggtgaatgtattcttcctttatcagatcttttaatagaaaatcgatttcacctatggttttgttttctttaattaattgaatgttgttggcgagcaattcaaactctttgcaatttttaaaatagataatcagtaagctttctgcatatttaccaagtggcagcttattgaactttgaaaagtcagtatcaatttctattttttttgaccactcaattaaatcagaaacagattgttttttttgatgaaagtaaaattcactcggaaactctgcttgataaacctcttcgctccaaagcaaagcaattaagtcttgaattagaggttgatctatagcagctatttgtgaaatttgtttttgaaaattatcttttgccatttgtgttaattcaaaactctgaatttcattgaatacttggaaagtgagctacgttaattttcatggttctttcattaaataatcgcaactttgtaggcttaaatataattaaacagatgaataaaaatatacaaattgctttgaacgtagtttttgccctaggaattggctatttattttttactcaaagtcaacaaggtgaatcagcaaaagacattgaggaggtagttgaagagcaaatgactgaagaggttgatgagcctttgcaagttagatatgttaattctgacaccatttggggtaattatctatttgtagatgaaatgcgcgataatctttcaaaaaagcaagaagagtaccgcaacgatttggagagaagactaagagcatttgagaaagaagtgatggagtttcaacaaaatgctccaactatgagtcagtttgaagggcaagaaaagcaaaaacaattgttagccaaagagcaggagctaactcgcttacaagaagacttgtctgttaagctcatggaaatggaagacaaaatgaagcgcgatttaagaaaaagtattttatcttatctgaagcgctacagaaacgagaaggttgatgttattctcgatttttcaacaagtagttcggttttaatgattgatgattcattaaacctaactcaggaagtactaaaaggtctaaacgaagagtacaaccaaaagaatacaaagaagtaatgctgattgctagagtaaaaaaagagaccaatattgttgagtacgttttgtacatgtatcaaattgaggatataattcgatcttttcaatttgatttagaaaaaattgaccgagccattgttcagcaatacgatcaaaatgataaagtaaaggctgagataaaagcatggtatgctgatttgattgacaaaatggaagttcaaggaattcaaaagaatggacaccttgaagagttaaatgagattgtaaatggcttaaacgtcttgcaccgtagcttattaaccacttttcaagataaagaataccagtcactttacgagcaagcagccaatgtgctaaatgatttaaaacagaagtctgaccccacactaaaagccaatgaaattgccgtttgcataaatggcttatacggtttgctggtattgcgtctcaaaaaacaacccattgcagaaggtactaaaatggctatggagcacattagcaaattgatggcaaaattggcgcatcaatacaaccagatgaaaatgggtaaactgcgatttccggaagagttgaataattagactaccgttatttatttttctatagctagtctaacatcttttctctttaagaccttattttttacttaactatcaaaaaagcgcttttctatgcgctttttttaattgttgctctcgattaactctcgagcgctcccgaacttctatcctttactttcataggaattttgaactgttgtttgaagctaaagactgcaaagtagaacttgttaagctcttcattaaatagattaaaaataggatgagcctttgaaaagtaacaatttctaagtcgcctcaaataacaaatgatgaaccttcacttcttctgaccgaagggaagtaaaaatgctgtcagaaaaggtgtttgcttcatcaacttcccaacagtgcggccgcacataattcattcattttttaacccgacccggtttttccggaacaggaaaactatgtcctaaaggggaagaccgggtcataaaattttaagttatgaaaacttttaaaataaatatagccgtattgttgtgttcagttatttttttcgcaagctgcgaaaaggaaagtgtaaaaccagcagctgttaatcaacaagacttcaaaacccattccataaataaaaataaagatggtggaggtggtgatgaagagaactggattatcatccgtggagttgttcaatctgctacaacaagtgatcctattaaagatgctgaggttatcttatttgatcaatctttaatgaacccaattgataccttttatagtaatactttaggggaatttgaatttgaaagagatagcggagactatgcatttaaagtaagtgcaataggttttcagctcttacaaagcagtgcttatacttttccggacaataaccctgtaacattaaatttagaggaagaataaattttagttgcattattataggagggagtttttatccctcctattttattgcttagttgaaaagatgagtgtatacttcactccctctgtaaagtctcgatctattttggcatcgatttgtttggctaattgattaatgaggtcaagcccgattgagctattgttttcatgaacgatgtttccattaccgttgtctttgattatcaaggtaattttttcattctctttttttagagaaatgcttaattcagattttgcatcttgggttagaccgtattttaaggcgttgctaataatctcattgcatattaaccctattggcaaagctttctccggcgaaagcaagacagcctctatattcttttttacttgaatagctgttttgtcaaataaaacgactaaattttcaataatttcttgtaagtagctgtgaagttgtatggtatggctgttgtagtcgccactctgataaaaatggagatgaagcattttaatcacttctactcggttgctactctcttgaataacttctttagctacattatcttcaatttttctttgctgaaaactaagtaatccggctagtgtttgtaagtgattcttaattctgtggtgctgttcccggttgagttgtttttctttttctgctaactttttttctttaccgaaaagacgataatacttgtaaactaaaaacaaagcgaacaaaataagaatgatgataatgaccgtgaaaaactgccaaaattgaatggaagcttcttgttgttttatctttaattggtcaatttctgctttttgaaaaagaagtttattttcttgttctttctttcctacctcatatttaatttggaattcattaatcgctttttgtttatccaggttgagtatttgttggtgttttttagaatacagtttgtagtattccagtgctttagttttattgcctattgaatcgtaaagctcatattgaaatagataattgttcaataaaagatcattaatttcaagatttttagcactttctaaagctttattaaaataggtgattgcagtatcccactgagtttttaaaaagtaagcacgacctaaaaaattatcacaataagcaactcctctttcgttgttgaattgtgagtgcaaatctatagccaccttaaagtttttaattgctctatcaatgttgcctctttgaagttcagtttcacccaggttataataagtgtagggtatcgagcgttttactgtcttttttttctccggatttaaatagcttttttctaacaagttattttttatcgtcaaactattttgaaagtcggtgatggcttccttataaaattccatttcaaaataagtgcttcctttattgtttaaatacatcgctagtcgaattgagtctttcccctcaatagctattttacatgcgagttcgtggtaacggagagcagtttcaagattacctaagtcgccatttaagttacccaaaacattataggtttctgccaaatcaactttcatctcgtactcttcgaagacatttaaagcgtccagaagcaattcagtggctttttcgtattgcccaagtagtttataacttctgccggtattgtataaagttttagccaagagcgtatcttttccggcactttcataagtttcaattgccttttgcaagaaatcaagacctcgtactttaaaaccttctctaatatcaattgcccccagattattatagcacattgctctcagctctgcactgtccggattttcttgtattaactgtaaataataggttcgggcaatatccggttgattgtttactaaggcagtataagctttgttttcaagaactgaaatacttgaatctttattggctagtagattgaatgtgcttaatagtagcagattaatgataataagaagtcgttttctcatcttgtttcgctaaaaaacttaaattggtctcgcaatttacaatacttatggcagctatacaattattagtagttgaggatgattttctcgcagcagagaatatttgtgagcagattaaaaaaatagggttcgaagttactgctgttgtagataacggaaaagaggccatccagcaggtgattaaaaatcagcctgacctagctattatggacattagaattaaaggtgaaatggatggaatagaaacagcagcacaattagccagtaattatgatattcccattatttacttaacggaccagtccgataaagaaacttatgaacgtgcaaaagacactcatcctcatgcttttttgagtaagccggttacagcgcttgcgctacagagaagtattgaacttgccattattcatgtttttaaggagcaaaaagaaaagggtgatgagcttttaaagggaggtaaggtatttcataaacattttatgttaaaggaagggaatagcttgtattccatcaaactggaagacatcgagtggctcaaagcagacggctcctattgtgagctgaaaacaaaagaaagtaagtggactatttcaagatcgatgggtactgtattggaaaatttgcagcaaaccacattttgtaaaaacaatatcattcgcattagtagatctgtttcagttaatataaaaaaggtggaatccatttccggaaataaagtcctcgttgccggagaagaattcacttttggggatacctatcgggatctactttttgaacacattcaaacggtctaagcagatctgtgcattagataatctatttcggctttaaaaagaaaatacccctgttcagaaagaaaaacagccggttcagaaagtttttttgttgaagggaaatagccttcgttatttcgggatgtaattcaacgtctatgaagtatcccgtatctgaaatttctttacttattgatttaatgctggtgaaggctaagttacccagagtatataaaggcttaagggaactttcagaacgaatagaagacgagcaagatattcagaatagaaccaagaaaaagaatgagtatctgtataatgttcataatgaaaagattgcaaacgcattagtaaggcaagaaaaagagataaaagtaagtgtagattatttgaacgaatacctcacctatttggggtatgaggattaccaaagttttagagaacagtatcagaaagtaaaaaaacagcttgataaactcaattttagtgcaaaagagtggcaattcttaattcctaagtcaagtaaaaacaaattactggaaaagatagaaaacagtttttatcccggtcaggaactaagttatggagttgaggattttgatgatactaaagagtgggaggaacgattaatccaaaaccaagaagaaactgctttcgtctggtttattcctcccgccttttttaaaagtaaatcgctttacaaaaccttagaaaacaatcgcgaaaacagcacgatacttgtttggttgaccgataaactttctgaaatcaatcattttaaacaaattgttgatgtagacaaacaattgttcttagatgagttaagagatgacctgtgtttattgattcaattgctaattgctcttgaaagaaagtccgaaaaaaagaagaagagcaaaactaaacagcaattcaataagaccattattaaaaatgaggtagggcacaatcagggctttgtgattgggcaattgaagtcaaagcatgctcctcagattcagaatcattattacggaactcaaagccaggatgatgaaaattgataaactcaagacaaagtacactaaaattattacccatattgttaatcatcctttgggaaatgtagattataagtgggcaattgttgtatatggaataatagttatttttatttctacggttacttttttgcttgagtgtccatccggtgaacaatcagcagttttaagagctgccattgccattgcagttaccgctttatttgcatcaatatttagcaagtggaatgaaggtaggatgggaattaaattagcactgctactttttttgtttttatcagtttatctcgcaaacccaatttctacaactaaaacagatcactgcaatttctacgctcatgtcaatggcaaagtcttcttaggcgatgacccattgagtaatgcgactgttagtctgcctcaaaataactttcaaacactgagtaatcattccggagaatttttgcttcgttgggaaaatagggaagaaatagactctttgttggttgccatacaatcaaaaaagattgatacttcattctattggcaaattaagcagacaactatggaagttcatcttgaggatactttaattccaatgagtaaaaaaataattgccaacttagtggagagcaggactcagcagtttgaggaagaaatgcagggaaattatttaaaatgggagatgaaagatcccatttctatggatgaattgatacggttattccgtccttttgaactcaaagacacttattaccgcaatgaatttcgatacaagggaattgaaacagaattggagttcagaaagaatcttttagctgccggtataacagccgctgaggagctcaatccttatcgaaagcatcaatttgatagttgcgatatctatttaataaaaagcaacacttttccaaactatcaactagaatacgtaatggtgaaccgtaagccaatcaattttaaaataaatcagccacgataccatgctgaaaatcattattccgccaatatttcctttgaagaaaatattcggagtattcgactaaagctggagtgttcggctcaaaccgaaggttataaggtaaggcaaatggaattttatggctttttaccaatggaagagtatgaatttaagttcaaaaatggagaatggctaataatagctgctaatcaagtatcatgaagagaaagtttacagtaataattatattaattttatctctagaggcttgctttatagagcggaacacttctgagcagaaagaaacgactagtcctcaccttcgttttgaagcgaatccaattgacaactttgttatttatgaaggttttgtggtggcttttagcaaagagcaaagagtaccgaactataccattcatcgcattacaccggagcagttgcaggagaacaacggagttagagcccaacggagcgattattttaaagtagacgaaagagtcagggaatattcggctcaacgatcggattattacaaaagcggctatgatcgtgggcattatgtgcctgccggagactttgtttacagccaagaactcaaagatgagacctttacctattccaatgtttctccgcagttcaaagaattgaaccgctatggatggaaatacttggaagctgccattcggaaaagggtgttgcagtgtaactgtccggcttatgtagttaccggaagtttattcgaggcaggccataaaaccattggcgagaaccaagtgggcgtgccggatcagctttacaaagttgccttctatccggattccatgagtatgtatgctttccgcatgaataattccatggaggagtacagtggaagtttgcaagactatcagcttactgtagatgagttggaagcactcagtaaggaagatttttttgaaaaactcaaggatgaagatgaaagtcgattagaaagtgaaattcaaatgattgaagtatgaaaagacagctgtttttagatccatttttaatgattaaaaatcaacttgtagtagtggctgtttccctttttgtttttttcgcttgtgattcggctagggaagaagcgacgactaagcttaatgcaactgtcagcataaaaggaactcagttggtaattataaataaggacagtttcgactatgctaatacacaacttaaaatcaatgataactatgttttaaaaggatttacattcgagtccgggaaatcctacagagttggaatgaggcagtttgaagacgatgaaggggatcgctatgatgtgatggaaaagcctcaatcactttcaatttggtgtgacttgaaggacagtaaaaagggggcgtaccatgctgagtggtaaactttatacatcaacattaaaaggaataggcttacagtggataagagaaaaaaatatcagaatttattttcatcagagtaccgggctgctcgggtgaggactagtaattaaaaagggatgagaaggaaaccaaatacaagcaaagaaggaaacagatggtcagaaaaaacaataaagacggtttggagcatgggtggacttgtttccgggcattccccagaagtttggcgcttagatgtttgtggaaagcgaatgaaatgggctgaacacgggaatcgtttgtctaattacggttgggaaatcgaccacattgttccggtttcaaaaggcggaggagacggcttggaaaatctgcagccactgcattggaaaaataattcagccaaaggggatcagttgaagtgggagtgttcggaatgaaaaatatttagagagttgttttaacttaatttgttgaaattgaatgctaaaaattatatataatgatttttttaattagtttagagggcggtaaataagcgaaataaaaaaaagaaggcgagttaccccgccttaaatgttttcacaacggaataatccttattgtgaatcgctttcaaattgttttgtaaatatagaaaaaatataacaaatggcaagtaaaagaattttaggattggatttgggaactaactcaattggatgggcattggtagaagaggatttaagtaacagtgaaaagtcaaaaattgtaaaacttggtgtaagggttaatccattgaccgtagatgaaaaaataaattttgaaaaaggtcgtccattatctacaaatgctgaccgaactttaaaacgaagcgcaagaagaaatttacagcgttacaagttgagaagacaaaatctcattgaaattttaaagcaaaataaaataattgacgataatactattttggcagaatctggtaaaggaacaacccacgaaaccttacattcaagagcaaaggctgcaaaagagaaaatagctttagatgacttagcaaaagtttttttagctattaataagaaaagagggtataaaagtagccgaaaagtaagtagcgaggatgaagggcaagctattgatgggatgtatgtagcaaaaaagctttatgaagaaaatttaacaccgggacagtacgtgttgaatttattaaatgaaaataaaaaatacattcctgatttttaccgttcagacttacaaatggagtttaagagtgtttgggatgtacaaaaagtgttctatccaataattttgacagaagacctgtttagtaagctacaagagaaaaataagacgcaaacatgggctatttgcaaagagccgtttaagattgaaggaataaagcaacagggtacatcaaaggaaaaaagaaaggaacgttatcagtggcgtgctgatggattatccgaaaagttagatttagagcatttggcaattgtgttgcaagaaattaacaatgaccttaataaatccagtggttaccttggagctatctctgataggagcaaggaactattttttaataaagaaacagttggagaaaacttatacaagcaaattttaaaaagtcctcatacatctttaaaaaatcaagtgttttatcgacaggattaccttgatgaatttgaacaaatatgggacacacaaagtaaatattatcctcaactgactgaaaacttaaaggaagagattcgtgatgttgttatcttttatcaacgtaaacttaaatctcaaaaatctctgattagcttttgtcaatttgaaagttgggagcaagattttgtagaaaaagaaacaggtaaatctaaaactagaattgttggtcgtaaagtaattccaaagtcctctccattatttcaggagtttaaagtttggcaaaacctaaatagtttagaatttagaaattctgataagaacgaaaagattgagttcattgagcttgaagatgaaataaaacaagttgtttttaatgaattgaacctacgaggtgatttaaaaccaaacgaagttttaaaattattgtccaattatatttctattggtaaggtgtctcaatggaaatgtaattttgagaaaattgagggcaatagaaccaaccaagctttatataatgtttatcaacttattgcagataatgaaggatatggtattgattgggcaaaaaaatctgcgcgagaaataaatgaagagttaaaagcagttttccctgaaataggggtagacgcttcaattttaagctttgatgctgaggacgataattttgatggacaatcgagttatcagttgtggcatcttctatattctgcagaggaagattataaaataagcgaagaggataaaatactgtatggtaactcaagcgttgccttgaagagaaagttgcatacaaaatatggattcaaaccacaatatgcttcaatgttagctaatgtttctttgcaacaagactatgggaacttatcaactaaagcaatccgaaaaattattccttatctaaaagaaggtagcatttattcaagagcttgtgctttggcaggctataatcactctaacagtttaacatcagaggaacaagctaaaagagcactaaaaccaaagcttgatttacttaaaaagaatagtttaagaaatccggtagttgaaaaaattttaaatcaaatggtaaatgttgtcaatcaagttattgatgcttatggcaagccggatgaaataagaatagagttagcgcgagagctaaagaagtcagctaaagaacgctcagaaatgacaaaaggaatagctgatgcaactaaacgtaatgaagattttaaaaagaaaatacagaaagattttggtatcataaatcctaccaaaaatgatgtaattagatataggttatggaaggaacttgaaccaaggggttacaaagatatttttaccaatactcagataaaaagtaaggacttgttcagtaaaaacatagatattgaacatattattccgaaagcattgttatttgatgactctttttcaaacaaaaccttagcctatagaaaggataacctcaaaaaggcaaatcgtactgcttacgactttgtttcccaagattataataaagatatagaagggttcgaactaagagtaaaggacttattaaagaacggaagcataacgcgagcgaagcacaataaactattaatgtctcaaagtgaattgcctgatggttttattgaacgtgatttaagaaatagccaatacatcgctaaaaaggcaaaatatatgctttttgaagtatttagaaaagtagtttcaacaacaggtagcattacagataaacttcgtgaagattgggatttaataaatgtcatgaaagagctaaatatgccaaagtataaatcgttgggattgactgaggtaaaaaggcgttgggatagtggacaagaaaaagagaaagaagtagaggttattaaagactggagtaaacgtaatgaccatcgccatcatgcaatggatgctttaacagtggcttttactacgcataatcatatacaatatttaaactatttgaatgctagaaaggatgaaagtcatgccatctattctaatataattgcgattgaaaagaagattacgaaaagtaaaaacggaaaacgaacgtttactgctccaatgaaaaactttagggttgaagctaaatcacatatagagtcaattttagtctcttttaaaaacaagaataaagtagttacaaacaacattaataaaactaaaagtagagggcacaaattcaataaaaaagtgcagttaacaccaagaggacaattacacaatgaaacagtttatggtaaaataaaattacctcagaataaacctactaaaatcagtaaacgatttactttggatgaagctaagcagattattgataaacaaaaaagagaattgatattatcacatttggcaaaacacgataatataccggaattggcttttgattcgaagaaactaaaaaaagaaccgctaatctttaatgatgagcctttaaaagaagttttatgttttgaagatgtttttacaattcgaaaagaaatctcttctgacaattttagtaatgaaaagcaactagataaagttgtagataatcaggttaggagtattctgaaaagtagagtggtagagtttaacggcaattttaaagaagctttttcagatctggatgaaaatccaatttggttaaacaaagaaaaaggtatttcgataaaacgaactacaattagaggagtgagtaatgcagaaccattgcatacagccaaagaccattttggtaataataggatcgataaagatcaaaatgtaattccatccgattatgttagcactgggaataatcaccatgtagccatatataaagataaaataggaaagctgcaggaaaaggtagtgtctttctttgaagcagttgaaagagtaaatcaaaaattgccaataattgataaaaactacaataaacatcttggttgggaatttcagtttaccatgaaacaaaacgaaatgtttgttttccctaacgaggaacaagggtttgaaccaacagaaattgatttattcgataagaaaaaccaaaaagagataagttttaatctttttagaatacaaaagataggtgaaaaggattattggtttagacatcatttggaaacaacgataaccaataatttagagttcacatataaaagattacgaaacccaaatgcacttgcaggagttataaaggtgagaataaatcacattggtaatatcgttcatgttggagagtattaatgggaacctcaaactctgccaaagttccaaactttggcagagttcaattatagtttagcagtaagtaaaaaatttgcaaacttttttagttcttatacgcaagccttcaataaagtacatcagcgaaaagggacactttttatgaagccattcaagcgcaaaagaatatcagatgagaaatatttacgaaagttgatacactatattcattataacccggtagaatcgggcttagtagagaaagttcaggattggaaatactcttcctatcaagccttagtgtcagtctctgaaactaaattggatagagatgaagtgttacaaatatttgaaaataagtccaattttattttttgtcatcaaactcctccttctatgagtggaattgaagtatagatgagaccttgaaggttttttataagataaattaaaagccatgattaagagaactttgtattttggaagtgcagcctacttatcagtaaaaaatgagcaattaatcgttaactatcctgaagataaggagacaaaaagtttacccatagaagatattggaatccttttcttagaccattaccagttaaccattactcagccattattaagcaatttattggataacaatgtagctgtaatttcttgcaatgaaagacatcttccgcacggtatgttcttaaacttggatggacattatactcagcaagctcatttaagtgcacaaattgaagctacagaagcggtaaaagatcgtttgtggaaacaagttattcagcataagatttccaatcaagcaagccttttagcagattgtgagattgaaaataccaacatgcaatattgggcaaaacaagttaaaaacggagaccctgaaaatatggaagccagagctgctgcgaattattggcggaagttgtttgatgttgaatttgttcgtggtcgttatgatgatttacccaacagtttattaaactatggttatgcgatattaagagctgtggtagcacgtggactagttggttcgggtttgcatccatctttaggtattcatcatcacaataaatacaatgcttattgtttagctgatgatctaatggaagcttatcgacctttcgtagatcgattggtcttacaagtattagaagaagatgggggagcaggtgaggaattaaatatggggcataaaaagcaattgcttcaaataccaactttagatgttatgattcgaaacaaaagaagccctttaatgatagctgttcaacaaagtacttcatctttagcggcatgctttttgaaagagagcaagtcactaaaattaccgacatggcttcattaagcagtcgctttaatcaataccgcattatgtgggtacttgtattttttgacttaccaaccgaaactaaaaccgatacaaaaaactatcgaaagtttgtaaagggtttggagcaagatggcttcgatcggtttcaatggtctatttttatgcggcactgtccgagcatggacaatgctaatgtacatattaaaagagtaaaaagtatgttgccgcctaaagggcatgtttgtattttacatttaaccgataagcaatttgggatgatggaagttttcttatctcgaaagaaggaagatacccccgaaattcatcaacaattggaacttttttaaaagttaaaagagaccttcaaggtttttaaaacctcgaaggtcttactgcggacttcagcagaaaagcttgtctttttttctagaaaagggataaaagaactgtaaaatgaataattgcttaaaaatgtaagagaaaagtttgagcttaaataacacaaaaacagccccctatttagagggctgttgtgctaaattacaatttgaaagcgattcacaactccttcatgtatctttacctttctactcatgttgtgctaaattacaatttgaaagcgattcacaacttagcatctgcagtattgtctacattacccgttgtgctaaattacaatttgaaagcgattcacaacgtagattaacgtagtcccttttttcattgcgttgtgctaaattacaatttgaaagcgattcacaacacttccaaaattcttaaaggacagacttatgttgtgctaaattacaatttgaaagcgattcacaacatgtaagctgtcgtctgctcctctatgtttgttgtgctaaattacaatttgaaagcgattcacaacttctttgagggaacggacgacttaggcaaagttgtgctaaattacaatttgaaagcgattcacaacacttttggctaccttgaatcaataggacatgttgtgctaaattacaatttgaaagcgattcacaaccgatgcaagaaggttgttagaaagaaataagttgtgctaaattacaatttgaaagcgattcacaacgtctagcttttcatcattgctttggcggccgttgtgctaaattacaatttgaaagcgattcacaactaattctgcgggataatatcctagagaggtgttgtgctaaattacaatttgaaagcgattcacaacaaatattaacggaaacctaaataccgcaacgttgtgctaaattacaatttgaaagcgattcacaacctgagttctttggtagcagctatcttaatagttgtgctaaattacaatttgaaagcgattcacaacaaaaaagtttagttatgtcagacattgttggttgtgctaaattacaatttgaaagcgattcacaacctgagtactccactcttgggtagttatgtgttgtgctaaattacaatttgaaagcgattcacaaccccactccttcaaatactgagctagtgtaagttgtgctaaattacaatttgaaagcgattcacaactaaacatctcatcgttgtcatctagtcccagttgtgctaaattacaatttgaaagcgattcacaacnnnnnnnnnnnnnnnnnnnnnnnnnnnnnnnnnnnnnnnnnnnnnnnnnnnnnnnnnnnnnnnnnnnnnnnnnnnnnnnnnnnnnnnnnnnnnnnnnnnnnnnnnnnnnnnnnnnnnnnnnnnnnnnnnnnnnnnnnnnnnnnnnnnnnnnnnnnnnnnnnnnnnnnnnnnnnnnnnnnnnnnnnnnnnnnnnnnnnnnnnnnnnnnnnnnnnnnnnnnnnnnnnnnnnnnnnnnnnnnnnnnnnnnnnnnnnnnnnnnnnnnnnnnnnnnnnnnnnnnnnnnnnnnnnnnngttgtgctaaattacaatttgaaagcgattcacaacaactttggcattccaaagccattaaaatctgttgtgctaaattacaatttgaaagcgattcacaaccaatagtctcacgccagaaccgcttcatttgttgtgctaaattacaatttgaaagcgattcacaacaactgttaataaggttgagaaagtttgggagttgtgctaaattacaatttgaaagcgattcacaacactgaagaaggttttgaacttgttcaggaggttgtgctaaattacaatttgaaagcgattcacaactctaagttcaagttttataatgagaggatagttgtgctaaattacaatttgaaagcgattcacaactataagactttacatgactataaccactaggttgtgctaaattacaatttgaaagcgattcacaacgcaactatcagtcttgtagcaagtggtgcggttgtgctaaattacaatttgaaagcgattcacaactttaccaatagagacgtttctgttaaacgagttgtgctaaattacaatttgaaagcgattcacaactcaacaaaagatttgaagaaataaagattcgttgtgctaaattacaatttgaaagcgattcacaacaatatgagaagttgataaagaaagaagcaagttgtgctaaattacaatttgnnnnnnnnnnnnnnnnnnnnnnnnnnnnnnnnnnnnnnnnnnnnnnnnnnnnnnnnnnnnnnnnnnnnnnnnnnnnnnnnnnnnnnnnnnnnnnnnnnnnnnnnnnnnnnnnnnnnnnnnnnnnnnnnnnnnnnnnnnnnnnnnnnnnnnnnnnnnnnnnnnnnnnnnnnnnnnnnnnnnnnnnnnnnnnnnnnnnnnnnnnnnnnnnnnnnnnnnnnnnnnnnnnnnnnnnnnnnnnnnnnnnnnnnnnnnnnnnnnnnnnnnnnnnnnnnnnnnnnnnnnnnnnnnnnnnncaatttgaaagcgattcacaacggttcagtacttggtaatgttgttggtggtgttgtgctaaattacaatttgaaagcgattcacaacatagttaaatcagataaagatggaccggaagttgtgctaaattacaatttgaaagcgattcacaacgatggcaaaagatattctgttgatgaaatagttgtgctaaattacaatttgaaagcgattcacaacgtagattagagttaatccttttttcataggttgtgctaaattacaatttgaaagcgattcacaacggttatcccaatgtccgcgcgcttctgttagttgtgctaaattacaatttgaaagcgattcacaacaggagggtaaaggtataggttatgcaggtggttgtgctaaattacaatttgaaagcgattcacaacgagaatccatttatttctgtagatactgatgttgtgctaaattacaatttgaaagcgattcacaacagaatggatgcgattaccaagcaggggtttgttgtgctaaattacaatttgaaagcgattcacaacacagcttactggatatcaatagtttcaactgttgtgctaaattacaatttgaaagcgattcacaactaaaacaaaggtgttcaatacctattaccagttgtgctaaattacaatttgaaagcgattcacaacgcttcaagtgcgattattgcacatccaaaagttgtgctaaattacaatttgaaagcgattcacaactagttcagcgggataatatcctaaagaggtgttgtgctaaattacaatttgaaagcgattcacaacacttcaggagttgtattaaaaatgcctgttgttgtgctaaattacaatttgaaagcgattcacaacttactgctctatactttgtacggatagctagttgtgctaaattacaatttgaaagcgattcacaacttgtattattaattgattgctctattaaaggttgtgctaaattacaatttgaaagcgattcacaacacttgttcttgctaattcaaagccattaaggttgtgctaaattacaatttgaaagcgattcacaacgaagctgatgtgcttggttttggtcgcctggttgtgctaaattacaatttgaaagcgattcacaacgacaaaaaaggaaaagccaaagatacgagagttgtgctaaattacaatttgaaagcgattcacaacactaagatagcaaatgaatgctacaatatagttgtgctaaattacaatttgaaagcgattcacaacctaatatgcctgctttaaacaaagattttggttgtgctaaattacaatttgaaagcgattcacaacnnnnnnnnnnnnnnnnnnnnnnnnnnnnnnnnnnnnnnnnnnnnnnnnnnnnnnnnnnnnnnnnnnnnnnnnnnnnnnnnnnnnnnnnnnnnnnnnnnnnnnnnnnnnnnnnnnnnnnnnnnnnnnnnnnnnnnnnnnnnnnnnnnnnnnnnnnnnnnnnnnnnnnnnnnnnnnnnnnnnnnnnnnnnnnnnngttgtgctaaattacaatttgaaagcgattcacaaccaaaaacacgataactattttattcgtatggttgtgctaaattacaatttgaaagcgattcacaacacgaaaaagaaacactatgagcaaaaaaacgttgtgctaaattacaatttgaaagcgattcacaactaatgcttcaatcactttggcgcggtgtatgttgtgctaaattacaatttgaaagcaattcacaacacgtatcaacaaatattgtcccggacgcttgttgtgctaaattacaatttgaaagcgattcacaactccgttgccataatgaccaattaaaagaaggttgtgctaaattacaatttgaaagcgattcacaacacccgaaggtgtcataatgtaataatgctggttgtgctaaattacaatttgaaagcgattcacaacattatgggctttatattttcgccgatttcagttgtgctaaattacaatttgaaagcgattcacaacgagtgactgcatctgattgcgttttaaaacgttgtgctaaattacaatttnnnnnnnnnnnnnnnnnnnnnnnnnnnnnnnnnnnnnnnnnnnnnnnnnnnnnnnnnnnnnnnnnnnnnnngttgtgctaaattacaatttgaaagcgattcacaaccgctacccttctgaagagaatcgaaagattgttgtgctaaattacaatttgaaagcgattcacaactgcaattgcttctcacttgaaagccggtgtgttgtgctaaattacaatttgaaagcgattcacaacatcggcgagaatctagctactacaattatggttgtgctaaattacaatttgaaagcgattcacaacgcatcgagtgcaattattgcacatccaaaagttgtgctaaattacaatttgaaagcgattcacaacacaaaagttggtgccatccaagaaagtattgttgtgctaaattacaatttgaaagcgattcacaaccaatgttaacctttagacaaccattgggctgttgtgctaaattacaatttgaaagcgattcacaacaagttgaggttgatgtagatcaaatgaatagttgtgctaaattacaatttgaaagcgattcacaacggtttttagtgggttatgagtgggaaaaccgttgtgctaaattacaatttgaaagcgattcacaacagccctaaccgaaaggcttaaaaactccgggttgtgctaaattacaatttgaaagcgattcacaacnnnnnnnnnnnnnnnnnnnnnnnnnnnnnnnnnnnnnnnnnnnnnnnnnnnnnnnnnnnnnnnnnnnnnnnnnnnnnnnnnnnnnnnnnnnnnnnnnnnnnnnnnnnaatttgaaagcgattcacaaccttggcgacttaatagatgagggtttggaggttgtgctaaattacaatttgaaagcgattcacaactggagttggaaaaacaaaattgttagttgggttgtgctaaattacaatttgaaagcgattcacaactatcatcaagaaacatatcactaagtacacgttgtgctaaattacaatttgaaagcgattcacaacgctggggcagatataaatagcttcaataaggttgtgctaaattacaatttgaaagcgattcacaacnnnnnnnnnnnnnnnnnnnnnnnnnnnnnnnnnnnnnnnnnnnnnnnnnnnnnnnnnnnnnnnnnnnnnnnnnnnnnnnnnnnnnnnnnnnnnnnnnnnnnnnnnnnnnnnnnnnnatttgaaagcgattcacaacgaatgttcctgtttttgatgatgttgagaagttgtgctaaattacaatttgaaagcgattcacaacggtggctagtgctgttgctcctgctttggagttgtgctaaattacaatttgaaagcgattcacaactgtagtaagcatatatccggtcaaaggtaggttgtgctaaattacaatttagttcgctccttgttaattttttaatggagctcatgtattcgtttcgctcggaagaaaacgatttacaaattcctttaaccaaactaaaatcataatattttgtcaaacaagcttgtatgttgttgctttgtaggaagtttaaaataaagagaatgtaaccgtcaatattaactacctaattatctctttatatttatcatttaatttgaaggaattaagacacaattcttaaactttaatacagttgtcgtttgatggttgtagtcaaacagaaacggaatgattaaacaaccatgaaagagatacataatgattactttcattgaaagtgaagaggtaattaggttgaaaccggcacgggctaaagcttatcaggcgccacgtactaattaccttttctctattataagtcctagatatttcattatcaattaggtgtctattttctgatttacctagagggaaataattgacaatgaattccactttgtaaacaattaattttttggatttacatatgcaaaaatgtttattattgttgtccaatatgtttaaaggcatgagaaccaacaaatggttggttaggtgtaaactccacacttacctaagggtggagttgtctagtcgattagggggctgttatttaaagtgttttgggtttttcttctttaattctactagttctttaattctgccagttaggaattgtatcatttgaggaatttgctcttcacttgttgcggttatttcattcacgtttagatattttccaatgacatttccgttttctacttcctcgaattcccattctaatggaagcagttcagttttgaaaaacttggtgagttcgcctgtcgtgggaagtcctaaaggtatgtatattctgattgtcagataagttatgttttcatcgaaccaccattggaaaccaatgtcaatattgtatttgtgggggttaccgatgtttttgtagttgtaataggcattcctttttagttgtgtacttcttgatgaatctttagaaggcataccaaaagatttagtaaaatattccttgactgagtcaagtacctcgtccatttttgaaatagtattcgagatgttttctagacttagcagatcaatgcttttaaagttcttttccattgagatatttttttcgttaagaaatgaagagaattctgttaaaattggattatcagatttttgagctaatgaattaacgtcaacccaagtaatgttagtgtagtttattccctgcccttgtacagttttatgttcataaaactttgttaggtaaactagatgtttttttctgtttttctttgtttgaaaaatttttaggtaatcattaagttggttctcccgctcttctgcatcaaccttacattcaataattatatggtttttgttgtcaataatttcaatgtcaggacgaccaatattttcataatattgttgagttgatacattagcttcctcacctaattccatcccgagaagttgaaggaagtcagctcgaaaaatcagatcattttcaaagctataggcaaatatctctgtgcataaattttcaagctcattcttgttctctctttgtctgtatctgtatgttcttgtgaataacgattccttcatgtagttaatgttccataaaccaattaattcctaatacaccgattatttcttgtttattccttcaaagaaaaacaaaaatattgacagtcaatagggtatctagcctattctttctgaaccggcctaaatactttctgaaccggctgtttttctttctgaaaaggctgttttcctttttaaggggaatgagttttctactcagttgttagcgattaactttaaaatccattgcatggtatcctgggtatccatgattgaccaagaatgggggtgcttcgttccgtcaagccgaactcctttgttttgagtgattatgacttcagcgtttttattcccattaattttcaattgattaacaaatgcaacgatgtcaattccgttccaatcgtataaatcgcgttttcgttggtttagtaaataatctaggtttagatcagagtgcattctaatcgctgtattgttcaggtatttggcgtttcctccatcttttaccccaaaagaaaaaatggaagcatcaatgtaattttggggctgttcttccggagaaccaccataaatctgattataaacattaagcagccatttagcttcagctactcctgcttctgaaaagtttcgacttatttcacgttcgcaatagttgtaaaaacgagcataatccagc

SEQ ID NO: 2211 - DNA, 24179 bp, synthetic construct
  source 1..24179: mol_type = other DNA
  misc_feature 1..24179: note = Synthetic
agggcgtattacatggactacttgaggataaaggctatgaaatgctctatctgtcgatagacaaagatcgtgacgactcgcaatggagggagatggtggcgtactatcaactgcgtggttatcacgcccgggctggaaaagctctcatctctgatctccagcgtctatttgatgccgatgggactatgtcgattccatggaatatgattgttgatactcagggtcacatcgtgcagcttcatgcaccaaggccttctgatacagaggcactgtctgccgctttggattctgttaagtaactggcgtagtcagcaagtttaattaccgtcgccgtgagaaaatctcctattggcacacatactatgaccaggaagtcgacgccattatcggagacgcaaggtcgctattgagattaagtccagcgaggaagtgaagacccgccataagaacgggttgaaagccttcaaggaggagcatccggattgtcgactgattcttgtttcccttgaagaatccgcagacatactccgccgtctatctcttttttgcctttactcttgcgtgttcgattctttttactaactttgcaacagccgtaaattttacgactgtaaaattttattgaaatgaagttttatgacagagaagagcagttggagacactgcgcgaaatgagggaactatcgtacaatggttattctcgacttactgttgtcaccggaaggagacgtatagggaagacgactcttataaaggaagcctatcatgatgaaacctatgtatatctattcgtaggtaaaaaaagtgaatcagtcctatgcggggaattctgcgaagagttccatgagaagataggggtattcgtccctccgatgagtgctttccgtgatgtcttccgtttcttgatggaggaaggaacgcgccggaaatacacgcttgtctttgatgaatttcagaatttcctggagatcaatccatccatatacagcgatattcagaactggtgggacaagtaccaaaaggagagccatgtgaatatggttgtcagcggttctgtttattccctgatggagaaactcttcaaagacaggaaagaacccctttacgggagacaggattcgaccatcaaactgcaggcattccccacatcagtcctcaaacaaatcatggaggataacgctccggggtattccaacgacgatcttcttgcactatatacatttactggcggtatcccgaaatatgtggagttgttcattgatgtgaaagccacaacttgcgataagatgattgcaaaaatctgcaaggaggattctcccttgatagaagaggggaggaaactcctcatccaggaatttggaaagaagtatgcgacgtacttctcaatccttcaggcaatatcgttgggatacaatacccaggcttccattgaagactatctgggtggaaaaagcataggcgggcaactcttaaaactggaagatacttatgacctgattcggaaagtccggccaatatgggcaaagcctaaaacccagactgtacgatatgagatcagcgacatcttcctccgtttctggttccgctatgtggagaagaaccagcggctcatcgaaatcggtcagtacccggcactgcgcagaataatggaggatgattatgagacctattctggtgacatacttgagagatacttcaagcttaaacttgtggagagtatggaataccgcgatatcggagggtggtgggaccctaaagggtacattgacaaggaggggcatcatcaacaggcagaactggacatagttgcccatcgtctgaaagagaatatactcgatgtaatagaggtaaagcgaaatcctgagaagttcaataaaggccttctggaagaaaaaaccgcgtacttctcttccaaggagaaactggcaagaaagaacaagattgtactttcttgcctctccctggatgatatgtaacggctagccttgcagaattattgataatggagacaacatcattgtttcataatatcgccattttggtggaaagagatggtggcgtactatcaactgcgtggttatcacgcccgggctggaaaagctctcatctctgatctccagcgtctatttgatgccaatgggactatgtcgattccatggttactttttccagacgtggatgatctcgccaatgtacatgtagtgaatgcccaggccggatttctcgtaccattcccgctgctcctcaggcatgaggttggcgtcgaactgctgaccgtagagcttcttgcactcaatggccaggtctgcctcggcatagataggattgccaagttccgtgaactctacggtgagtccggcaccggcgaccttatcttcgtcgcgtccggagactctgcccaaataggacagctgctggcgcatatcggcagggaaatgtgtaaccgtgaagtagtcgttctcttccatgaatttgtgcgtatagcggcttgtggacacgaaaacagtgaacaccggcttgccccaaagttcgccgatggtgccccaggaaatagtcatcaggttcatgttctcttccttcccggccgacacttccatccagtccttgtcaatcatctggacagggttcagttcaatttccgtgggggcaatctcttgctaggggttacatttcgggctctgagcctgcttggggttatttccgcaactcataatggcaaatgcagcaagtaaaacagtgagtatctttttcataggcgcaaatttaatcaaaatccccactccgaccaagcgtcaggtggaacctgccgccgcgtcaacgcatggcatgatgctctcgacaacaacagcatccagaagcagtgcaggatccttggaatgagccgtatggctcattactacaggcctaaaggaaagagcaagaagaacctgcagattcgacaaggaacatatcgaatacccagccaagggcgtagtaacggatgtatcatcgcctaatacaggaaaccgaacagccaaagcggaatccggcaaccggagccgacctcggtatcgtcaactgcgaggtaactgtccgggacatccgcaatctgttcgaaggtctttccgacgcctctggcgcccttgatactgatgatacgcgccttccaattaatttggctgtatagataacgcttgaagcgtaggtcaaccttcgcgattttatatttcaaaccataagaatttttaaaaatttatggttgctaccgaaaaggatgtgtctaaagcggctgttttagtctagcagggtggttattaccttgatcatatcgtcgtcgatgtcgcggaacggcccatcagaaatatgacctgctttgtctgaggcatcaaataatcaatctaatccggcctatattctacttgtctaaaaagctaatgatagggacggtcttcacaaaatcattctgcgtctcgtatctatatgtgccaacctgccggacaaccttgcctgcagggacttttatcacttgatcgtcatagtacgccgaattttcggcagctaacagaaggacaatcggatccccatattcgaagctatatttgactttgtctttttcggagctttctgcaagagctgtcccgttcggcaaaacttgaaagactctgaatgatttaagcggcatagtctgtccggcttctgagaacatggaaatgccagaatcgccatatccggaattgtcgcctccggagtctttggccatgccgattaatgccagaatgagcactatgaggactgcacctgcaatcatcccaaaaaagaatattagaccttttttcatgacgttttatgtttaatttttagcgtttcctttgtgatttaattgcaactggccataagcaactcttttcaagtagtccataatcgcgctgtttaattctattgcaatttaggtgttttacggcactccgccaaatatttccgcaaaaggtgacggtaggatttacggcaacccgtcctaggttgtgatgaattggaccggcctctccgactgccaggccaagaagccctatatcgagattgccgagaagaccaaggccgatgccatggagctcttcgagcaggaaatggagaaataatccggctcaacaaaagctgcacaaaaatggcaataaatgttggtttcttgccagaaatgtattacttttgcgatgtcaaactgaatcggatgaccattacagatcatatcgtttactttgcagctctgcagcgaggccctttccgaaggaaggacctatccgcatggctggatgaaaagagcattccggttggtagcggcctgcaaacacaactagaccgcttggtcgcatccggtcggcttgtcaaatccggctggggagagtatcagttgagtgagaacacgaagccccgtctgcaacttaccctgaagcctgagacgaaggagatggcccagtacctgaagaagcgctatcccttggctgatttctgcatctgggacgcagccagcgtcattccttttatgctccacttgcccaatatcaaaatgattattgttgatgtggagcgccttctggggcaatccttcccggatgctatccgagagaaatatccgaatatgattgtgctgccgaatcccactcgggaggaattcatcaagttcgggagcaccaaagacaccattatccttcatacgctcacaacggaagcgcccattgacacttttgaaggacagcccgttcccacagcagagaaaatgctggtggatatcgtgctgaaccccgaatttgaattcctccagggaagtgagctcccccgtatataccaggaggcattcaccgattttgatatatcccgcagcagactgctccgctatgcacggcgccgttactgtgaagaaaagatacagcatatccttaaccgtataaacccccagagccatgattgaccctcaaagccgaagcctggaatggattgagcaggccagcgctctcattcccaatatcactgatactgcccttgtcgagaaggctatccgcgccctctcgctgctggaatcccttgtccggtccggctgtccattcgttttcaaaggaggtacggccctgatgctgcacctggatacttccagacgactgtctatagacgtggacatcgtatgccctccgggcttggacatccaggaattccttggtaagtatggcagcgagtatggctttcttgagactaaggagattgagcgcaaatcccgtataggagtgcccaaatcgcatgcggaatatcgttatgctgtcacatacccgtcgggccgccctacggacaagattctgctggatgtcttgtacgaggacattaactacaacgaggtggtctctcttcccatcaagagtccgctcctgaagcaagaaggtgaaccgattatggtcaagtgtcccagtctgaaggatatgctgggtgataagctcactgcatttgcgccgcacaccaccggcattcctttcttcaagggagaggatgaattctttatggagattatgaagcagctctatgacgtcagctccatccttgacagagtagataacctctccgaagtgcgaaatacctatagacagcttgtccctattgaattaggataccgcaagcttaaccaactcaccgaggctgatgttctcaaagacacgtatgattgtgccatgaacatctgctatcgaggtgctctggataaaaccgaatatggctattacgcgaaaggtgcccgaagtgtcaacagcttcatcatcccggagaattacaatgccgatatcgccattcgtgacgctgctgaggtggcatatctggttcgcctcatcgagactggcaatgaccgggtaaagcattacaagccagaaatggacggagaacttactggcgcccttatacagaatcagcagttgaacaagctgaacaacgtcaagaagatcagcctggaagcattcttctaccttttacagattgagaaaatggctgaataataagacgaaatgaagctttaattgaatggcccagtgagattcgccgggccattattcatggtgcgatgctctcggtcggaggaggttttgtggaagaggtgaatcggaagggtgtcgaccgtctccgacaggattcggacgcaggcccagactgcggagatgcccaacgagccttccggggtgatgaccttcttcgaggtggtatcggccacggtgtcggagagaaacacttgattcacagcgtgttcgaattcctgtgaacttacgcgcttctctcctttcaagaaagaggcaagagatgatagcagacttgacaccgtagcttaacactaaactaataaccgggtgcaaaactaatcggtcacctccgcctccaggtgaaacattgttacagtcttggaaaatcattaactttgtaagcagtacactaatcatcaatagtcaatgctttcttacaacgacatagaggaaatcaaacaagcaggattcatcggctttaagactgttgctgagatgaagtctggcggatgtcgtgagttgccattggtgggaggtgtctatatgattatccgccccatcaaaaagaagccgcagttcctccaaatagggagtggtgggcactttaaaggaaaggatcccaacgtgtcgattgaggaactccgggagaattgggttgacgacaccagtgtcctttacattgggaaagcgacaagcctcaagaaaaggctctcgcaatacatgagtttcggccgaggatccaatgtcggtcattggggagggcgactcatctggcaattagccgatgtggatgagatgcttgtgtgctggaaagaaacgtcggaagtctctcgcaaagtcgaggaaggcatgatcgcagattttaagttaaaatacggccagtggccattcgctaacctacaggattaatatgaagcagtttcaatatcaagaaatcagttgcagccttccgtctggagtagccaatatgatgaaaaagattaataagctcggagccgacggctgggagcttgtctcagtgtgccccacatcctcttcccaatatggtgtcgaagagttaacggcattccttaaaaaagagattatcaagtagtacgaagttatgaaaagactaatagccatattagcaatcgcccttctatccatcacatcttgccagaaaagtagcctttcaaaagggctctactatgcatacacaaaagatggcatgatttacctcgaactaatgagtggcactgattgcgtcatgttcttccaaggtagcaacgaaaaagacgatggatattacagtatttccaaaggtaaaattacccttctggctaacgcaaagaccaaagtcggaggcaggtctgtatcttggtggtttggcggctctttaggcacaggaattattaacggagattcatttaagatacaggctcagaggatgtatactgccgatcttgaatattattacgttaccttctacaaacattagcacagcgctcacttcggtgagcgttttttgttttccagcggaggtattggatgcggaaagaggggtattcggagtacatgcgtttcccggtgatgcgctccacctgggactcaagcatctcgtaggcatcctcgtaggtttggtagagcatccggatctccaggaaggtgtacaaaaagccagctggggagaggagcttgtgggcatcttctgacaagggagggatggccgagaactcctcctcgtaccgctgtcgcacggtgatctgtgcgtcattaattctacgttttgccatcagtcattcagcgacagcataccccgcctgtcgtaggaattatcatcatcgtcggcttgctttgtcatctattcgccaagggccatgatggatgcaacgattccgtctatcttcaccatgacagcattttcagcaatttctccacaaaaggtgttttgaatcggaatttattgtaaactgacagtaaattccgagtcttttatcgagaataggcccgggaatacatcaccgggccttcataaggatgcttcatgatactggctcctgcatcctgtcacgctattcagtaggacaaactgggcgtaaactataatggtccccaaagattggacacggagttaagacaaacaaaaacacttaaatttgttgtcgaatatgggaaagacatcacgcaagaagtacacgcctgaggtcaaggcccaagtggcgattgaagttctgaaagaacagtcaaccctggcggagttggccgaaaacttgtccgcaggctagacatcagggccatctatccgatgttttcgttcttccttttgctataaatccttgtaaattgaaaattaaactttaaatttgtaaaaacttttcagccatgattgagagagaacttacctcaaagcttcaatatcttgccaccaagtttcctttcgtggcaataactggtgcacgtcaatccgggaaatcaaccttggcagaagcaaccttcccggactacaggaaagtctcccttgaagacttggacatgcggtcttgggctactgaagacccaagaggattcattgcatcctaccccgaccataccatacttgatgaggtacagagagtcccttcgctcttatcctacttgcaaacacatacagacgctgccaagaaagagggaatgtatatcctgacgggctcacagaacatgaccctcatggagtctatcgaccagagccttgccgggagagtggcacttcttacactgatgcccttttccctccgtgagctgcggtctgcatcattgatgaaggacaacatcaacgaggcaatattcacaggttgcttcccaagaatctatgacaaaggcatagctccgtccgactattatccgaactatatcaagacctatattcagcgggatgtacgggaacttcgtgatataggcaacctctcaatgttcaacaagttcataaagctgtgtgccggaaggataggccaacttctcaacaagtcttctctggcagtggaatgcggtgtcaccgcccccaccattgatacatggctttccatacttgagacaagctgcatcatctatttcttgagacctgattacaacaacttttcaaagcgtctcgtaaagactcccaagctgtacttctgtgataccgggctcgcatgttcgcttcttgaaatccatgatgcctcccaactggagacacattacatgagaggaaatctttttgagaatatggttgtttcagagttcctcaagggtgcattcaacgctggcgaagagcctgtcctgtctttctggagggacaatgtcgggcatgaagtcgacctcctgcaatccatagacggtgtgcaatatgcttacgagattaaatccggagcaactttctcggctgattatttcaaagggctcaattattggtctgcgctttcaggcgcatctcctgacagaaagtccgtcatctatggaggtggtcagaccatgcagcgttccgatgggaaagtctccacgtggagagaactatagcaccttacaattttaaagttcgtttttcagtttgtaaacgattccaactttcacaattctgcacgtgcgtgcaaaagactaaaagaaaatcaaggatttaagttttatcctaaatccttgaccgagtggagcataggagaatcgaactcctgaccttttgaatgccattcaaacgctctaccaactgagctaataccccatttcgggtgcaaagatagcaaaaatccttgctatgacaaatcattttcaaaaaatagtgcggttcactaatcgaaaatgagtgccgtggacgcaaatagtgatgacaaaaaagacgagacgcatgtgttgcgccccgccttaagtgttttcacaacggaataatccttattgtgaattgcttcagatatagcaaaagtaaaacaaaatcacgattttacaaaactttttcatatatttatgcttgattaattttaaaccacaatagcatgaaaagcatcttgggactggatcttggcactacaagcattggatgggctcttgtgaaagaatcagagaacgataatgaaaaatctgaaatcgtaaaactcggagtcaggcttgtgcctcttacgaccgatgaaaggaccgatttcgaaaaaggtaaaagtatcactacaaatgcggatcgaaccagtaaacgaagtatgcgccgtaatctgcagcgctataagcttcgccgagaagctcttgtaagtgagttgaagaaggaacattggatagatgagggatatcgtttttcagaggagggacctggttcgaccttcagtactctgcgactcagagctaaggctgctgaagaggaggtttcgcttcaggaccttgccaaagtgcttcttcaaatcaacaaaaagcgcggttacaagagctcaagaaagcttaattcagctgaagatggacaggcgatagacggaatgtctgttgctaaggttctgtatgataggggattgacgcctggtgaatatgtatatcagaggatgcttgtcggacagtatgttgttcccgaattctataaatccgacttgcaagcggaattcgacaagatatggaatctccaaaaatcgtattatccggagcttacggcagaactatacgataagctgactgacaagaacaagtcccagacatgggcaatttgtcgggatgaacttggagttcagggatttaagagcagtttcactgggaaagaacgccttaaggaggcatatttcaatcggcaacaggcctccaggcagaaggttgatctcgaagtgcttacctgcgtccttcaggatatcaatggacagaaagcgtctcttagcggactgctcagcgccataagcgatcgtagtaaggaattgtacttcaaccggatgactgttggtcagatgcttgtccggcagattcaggaagatccgaacctgagtcttcgtaacactgtgttctatcgtcaggattacatcgacgagtttgagaaaatatggtccgtacagtcccgtttccatccggaactcactccggagctaaagaaaaagctgaaagatattataattttctatcagcgcccgttgaagagccagaaaggacttatcagtctctgtgagtttgagtcgagagaggtggacataagtgtggatggtgtcataaagaagaaaaagataggtcctcgcgtatgtccgagatcgtctccgctgtttcaagaattcaaggtgtaccagaccgtgaacaatattcttgtaaatggcgagcctttggatgacaatgaccgtgagaaacttgtcggagaacttgcgtttagggagaaaatgaaggggcaggatgtgttgaaactgctttacaaaacttccaaaggaatgagaatcaattttgaggaagttgaaggtaatcgcactatggcaactatccttaaggcctgtgaaaaaattgtcgaaggtcttggatatgatacaggggacttatcgaaaattgctgcatccgaaaaagtctcgagaattgaggagatttttgccaaggaagggtttaagtcggatttcctgcattttgattcgtcgcttccgtcacctgaatttgagagtcaggcttcatattctttatggcatctactgtattcgtacgagaatgataagtctgtaagtggtaatgaatctttgatagagaagataaagaaattatgctcgatggacgaggcgtcagccaaaattctgtccggatgtacgttcctgtctgattatggaagcttgagtgccagggcgatgaggaagattcttccgtatatgaaagacggcctggagtatagcgcagcctgtacaatggcaggatatcgtcattcaaagaggtctctgaccaaagaggaactcgacagccgggtatatgtggatcgtttggaactgctgccgaagaactgcctgcgcaatcctgtggtggaaaagattctcaaccagatgattaatgtggtgaattccgttgtcgatacatacggcaagccggatgagataaggattgaaatggctcgtgaattgaaaaagagcgcgagcgaaagggaaaaggcgcaaaaagatatcgccgccgccagcaaggtcaatgagtctatagtggcgacgctgaagggtagtccattctttattgacagcccgaaccggaacgatatcatcaggtatcgtctatgggaggaattgaagccgaatggttataaaaccttatacagtggaacttatattccgaaggagagactgttttctaaggactttgatattgaacatattattcctcaagcccttctttttgacgattcgtttgccaacaagaccattgaatcccgtcagtgcaatattgagaaaagcaataggacagccatggattatgtaaaatccaagtatgattcatctggggtgcaagcctatatagatagggtgaaagggttgacgggagtgtccaaaaccaagattacgcggcttcttatggagtccaaggacattcctgaagattttatcaacagggaacttcgcgacagtcagtatattgccagaaaggcccgggaaattcttgagtccatggttaagttcgtggttccgacaaccggctctgtgactgcaagacttcgtgaagactggcagttggtgaatgtgatgcgggaattgaactgggataaatatgagaagctcggtcttacgtcgttcagagaggaccgtgacggccgggcgattccggtaattgaggattggaccaagagaaatgatcataggcaccatgcaatggatgcccttacgattgcttttacccgtcggcagtttatacagtatctgaatcaccttaacgccaaaatagataccgtagataagacagatatcgacctgcgggactataatcttgaagatatcagtttcgatgggctcagagatggggataaattcggaatagtgaaggcattacagaagaagtatctgtataaggacgacaaacaaaagtatcgttttgtcccgccgatgccgctggatgagttccggatagaggccaagcggcagatagaagatgtattggtgtccttcaaggctaaaaataaagtttgtaccaagaatgtcaatactaccaaggttcgaggtggtcagcaaaggaaaattcagttaaccccaaggggaccgttgcatgaagatacaatatatggaaagcgtcttcaatatgtcacaaaggaggaaaaggtaggtgggtcttttgatgaagcgaagatagcttccgtatgtaagaagtcttatagagaggctcttatgcgtaggcttatggagtgcggcggtgatccaaagaaggcgtttaccgggaaaaactctcctgagaagaaccccgtatgggtggatgagttccactccggggaagttcctcttagagtacgcacggtgagtatggcttctgtctatactgtccgcaagtctgtgggccaaagtttgaatattgaaaaggttctggataagcatatcagggaaatccttcgggcgcgtcttgaagaatatggcggaaatgcatcaaaggctttctctaatcttgatgagaatccgatatggctgaataaggagaaggggattgctgtcaagcgggtgacaattgacagtggtaagaatccgattcctttaaggagcaagctggataaggacggacagataatttatggggagggacagaatccgcaggagtctgattttgtggttcctggcggaaaccatcatgctgccatatatcgcacaccttccggaaagctccaggatgtggtggtatcattctatgaagcagtcagccgaaagaacctcggcctggaagtgattgaccggaatttcaaaaaagacgaagggtgggaatttctctttacgcttaagcagaacgagtattttgtgttccctaacactgccacagggttcagcccggaagattatgatctgacggacccggccaacaatgcggttataagttcgaatttgtatagggtgcaaactgtttctgttggagattatcgtttcagacatcatttggaaacaactgtcgaagacaatgaaaaattaagggatatagcctggaagcgtatcggactttccggtcttgtaggagcggtcaaggttcgcatagacaatttgggacgtatcttggcagttggtgaatatgattaaacgtacattatacttcggcaatccggcatatttgtcgctaaaactccggcaattggtggtaagcaagcctggggcggacgactccaaggcggaagttgtcaagacaataccgattgaggacattgcgacgattgtcttggattgtaagcagataaccatcacgcaggcccttcttgaggagcttttggaagccaattgttcagtggtaacatgcgattcgacacacatgccgactggattgatgctgccgctgagcggacatacgcagcaaagcgagcggtttcgggcccagattgatgcatctcttcctcttagaaagcagatttggcagcagaccgtgcagtcgaaaatagccaatcaggctgcggttttggagtttgccacgggacagaagcatccgaatatgcttcagtgggcgaacagtgtgcgcagtggtgaccctgacaatctggaagcaagggctgcggcgtattattggaaaactcttttctgtggaagtgtggacgggtttatccgtggacgacatgaggatacaccgaatgatttgttgaattatggatacgccctggtcagagctaccgttgcgcgagctctggtgagcagcggactgttgcctacactgggagtgcatcaccataacaagtataatgcttattgtcttgctgacgatattatggagccataccgcccgttcgttgacaaattggtttatcagattgtcgaggagaatgatttgtggattcttgacacagggatgaaaacgagattgctgtcaataccgatgatggatgtgcagatcaatggggtgacgagtcctctgatgattgccgcaactacaactacggcttctcttgccaagtgttttaacggagagtcccggcaggttttgtatccggtaatgtcttgcaaatgaaagagccggagcgtataagtcaatacagagtcatgtgggtaatggtattctttgatcttcctaccaacactaaaaaagaggtcaaagccgctgctgaattccgcaaacaacttttgagtgacggatttataatgttccagttctccgtgtatctccgacattgcgcaagtgccgagaatgccgatgtgcatatccgcagggcaaagtcgtttcttcctcctaaaggaaaggtgggcatcctgagaataacggataagcaattcggagccatggaacttttcaactcccaaaaatccgagtccttaccggaggaaggggtgcagttggaattgttttagaattatacataaaggttatatgacatcatgcggagtttgtgtccaattcgcaggatatccgctttaccgagggaaaagacggggcgatttacgcattctgtatgaatgttccggagtctggcgggacggtctctattcacaatctcggggaatcctctggcttgtctgttaagagggtttcgttgcttggatatccgggagatttgctgtggagtcagactgcatcgtctctgagtattacctatccgtcccaatcggcagatctgtcaacatttgtagtatttcgaatcgagatgaagtaagtatatgtgacacggcatctgtatgggtgtggccttgcgcaaaagtgcgtctaaaagtaaaaaagttcggagaaaatccgaacttttttaatttggaataatctccataagtgcttggctatctttgttttgcgcaaactctgttgtgttcgaagaacaaagataaaaaatctgaaagcaattcacaacgtatgcgctggcattggacggcgaactgtgttgtgttcgaagaacaaagataaaaaatctgaaagcaattcacaacgatacacacctttgcccgagtggaacgcttgttgtgttcgaagaacaaagataaaaaatctgaaagcaattcacaactgagcctctgaagactatgctggggaacaagttgtgttcgaagaacaaagataaaaaatctgaaagcaattcacaaccagggagtttgagataagcaagtacacccgttgtgttcgaagaacaaagataaaaaatctgaaagcaattcacaaccatacggtcaattcgccgtcgggcgtatcagttgtgttcgaagaacaaagataaaaaatctgaaagcaattcacaacatcattggcgcattggctctattcgtttttgttgtgttcgaagaacaaagataaaaaatctgaaagcaattcacaactatatggagagcatacaaaaagggacaccgttgtgttcgaagaacaaagataaaaaatctgaaagcaattcacaacgactataattcaacatgtccggctgcattccgtaccggagaaagcctcctccggtacggaatatgcgtaccgtgctcaaaaaggcttcctacggtacgcgacgcgttttcagaagccctccgtgctcaaaacaggcttctggggtacagaagggatattcggtaccagaaacccccttctctggtacggaacaagccatgtgaaccgggaaaggctttctggtgtaccgactgaagcggaggaacgcggctccggctctgagattggtgattttgcgaaaaacagccatctgtatgctcctgttactgccgctaaatagctgcagactgtcatggactacctcaaactacctccaactctgccaaactatcgctggctaccgcgtcctacagccaaactaccacctgaccgctaccagactcccgcaaactacgccggggcgcatcagtaaaccgccgcagtaattcaatgataatctttgtaaggacaaaaccctgaaaagcgactaacaacttgccgaaatattattaattgtcgtcaaaaatgttaattttgtaaaagtgttttggcaaacatgcgggtggtttgtaaatattttaaataaattggttgtgttttttgatgcttatggtgtttctgcttatttgtggtgtctattatttaatgtatcgcgcaataatcaaaatcattcgcgagatcaaaaaaaagtaacctttgttcagaacaacagcgcccctaatccgcgtcaaccgtgctaactgcacctgggggatgagacgggacgcgaacagcagccctcctaatccaccgtcaaccgtactccagagtggtcgatattccgcaggctgcccgaaaagcagcgccccaatccgctgtcaacctgcacccaggtaatgagatgggaagcaaacaacagcgccccaatccaccgtcaaccggcagttgaggtagtgcctgcggaagagagttacaactccagggcagcttagattctctcggacccgcagcctaggtagtgcgtgcggatgaaaggggtagtgtagcagtatgggatgaatcccagtgacggtataggcttagtcaggatgaggttggcgagtttgcccacctctatggagccgcagatgtcactgactcccattgcgtaggccccgttgatcgtgcatgcgttgagggcctgcaccggagtgagtttcatctttatgcagccctgagccatcacgaaacgcatatctcctgatggggaagatcccgggttgaaatcgctggcaagtgcgactccgagaccgtttgatatgaaatctcgtgcccgtccgtacgggagtcccagaaagaaagatgagcctggcagcatagtaggcatagtgtctgtaccttgcagagctttgataccctcttcgcctgtctgctccagatgatcgacggacaatgctccgtgccgcagagccgtttccattccgcctatgacagctatttcgtcaatgtgcactttgggccgaagaccgaaccgggcaccttccgcaagtattctgtccatatcttccggactgaagaacccgtcgtcgcagaacacgtcaatgaagtctgccagaccctgaccggcgacctgaggaatcatttcgttgatgatgagggacacatacttgtcttttcgcccggtgtatgcccgaccgactgcatgcgctccaaggaatgtggctcgaatcactgccggcacagtctcttttatgcgttttatcacgcgaagcatcttgagctcatcctcgacgctgagaccatagccgctctttatctctattgctccgctgccatgcgatatcatttcatttacccttgcgaggctctgctcgtaaaggtcgtcttcgcttgtatcatgcagcaggtcggaagagttgaggattcctccgccacgggcggctatctcttcgtagctcaagccgttaatcttgtctatgaattcttcttcccgcgtgcctgcatatacgatgtggctgtgggaatcgcagaaagatggcatgattatgcatccggtggcatcgatggtcttgtcgaatttcccctccggcatgtcattcatctctccgaaaccggagatatgtccgttttccgctgagagccaggcattctttatgctgcctgtatgggacatctcatccccctgcagacgaagagtgccggcaggggtgatgcccgtgagttctttaatgtttacgaatatggtcttcattgcgcaggaaaagtacggacttttctatcagaggatgaagatagctgtcattgtccacgaacggcacctggctgcggtagtcgtttatgataccctcaagcacaggtgaagttttggccgggcgacggaactcgagcgcctgaacggcattgaggagttctataccaagtacctcttccacattgtccaatactcttacgagtttggtggcggagttggagcccatgctcacatggtcttcctgtccctgtgaagaaggtattgagtcgcaggatgccggccagcagagacctttgttctggctgacaatggatgctgccgtatattgcgggatcatgaatccactgttgagtcccggcttggctacaaggaatgacggcaggccgcgctgtcctgagatgaggcggaatgtgcgtctttccgagatgcttgcgagttcagacatggctacggccagggaatccataggaagggcgattggctctccgtggaaattgcctgccgagatgatcatatcttcgtccgggaacacattcggattgtcggtggtgctgttgatttctatctctatgaccgactcgacatagcggatgcagtccttgacagctccgtgcacctgaggaatgcagcggaatgagtaagggtcctgaacatgtaccttgtctctcttgataagttcgcttccttcaagcagatgcaggaatctttcaccggtctcaatctgtcccttgtgcggacgaagctgatgcgtaagagcgaagaaaggctctatgcggccatcgtatgcgtcaagggatatggcaccgatatagtcagcccatttggacaagcgtttgcttttcaggacgctccatactgcatgtgcgctcatgaactgtgtaccgttgagcagcgccagaccttctttggactggagggtgattggctgccatccgaattcggctgccacttcggcacttggacggatttgtcctttatagaggacttctcccagtccgagcagcggaagtgacagatgcgccagaggagcgaggtctccggaagcacccagcgagccatgctgatacaccacagggaggatgtcattgttgaacatgtcaatgagcctttgtactgtgaccagctgggctcctgagtgtccgtatgagagggactgaactttgagaaggagcatgagcttcactatttccgggcgcacagtctcgccggaaccgcaggcatgggatacaacgaggttgtactgcaactgggaaagcttgtctgccggtatggtgacgttgcagagcgagccgaatcctgtagtcacaccatagaccgggcgtccgatgtcgtccattttggtgtcaagatagcagcggcacttttcgatggcctgaatggattcttccgacagtacgagcctggcgtggctgtcaattatttctttgaccttgtcaagggtgaggtgttcggatgagatatggtgtatcataattctgtattcaatgcgttgtctatcagtgtgtcgtctgccataaccggcattgtgaccttgaggtcaggagtgcgcagcatctgtctgaggatggcgcttaccgcacctgagttacgggcccagctgcgtctggcaataccgttgttgacatcccagaagagcatctgacggatgtggcgggctgaatcctcggatccgtcaatgaccattccgaagcctccgttgataacttcgccccagccgacaccgccgccgttatggatagatacccatgtggcacctcggaaagagtctcctatgacattctgcaccgccatatcggctgtgtaccgtgagccgtcgtagatgttggatgtctccctgaaaggggagtccgtgcccgatacgtcgtgatggtcgcggcccaatactatcggagcgcttatttcaccgcttcggatggcgtcgttgaatgcgagggctatctgtgtccttccgagacagtcggcgtagagaatgcgtgcctgagaacctaccaccaggtggtttcttccggcttcttctatccagcggatattgtcgtgcatctggtgacggatatcatccggagcctgctctgcaagttcgcgcaataccttgacggccagcgcgtcgctcttggcgagatcttccggattctccgacatgcatacccatcggaacgggccgaaaccgtagtcgaaatatagcggtcccatgatgtcttccacataggaaggatagcggaaagtcccgtcttccttaaggatgtcggcgccggcacgagaactctcgagaaggaaagcattgccgtagtcgaagaagtacatgcccttggcggtgagcttgttgatggcttccacctgacgccttagcgaggcctgtacggcctgtttgaacttctccggctcttctgccatcatctgtttggcggcttcaaagccgatacctgccggataatagcctccggcccatgggttgtgcagggatgtctggtcggagcccaagtccaccatgatgtcttcgtctgcaagtctttcccacaaatcgaccacattgccgatatatgccattgagaccacttccttgtcctgtacggccttccgtatgcgcgggatgagttcgtcaagattgtcgtggagttcatccacccagccctggtcgtgacgcttgtgcgctgcaagcggattgatttccgccgtaacgctcaccactcccgcgatattgccggccttaggttgtgctcctgacattcctccgagaccggcagtgacaaagagtgttcctctcatctgagccgccgtaccttcgagtccccgtttgcgcagctgcattcttgcagcattcataacggtgatggtggttccgtgcacgatgccctgtggtccgatatacatatatgagccggctgtcatctgtccatactgggatactcccagcgcgttgaacctttcgtagtcgtcgcggctggagtagttaggaatgaccattccgttggttaccactactcttggggcgtcgcggtggctcgggaaaagtccgagcggcaggcctgagtacatggacagggtctgctcgtcggtcatctgggccaggtactgcatggtgagcctgtactgcgcccagttctggaaaatggcaccgttgcctccgtagatgatcagctcgtgcgggtgttgagccacacgtggatcaagattgttctgaatcattgccataatggctgcagcctgacggctcttggccggatactggtctatcggacgggcaaggatttcatttgacgggcggtagcggtacatatagatgcgaccgtagtcccttagttctgcagcgaattccgtggcgagagccggatggagctcttccgggaaatagcgcagtgcattcttgagggccagagtcttctccttacggctcaggatgtccttgcgctttggagcgtgattgacctcggggtcgtatggcttggcttccggcaggtaggaaggaattccctccagaatttcctcctgccagcttaattgatgatggtcggggttgttcattgtatgtgactgttcacgatttctaatatctgatcctggagtgtcatggcttccgctgcgatggcttccgcttcagcgttgagcttggctgccatggccttgtcctgtagtccggctgagttgatgcgtacattgagctgtgctccgcgtactgcagctgtggcggcaagtgcaccgactcctgcgtctgatgccgatgccggattgccttcctccgccatggctttagccaccggaagggctttgagtgcggctttcattgtacgcagaggtacctgagctgcatacagggtagctgcttcgagggctgttgcacgggcggctttctcttcgtcgttgcctttaggcatcttgaatacatccattattctgccgaatgcggctgtgtcatcatctaccagctcgagaagttccttcatcacctcctggcccttttctgcccagtcggagaactccttccatctgtcgtcccagcctcttttgtgggcggacagattggcaaccattgtgccgagtgcggctcccaatgcgcccatatatgcggaaatggaaccgcctcccggggcaggggactcagatgctgtctcttctgcaaaaccggtcagagtcatccttacaagtctatgccttacagcctcttccgcctcatcctgcatcaggtattctatgactttttccttagggtcgaatggcttcaaatcgtccaggcccatggacttgacggcgattttcatgatttcttcctcggagatacccatcgagcgctgctgcttctcaaggaaatactttcctgcatcaatcagtgcgctcttcggcacgagtcctacgatttcagatccggtgactctgagtccgcgtgcctgggctgcgcggctgacttcttcgaaggccttgtgaagcggggtggctgtgatatcggtgatgttcatcgagacttgtgctatgccgtattcgtcaatgtaccagccgatagccttgcatcccttgagggtgcccggtatccagatatccttgccgtcagcgtctttgagaaccttgccggtgagggagcctccctcgcgtgctttacggcccttttctctgacatcgaaagccactgccatggcacggcgggtggatgtggtgttgaggttgaaattgacggcaataaggaaattgcgtgcacctacattgctggctccggccttggctgaggtctcgtcgtaagtctctggtccgaagtccggtctgcgtgtcgggtctgccattttctccggaagagcttcatattcgccggccctgcagacggcaagattcctgcgctccggcttgaaggctgcggcttcgtagcagtagcaagggattccaagttcggaatagacgcgcttggagagatcgcgtgccagttcggcgcattcttcaaggctgattcctgctaccggaatgagaggaagcacatcggtggctccggaacgaggatgagcaccgtgatgatgtctcatgtctatgagttcctgtgccttttgtacgccgcggaatgcggcttcgcatacggcctccggacttccgacgaatgtgactacggtgcggttggtggcttcgcccggatcgacgtcgaggagtttgactttttcacctgttacgggggatgcagcgccggtgattgcggcgactatcttgttgattacatctttgttgcgaccttcgctgaagtttgggacgcattcaacgattcttttcatatagacaaaatatgtgttagcagtccaaagataattaaataatcgttacggagttccattcgtgtgcacgatatatgaaattatcacacaaattgtgatttgggatgatatgccggggttttggtgtatatttgcaggttggattgtatgttccaaaggactgatttatgagacttgttatacaaagaaccaaggaggcgtccgttgtggtggacggggaagtggtaggctctatcgggcagggacatatcgtgc

SEQ ID NO: 2212 - DNA, 24179 bp, synthetic construct
  variation 15660..17205: note = n is a, c, g, or t
  misc_feature 1..24179: note = Synthetic
  source 1..24179: mol_type = other DNA
cgtgcgtttataaatggctgaagtccctccggaagtcaagaacacgttatgtccggagaatacctcttcccggttctcgttaaaatcccagcatctgacaccataacatccatgttcgtcttgtaataaggcaatgacggcatgattatcgaatatttccacggtaggacaatgctccactttatcaatcacgaaattcgtgatcattcttccggtggcatctccaccggcatggaggattcgtttttggtggtgaccaccctctagacctagggccagttctccgttttccgtgtcgaagtgcataccgtcattgattaattcctgtatgcgggcaggcccttcatttaccagtacgttcaccgcgggatagtcgcataaacctcttcctgccgtgatcgtgtcttgaaagtgaaataacggggcgtcatcttctccggtgactgccgcgattcctccttgggcaaaataagaattactttccctaatatttgatttagttaaaagtgcaactttcccgtaggcagatgcacgataggccgtgtaaagacccgctaaaccactcccgacaatgatataatcgtaattacgcatttttgtgtcatgtaaattggcacgaaattaggatttttttatctatatcccgcctctttccttcgttttttcattttcaagagggtattttccgttttccattataaaagtagtaattttgagtttctaaagttgaatagagatgagagcatttggatggttcattatcacccttttattaggagcttgttctgcggacaagccttctaaaaagtgtatttacccggcaggagatttgtttttcagtaaggaaaaagcggggtgggatgaggtatatattggtagggaatatgctgatacggtgctggtgtataatcccacgaaaacgggtattcgcctggaggggtttagccatattccggaggttgcttgcaagaaaatcggacactctgaacaggattggaatttaggaggatataccgtggagcccgggacttgcgacacgttaatcgtaacgttacgtttaaagaatgaatccatgttgggtaattattataacgtgatgcgtttcatgataaacggggaggtggattataattacggttttatgattgatgtacctgtacgggaggattttgatcattggagcgaggaggaaaaagcacgagcccctcatttcatggtggactcgacggaacgtgatttcggaacacttcgggaaggagaggagtccaagatgatttttaaaatccaaaatgttggggaacgtaacttgatcatacgtaaaatagaaaccacttgtggttgtaccgcggtactccccggtcagcgtgttcttcttcccggcaaggaaatggacttgaatgtcattttccactcggcggggcggagcggtaaacagcgtaaagtgatcacactcttttgtaatgatccccgtcaacccaagatccagctggtagtgaaaggtgaagtgaactgaaggattgtccgatgattggctatggttaggctatctttccctatgaccatgaacatagcatgaacactgcaagtacatagtatgaatactgatgtgtgtatatgatgtgtaggtgttatatttgaatttcgtaggtgtctcaaggcagtgataaaggagagatagctcgttgtaaggggagggtttaagaatagcgagacaaggaggaaaactccccccccccggcttcgctgtactccctctataaacgaggcagcgaagctgacggaggagtttttcatataaaaacgagttttgatattttcttttaccgcccgtttatttcacgattatcgtgaaacaatcgtttacatctttggagtatccttcgtttttaaaattcagagaaatcagataacgtccgatcggaatatcatgttctaaaggcacttcgaaggtcccatcaccatatactttcaaatattcccacatcttctcggcatttcccgttgtcgttttgatgtcttttatggaaacgtatatctgagtagtcccgtccactccttcaatcgggttacttacccatggcgtaccccattgagcccgttgataatcttctccggcaccgacttctataatttgagtgggtaaaatgccccagctgatcaagagttccggggtataatattccgggttttctgctaataattcatagtaaagcggattatccacttcttctaattgaggtggagtggtgtccagttctttcttaacgaccattgtgtcgggattataaccggcatcttctgtttgtaaaaagccaatcgttacgtcttggcaactcgatcccagacaggctgtaaaaacgagtattcccaatatgagtagattcttcatgattttaaattttaagttccgtgttagattttacctagtacataattgtagtttaacgcgtgtactaccccgtttaacggttgaatatccggagaggctaatggaaccatttccatggcatcaaacgaataaaggtacatgaaaattgctccggcgtccgagactccaccataatttgttttttcccggtaagctcgtaatttgttcccgctttcgcaagtaaaatctgttccccctgtttgttcttccgcttcaatttcgtaatcccggttccggaaagcgatttcatctttcagatgtttgccttttataacgtggcgtaataccatttcccgacaccaatctttgtcaagtgcttgaacgagatgttccggatgatttttttcgtcttccgagagtgctctccaacgatccggatctccgggaaattgttcttttccagatgctttgtcccacacgtagcgaagaatggatagggaaggaggtgcgaaaaacgtgatttctttgtaattcggatccttcccctcgaaaatgtgggtgagttctgccctttcaattaattctacggttaatttccagttagctgtgtccttctgtaaatattccatgatactgcaatcgtgataaggtgagctgattccggaatcaaaccagtcttgctttgtatcacaggcggaaagtcctgcgagaattagaaagtatatccatatatttaatcctgttttcatgatatgttcatttttatatgtgttctttttattgtctttttagccaataggtattctgtctcatcaatgaattatcccaaaacaaagggtcttctaatgcattgaaaaatacaccgtcaaccacgtcttgatcagaaacgtttcggaaatttccgtaaagctccgttttatagtacccgttccgtaatacatcaaaatagcgggtcccttccatcaataattctttttcccgttctttgaatatggcatagcgtagattgccgtcatactcggattcactgtagcgtttggcttttgcccggtctcggattttattcaaatcggcgatagctccaatccggtcgtttagtctggcccgacattccgcacgtaatagatagatgtctgccagtctccaccatattttgttttgatcaaagttgatgaattctccggccatgtatccgtcagtggcaacccgagcgtaacgccatttgtaaggataggcatatcctccggtaatttcttcgtcttcttgttccattttttcaaattcgtaaaaccaagcatcccgacgtaaatcagtggttggggtacttccatcggtgtagtcctgaaacatttcccggacggttgaatttagtatgcgatacattgtttttttgttatctccgatttttttgccggggatagccgggtacgcttcgtagtatcttcctaggtttgtcatgttgctctctgtcatcgcgtcaaattcattccaatatcctcgaaatacactttcaaaaatgcattccttaccaccatctacgaatgttttggtgcaaacctcatcgggtgttgattctaaatcataaatatcctgtctgttgataattgcactacaagcagaatctaccattcgccataattgttgttcgtcatagtcacggtcttgtggttgggccatgtatttacatccggctttccaagcacatagatgggctagtacggcgttggcagctcccttgcacgggcgggcccgatggcttacggaagttccactggattctttcagttcattccattccggcagaagacgtgcggcttcttttgctaaagttatggcataatctgtcaccttgggccaagtcgttttaccgataggttttagttccacttcatcctgtatcatcacgcaatctccccagcgacggactaaatctaggtaaacgaatgctttgaaaaaagcaatttcacccctgtaaaagtcccgtctttcttgtggcatatcgactttgttaatatagggtaaagcaacattggctgctgcaattacattataattccagctccattgtgctacatatgcttcgggatcttcttctcttaacaagtcataagaattaatctgacgataatctgaaaattcacctcgcatctctggtgaatacggggctgaggtcatgtttactcgtaagctttgttctgccccgaataaggctgcttcgatgtctttttccgtgtcgaaggcattctcgaaggtaacggagttttccggttttaattccacccactcttcgcaagcatatatcataaatgccccgattaccgttaaaaataaatatcgttttttcatcgcctaaaatttcaatgttaaacctaatgttaatttgcgagctaaagggtaagaacttcccgcgtcttcaccgttgcggatgtccacgatttcaggttcaataccggaataattggtgaacgtgtatagattttccccgctggcaaagattcttaactcgtccagcccgcatttttgcatccatgctttgggtaaagtgtaaccaatagatactgtttttatttttagccagtttaccttttcaactcttcgatcaacatatcgtccgccccacaaataagtgttccagtcgtattgccatttagggaagtccgatttatctccgggtttctcccaaaaagatactttatttaaattcatgacaatagccggatattctgccgctccaaaatcggataaacacctcgtttgagtgatgtttaacatgtgtcgtcctaattggaaacttaataggatatttacatcaaagtttttccactggaattcattcacgatccctccggagacttttggcaaggcacttccacaatatacttcatcgtcaaaagcggtgattttgcgatttccatccacgtcgatgaatttataatctcccggtttatagaatgtgctacttcccatttcagaagctaaaggagcttttatacctatttgattatagaaaacggggacttcatcttgataatctacatatccgtctgttttcaaggcgtatatcccgtttagtgattttccgattactcggactaaatctaaatcttttccggtgtaggatttctcaaaccggttccagttacgggcggcgttcacagatattttccaatataaatcggactttctgaaaatctcgtatttgaccataacttctaatccttcattagaaacggctgcggcgttgcgccattgttgttggtatccggtgtttattccggcactaggtaagcggacccgatctagtaatttatctgtatagcgataataataatcaatcgtgattcctaaacgatgatcaaacatatccaaatctaacccgaaatcgtactgatccgtttcttcccaagataatttgtcattataaagcccgtcaccccattgtggttcgatataactatttccaaggtaagatgtacttcccacgttcataattcccaatgccaagtaattttgggaaaagtgcattccggaacgtccccagctagcccgaatttttccaaaagatacccatccgagattatctctcacgaaaggttcttccgaaaaactccatgctgcagcaatggatggaaaagttccccagcggttgtttttcccgaaggtggaacttccgtctctcctgatactggctgaaaaaaggtatttttcccggaagccgtattccaaacgagcaaagtaggataccagtgtcttttcctgcatgtcggattggtaatctttaagagctcggatttccgtgtaatctccccaaccaacggtttccagatcaggcataccgtaaggtgcatagtaaattttgtcacttggggattttcgggctgatcctccgttgtattcttcttgatcatattgataggaaaaacctgccataaattcaatgttgtgatcttcatgaattgtttttttataacttaacaggttttcattcagtaccattaggttgatgcctgtttccccgatggagatggagttattatcactagcgatgtacgaaggggaaaaataatttcttcgacttatagcatagtctgcggctagtgagctggagatattcaacccgtcgataatatcatatcctaaccggaaattactgcgtaaacggatggcccggttggtttctttagttcctttgtatgctttcagaacttcctgccatacaacagattcttctccgggtagcaaagatgatagtttataaggttctccgggaatggtttcaatagggaccaaagccccactaaagcgcaagtggtcatcagcactggatgtggctcttttcttttgtgccagtgaggcattgaaacgaatgtcaacgtttagtcgggggacaggaataacgttcatgttagaatttaaatcgattcgtttgaacccggtacctttaaaaacacctgtttcattgtagtatcccagcccgataccgtaagtgattcgttcgctaccgccgtatgtctgtatgttggcattcgtgaccttgcccgtttcaaaatagatgggaaaataattcgtggagtgattatagaatgcgttcagactatcttgatatatactcccgtttccttccggcatactgtttttatccgggaaccaaaaaccatgatacattcctcgagtgttttcgtattgttctgccagactttgaggatatttgtaactgttggttttcttgtccaggtaggctctaaactgattttccgtacttttcaagcgtaacaacctttctgctcttcctgttgtcagggctggatattccgggagaatactccatgtttctgaaaaattcacggaaaaggtggcatcttggttttgtcttccttttttagtagtaacgatgataaccccgttagctgctcttgaaccgtatatggcagctgaagaggcatctttcaatatttgtatggactcgatcatatccgggttcaagtcggaaagtaaattggttcccgtgattggggaagtaaacgtgtttaaaggtactccatcgattacccatagcggatttgagaatctccgtccggcttctacatccaatgagttatatcctcttacagtaatggccacgtcaccaccaccgggagccccggaaagattagtaatgtcgagtccggctacacgaccttgtaaaagattggcgatattggcagaaggaatacccttgaattcttcagcctttaccacggaaacagctccggtagctttccgacgagttgttgttccataagcgacaaccactgtttcatccagcgtttgtacatcttcttccaaaatgattcgcaatgtatctgttctttccgtgaaatttattttctgggttttaaagcccacgaaggaaaattccagtgtccctttggttaatgggagtgaaagagagaaccatcccttgttgttggtagccgtccctagattaatattggttagtttgaccgttactcccggaatgggttctttcttcttgtcgtaaacccagccttttagcgtgacagactttttttcgtccaacgtgttcattttgagttttatgacaatggcattgtttaacacgacatattccaagttcgtgtttttcaagcatttttgaagaattttctccacgtccacttctttttcattcaaatcaatcccttttatttgggcgatgtcttcgttgttgtacatgaaggtgaaccgggtctgctgttttaactcccaaatcacttcttccagtgatgcgttttgttttttgatcgtgacagtttgtgcattcaggctggcaaaagcctgaacgacaaaacacgtgagtagtagaaaggttaatttcatacatctaaaaattttttgcaattttctccctaacggaaaattactcttccatctttttttcatacctttgaaatgttttaattataactaattaatacagaggatcgggaaatgttggagcaggccccgatcctttttttattatcgggcgtggatagttatggtattgtccttgcgggcagccaccactttaccactttcattaataatttccagtagatcgtcaatattcttgtatctgttcagattcgtggagattcggatttccttggtttctgccgtggaatagaatatggtcatgttataccaacgtgcgaggtcgctcatcacgtcttccaagcgttgattccggaacacgaacataccttcaatccatcccgtgtagagttccgtatctactttttgtacggatgtctttccggtctccttgtcatattggaattgttcggatgggtttagttgtacttgtgtttggtcggtgtaagtccaaacggaaccttcgacaagggtggtatgtgcgatgggttcggtggagtaagatttcacgttaaactttgtaccggtgacttttactcgcatttgttctgcgttaacgataaagggccactccgtggctttgtttacttcaaaatatccttcgccatctaggtatacttcccgtttttcatttccgaactccacgggataccgtaaagttgattcacaatttaaccacacttttgtgccgtcagccaatgttacttggtagtcagccccagcggggacacgtaatgtatgatacacggtttctttgtttaccttttccggggcattggtttcggtcgtgtttgttttccttgtctcgctttgataagaaagcagttttaacgtgtcgtttgtgatcaacgtcccgtccacggctttctggtaaatctctttttgcgacaaatcaagaacttctcccgtggaaacgatcagttgagcgcttctttttcccacgtgttcaatttgtgccataggaggaactgattttttctctttcccttgttgtagtaatattcctccggctagggtcatcagcacgcatactcctgctgccatggaataccatactcttcggttgatttttcttttatccggggtaggagtatgaaaatccttttgcatttgctgccataatttttgccattcctgttcgggttccacttgttgaccgtattctttctctaagaatgccattcggtttgtgatcacttcctcgaacatgtgtttattctcttcttcctgcaaccaatttacaaattcctcttccagtaaccgttccggttctcggaggtgttccagtatgaattctattttatccagtttttctttcatttgcatctggcttgatgtttttacactatatacacaggtgaggttgaaaaatgggtgagtggaaaatgaatttttttcaacaaaagaataaagatgtttttccctgttcattttttgtttgcttcgtggcaagtctagattatttttgaaaatgtagtataattgatattaagttagaaataagaaaaaacttagattatggtatgattctgttgtagaattgagctgttgatgatctaataaaaatacaaattgcaatcaaacaaaagacgagaatttgcattcccgcctttaatgttttcacaacggaataatccttattgtgacttgcttcaaatttgtattacaaaactatataaatgatttagattttcaaaatattttgtataaattgcaatacatttaaacaagaaggttatgaaaaaggtgttaggtcttgacctgggaagcagtagtatcggatgggcgtatgttcacgaggctgagaatgaggctgagttgggaagttctaaaattattaaattaggagttagggtgaacccgctaacagtagatgaacaaaggaatttcgaacagggtaagagtattacaaccaatgcttcgcgaacattaaagcgttgtatgcgtagaaatttgcagcgttataagttacggagagagaatttgattgaagtcttgaagaaacatggctttatttcagacgcaagcatactttccgaacagggtaattacacgacttttgaaacttaccgtttacgtgcaaaggctgctgttgctgaaatatcattggaagaacttgctcgtgttttattaatgataaataagaaaaggggatacaagagtagtcggaaaaacagggggggagacgagggaaagtttatcgatggaatatctgttgccaagcaactttatgataggggtattactccggggcaattttctttggagttattaaaagaggggaaaaggcatttgccggattactatcgttctgatttgcaaaatgaattggatcggatttggaatttccaacaatcattttatccggagatattgactcagaattttagagaacagatcagggataaaggccagaagaacacgtcccaaatattcttaagagaataccagatatacacggcagataataaaggcgcagataaattatcaagagcattgcagtggagagttgaaggattatcccgaaaactttctgtcgaggaacttgcttttgtgatgagtgatttaaacggttccattagcggatcgagcgggtatcttggagctatcggggatcgaagtaaagaactttatcttggcaagcagacggtggggcaatacctgatggaaaaattgaatacgaacccgaatggtagtcttaaaagtaaagtcttctatcgtcaggattacttggatgaatttgaacgaatctgggaaacacaagctggttttcataaagaattgactctggaattgaagaaagagattcgggatataattattttttaccagcgttcattaaaaagtcaaaaaggattgatttctttttgcgaactcgaaagtaaacttgtggagattgaggtaaacgggaagatgaggagaaaggttgttggctctagggtatgtcctaaatcttcccccttgtttcaagaatttaagatttggagtatactgaataatatttgcgtgtggagtgtcgataaaagtaaatcttcagaggctcgtaaaatggacgagagggataaagagcctaatttgaaccaagaagagaaagaaattttgtttaaagaattgtctttgaaggaaaaactttccaagcgagacgtgttagaattactttttgaagatgcacggaaactggatatgaattatgaaaaggttgaaggtaatcgtacgcaagctactttattcaaggcttaccaggaaattatcgccagaagtggacatggagagtatgattttacacggatgttatcttctgaaatattagaaatagtgtccggagtgtttgacgggttggggtataatacggatattttatattttaatagcgagggagagttggatcaacaacccttgtatcggttgtggcatttgttatattcgtttgaaggggataaatccaacagtggtaacgagaatttaataaataaaatcacgaacctttatggttttgatcgggaatacgccgtgatacttgcagatgttgtgttccctcctgattatgggaatttgagtgctaaagctattcataagatattgccttacttgaaggatggtaataaatatagcttagcgtgtgaatatgccggttttcgtcattcaaagaattccttgacgaaggaagagagggagaaacgagtgttaaaagaaaggttggatatacttcccaagaatacgttgagaaatccggttgttgaaaagattctgaaccagatggttcatgttgtaaacggtgttataaacaagtatggtaaacccgatgagattcggatcgagttggctagagaactgaaaaaaaacgccaaggaaagggaagaatggacccgtgctataaataagtcaactatagagaatgaaaagttgcgttcggttttgaaaaaagagttcggttttactcaagtaagtaggaatgatattgttcgatataaactttatttggaattagagtctcgtggttttaaaacattatattctaacacgtacattccactggaaaagttgttttttaaagaatttgatattgagcatattataccacagtcaagattgtttgatgattcattttctaataaaacaatcgaattaaggagtgtgaatcaagaaaaagataatcagactgcttatgattatgtttcgggtaaaggaggggaagctgggttgcaagaatacttggaacgtgttgaggatttgtttaaagggggatatattaataaagctaaatataacaagttgagaatgacgggaaaagatattccagatgattttattgatcgggatttgcgtgatactcagtatatagctcgtcgggcgaaagcgatgctagaagaggtggtcgggaacgttgtttctacctcgggggcggtcacggatcgtttgcgtgaagattggcagctcgtggacgtgatgaaagaattgaactggaacaaatacgagcggttggggttaacggaaattgttgaagatcgagacggaagaaaaattcgacgaattaaagggtggacgaaacgtaatgatcatcgtcatcacgcgatggatgccttgacaatagcattcacaaaacctaagtatgtccaatacctgaataatcttaacgctcgtggcgataaatccagtagtgtgtatggaatagagcgagatgaattgagtcgggatagtaagggtaaacttcgctttaattcgccaatgccgttaaaagaatttcgaatggaggctaagctacaccttgaaaatgtcctcgtatcgacaaaggccaaaaataaagttatcactcctaacgtaaataaaagtaagaaaagagggggtatgaatcaaaaggtacaattaacgcctcggggacaacttcatcaagaaacgatatacgggagtattaaacaatacgtgacgaaagaggtgaaagtcgggagtgcgtttaacatggagatgatattaaaagtggctaataaagcatatagagaggctttgttgaaacgactaaatgcctttgatcaagatgccaagaaggcttttacaggtaaaaatagtttggagaagaacccgatttttattaatgattcccatacttgtaaggtgccggagaaagtgaaggtcgtttcttttgaaaccgtgtacacgatacggaaggagataggtcctgatttaaaagttgataaggtgatagataaaagagttagagatattctggaaacacgacttgttgagttcggaggggatagtaaactggcttttactaatttagatgaaaatcctatttggttgaataaagagaaggggatagatattaaacgggttacgattagtggggtgagtaatgtgatcgcattacatgataaattggacaagggtgggaaactggttttagatgaacatgggcagcctcaacctgttgattttgtttgttcaggtaataatcaccacgtagtggtttaccgggatccggagggtaagattcaggatgatgttgtttctttcttcgaggcgacggttcgggcgaaagagggactacctgtcattgatcgagagtataaaaaacaggagggatgggagtttctatttagcatgaaacagaatgagtattttgtatttccgaatgaagaaaccggatttgatcctaaagaggtggatttgatgaatcctgataactatgctttaattagcccgaatttgttcagggtacaaactatgtcaagagtgatgtatggaaaccaagtcgtacgggattacaagttcaggcatcatttggagacaaccgtgaaggattgtaaagaattaaaagatattgcatataaacaatacaaaagtttagactttgccagtcagattgtcaaagttaggatagatcatatcgggcaaattgttcatgttggggaatattgaaatttgttcgtggtagccggggaaaaataagatagaggcgttttctccgatttgtagtttaagggtagcactttaagattttaaagtgctggaatgtaaatgtctcaaaaatcgtatcatgattaaacgaactttgtattttggtaatccagcttatcttagtttaaaaaatgcacaattagttgtcaagttacctgaagttgagaaaaatgattcgttaccggagcattttaaaaaacaatcggaacgtacgattcctgttgaggatattggggttatcgttttggataataagcaaataacaataactcatggccttttagaaagtctgttagagaataattgtgctgtgattacttgtgatcgtaaaagtcttcctgttggtttattattgcctttatatgggaatacgacacaaaatgagaggtttcgaaatcagttggacgtgtctgttccgttgaaaaaacagttgtggcaacaaacgattcaatataaaatacgcaatcaggcagccgtgttagggggaatgcgccaagttgtggtgaaaaatatgcttgtatgggcaaatgaggtaaaaagtggagattcaaataatatagaggctcgtgccgctgcttattattggcgaaatctttttgttgaaattcccgaatttactcgtgatagagagggatgtcctcctaataatttgcttaattatggttatgccatattgagagctgtcgtggctagggcgttggtaacaagtggattgttgccgacgttagggattcatcatcataatagatataatgcctattgtttggcagatgatataatggagccttatcgtccatatgtagatgagttggttgtgaaaattgttgatacaggaattgcttgtaaagaattaactacagagttaaaagctcaattgttgaaaatccctgttatcgatgtcatgattgatggtcaacgtagcccgttaatgatcgctgttgggcaaacaacagcctctctctacaagtgctttacgggagaattgcgaaaaattttatatccagagaaagtttgatggaacgttttagtgaatatcgtattatgtgggtacttgtattttttgatttgccaacagaaacgaaaaaagaaaaaaagatgtctgcggattttcgtaaaagattacttgcagatggatttacgatgtttcaattttcaatttatattcgacattgcgctagtcgtgagaatgcagaagtgcatattaaaagagtaaaaagtattttacctgaaaaagggcatgtggggatattgtgtataacggataaacaatttggtgatattgaaatttactattccaaaaaagaggtgagatcttcgactcctggtcaacaacttgaacttttttagaaataagaaaacccattttatcaatgggtttaatttttaaaacgtgtcatttttttaattctagctattagactaatgatttgattattaaatcnnnnnnnnnnnnnnnnnnnnnnnnnnnnnnnnnnnnnnnnnnnnnnnnnnnnnnnnnnnnnnnnnnnnnnnnnnnnnnnnnnnnnnnnnnnnnnnnnnnnnnnnnnnnnnnnnnnnnnnnnnnnnnnnnnnnnnnnnnnnnnnnnnnnnnnnnnnnnnnnnnnnnnnnnnnnnnnnnnnnnnnnnnnnnnnnnnnnnnnnnnnnnnnnnnnnnnnnnnnnnnnnnnnnnnnnnnnnnnnnnnnnnnnnnnnnnnnnnnnnnnnnnnnnnnnnnnnnnnnnnnnnnnnnnnnnnnnnnnnnnnnnnnnnnnnnnnnnnnnnnnnnnnnnnnnnnnnnnnnnnnnnnnnnnnnnnnnnnnnnnnnnnnnnnnnnnnnnnnnnnnnnnnnnnnnnnnnnnnnnnnnnnnnnnnnnnnnnnnnnnnnnnnnnnnnnnnnnnnnnnnnnnnnnnnnnnnnnnnnnnnnnnnnnnnnnnnnnnnnnnnnnnnnnnnnnnnnnnnnnnnnnnnnnnnnnnnnnnnnnnnnnnnnnnnnnnnnnnnnnnnnnnnnnnnnnnnnnnnnnnnnnnnnnnnnnnnnnnnnnnnnnnnnnnnnnnnnnnnnnnnnnnnnnnnnnnnnnnnnnnnnnnnnnnnnnnnnnnnnnnnnnnnnnnnnnnnnnnnnnnnnnnnnnnnnnnnnnnnnnnnnnnnnnnnnnnnnnnnnnnnnnnnnnnnnnnnnnnnnnnnnnnnnnnnnnnnnnnnnnnnnnnnnnnnnnnnnnnnnnnnnnnnnnnnnnnnnnnnnnnnnnnnnnnnnnnnnnnnnnnnnnnnnnnnnnnnnnnnnnnnnnnnnnnnnnnnnnnnnnnnnnnnnnnnnnnnnnnnnnnnnnnnnnnnnnnnnnnnnnnnnnnnnnnnnnnnnnnnnnnnnnnnnnnnnnnnnnnnnnnnnnnnnnnnnnnnnnnnnnnnnnnnnnnnnnnnnnnnnnnnnnnnnnnnnnnnnnnnnnnnnnnnnnnnnnnnnnnnnnnnnnnnnnnnnnnnnnnnnnnnnnnnnnnnnnnnnnnnnnnnnnnnnnnnnnnnnnnnnnnnnnnnnnnnnnnnnnnnnnnnnnnnnnnnnnnnnnnnnnnnnnnnnnnnnnnnnnnnnnnnnnnnnnnnnnnnnnnnnnnnnnnnnnnnnnnnnnnnnnnnnnnnnnnnnnnnnnnnnnnnnnnnnnnnnnnnnnnnnnnnnnnnnnnnnnnnnnnnnnnnnnnnnnnnnnnnnnnnnnnnnnnnnnnnnnnnnnnnnnnnnnnnnnnnnnnnnnnnnnnnnnnnnnnnnnnnnnnnnnnnnnnnnnnnnnnnnnnnnnnnnnnnnnnnnnnnnnnnnnnnnnnnnnnnnnnnnnnnnnnnnnnnnnnnnnnnnnnnnnnnnnnnnnnnnnnnnnnnnnnnnnnnnnnnnnnnnnnnnnnnnnnnnnnnnnnnnnnnnnnnnnnnnnnnnnnnnnnnnnnnnnnnnnnnnnnnnnnnnnnnnnnnnnnnnnnnnnnnnnnnnnnnnnnnnnnnnnnnnnnnnnnnnnnnnnnnnnnnnnnnnnnncctgttgatgacccaacaaaggtactaatttgaaagcaaatcacaaccgtgcggctcccgcttcgtttgttggtgctcttgttgatgactcaacaaagctacccagtttcactcgtgagtccaattacagaatcgaggatttaggtatggatatccgtaaattatatacaaacccatttgtcttgttgtcgtaaatttgtcaatagaagtttaacagtaaaagatcacaaattatgaataaatttctcttattttcagtattcagtattttaacgtttaatgttatggcacaagaaaagatcgtacagacggctgggcgtaatcaactcggagagtttgctcctaaatttgccgaactcaatgatgatgtcctttttggtgaagtttggagtcgcaccgacaaacttggtctgcgtgaccgtagtttagtaacgattacttcccttattagtcagggaattacggataattcgcttgtttttcatcttcagtcggcgaaaaagaacggaattacccgtacggaaatcgctgaaattatcacccatataggtttttatgccggttggccgaaagcgtgggcggcatttaatttggcaaagggggtgtgggcggaagacacgaccggtaatgatgctaaggcagctttccaacgtgaaatgattttccctattggcgagccgaatacggcatatgcgaagtattttattggtaatagttatctcgcaccggtttctcgtgagcaagttgcgatttccaatgttacttttgaaccgcgttgccgcaataattggcatatccatcgtgcaacgaaaggtggcggacaaatgcttatcggtgttgccggacgtggttggtatcaggaggaaggtaagactcccgtggagattttgcccggtacggtcatccatattccggccaacgtgaaacattggcatggggcagccgctgatagttggttcgctcatttggccttcgaggttcccggagagaaaacctccaacgagtggctcgaaccggttacggatgaagagtacaataaactagaacaggctaaatgatgattattttccctgatcctgctattttttagtacgttctttatatatttggaaaaaatgaacgaagaggtcctaaaaaatacaaatatatgattacagatattcgtttgagaagccagcagttggtgaacccggcttttgatgatcccaaggagcttgtggcatggatgggtgcattgcagggacaggagtatagtatggcgaagtgggctgtgggcttgcggttgaagaaaccggacattcggaaggtggaggcagctttggagaagggggagatattgaggactcacgtgttgcgtccgacttggcatctggtggtggcggaggatattcggtggatgttgaagttgtcagtcaggcgggtgaaactggcgtatgattcgtattggaagaatcacggaatatcggaggaattatatatcaagggccatgatgtgatcgtaagagttttggaagggaatagatatttaactcggcaggagattggtgaggaattgaatcgggcgggagttatcgtgggggatgatttggtgaaatattttttagggagagcggaagttgatggtgttgtttgtaatggagtagataaagggagtaaacggacttacgctttactggatgaacgggttccccctatgaaggagttgcataaggaagaggctttggcgaagttggcaataaaatatttcaggagtcattcccctgctagtttacaggattttatctggtggtcagggttgtctataacagaagcgaagcaggcggttgggttgattgattcagaactgatcacggaaagaatgggggagacggattggttaatccataattcatgtgcaaggaatgtacgggcgaagcaagtggtacatttgttaccttcgtatgacgagtatctcatcagttataaagatcgttcgatggtgttggcaccggagtattacaggaaagcttttaatacctttggtattttctatccggtgattctgtataatgggaaaattgtcgggaattggaataagtctgctaaaaagaaacaattcgggatagaatcttcattctttataccgggcatcgaggtggatgagggagagttggataaggcaaaagaaaggtttagagtgtttagtagcgggaggaatgactgatgccggatcagtcgagatgtcgatacggatgtgtgaacaggagcaacaggagagaagcgggaaattcgtcccgtaaggtttttaggcctgtcgtgatgtgagttttcactgtattcaccgaaatatttaattcttcggcaatttctttatactttttacattcgataaaactgagtttcatcacttgcgagcaacgttcggggaggagttcgatgcgggctaggatgcgttctaataattcttctcgggcgggatcatccgataacgtgtaagtcggatcgtctgcaagatgttgacgcacgtggttgttctgaatctttttatgttccagatagttcaacgcccggttgcgggtgaggttaaacagatagggaaacatggggcgagtgaaatcaatggagtcccagtgataccacaaactaaggaacacgtcatgtacaatgtctttggaggcatccaagtcatttactaaactcatggcatggaaacatagggcacgatagtgttgcttgaataattgttcaaacactaggctacactgtttattatcttgcacacgttccataatccaactttggttgttcgcaaagttaggaaaagtgaaattaaaaacaaaatagccctcgatacgtattcctgtttttttaattaattttggcgttcaaagataagattatggaatggttgactagtttattaacagaacattcagtgattcaagctgtaatagtggtttcgctggtatctgctgtggggttggctttagggaaaatcagtatgtggggcgtgtcgctaggagtaactttcgtgtttttcgtgggcatcgtggcagggcatttcggattgtcgatcgatccgcagatgttgaattacgcggagagtttcgggttgattatcttcgtgtatgccttgggggtacaggtgggacctggttttttctcttccttgggaaaaggtggattgaaattgaacatgttagccatgttggtggttttgttggggatcgtgatgactttgggatttcattggaccacgggggtatctttgccggatatggtgggaattctgagtggtgcagtgacaaatacgcctgcattgggagcggctcagcaaactttgaaacagttgaatgatcccgctattcagcaatcggatttggctttggggtgtgccgtggcttacccgttgggagtggtgggtgtgattcttgccgttattttggtgcgtaaacttttcgcatccagtatatttttcaagaaaagcgatgaagatagtcacaagaagacggtagtcataggttttcttgtgagtaatcccggtgtgttcggtaagaccatccaagagatcgcccggcaatcgtcgaagaagttcgtggtttcccggttgtggagggatgagaaggtgattattccggcatccgatacgatggtgaaagagggggactgtttgctgatgattacgacagaaggagatgtagaggcattgaccatgttgattgggaagcgggatacgagggattggaataaggaagatattgactgggacgctattgatagtcagttggtatcccaccggatcgtgattacccggtcggagattaacgggaagcgattaggggcgttgcgattgagaaatcaatatgggataaatataacccgcatttatcgggcaggtatcgtgttgttgcctacgccggacctgaccttgcagttgggtgatcggttgacggtggtcggggaggaatcggctattgcaaaggtggagaacgtggtggggaatgccgtgaaggatttggacgagcctaatttggtggccgtttttatcgggatggtattgggattgttgttgggatcgattcctttgacgattccgggcattagttttccggtaaagttaggtttggccgggggacctattgtgatggggattctcgtgggggctttcggtccccggattcacatggtgacttacacgacaatcagtgccaacttgatgttacgggcgctggggctttccatgtatttagcttgtttgggattggatgcgggaactcatttcttcgaaaccgtgttccgtccggaaggggcattgtgggttggattgggatttgccattacggtgattccggtgatccttgtagcggctgtgtccattaaatggatgaagattgatttcggttcggtggccgggatgttgtgtgggagtatgtcgaacccgatggcattgaattatgtgaatagcacggtggatagtgacacaccttcggtggcttacgcaacagtttacccgttgacgatgttcgtgagggtcattatggcacaggtgattttaatgctatttttgtaagtaaggaggtcaaatactcgtaattcgtcaatagtatacaatcatttcttgtgaaaacgttaaagtagaatatgttgctggtataggatttgatgcaacttaagtgttgttcatggtaaggttgtaactaaatgttacgatattccgtaaacatatattcaaacaatgtgaaatgtcaggaaaagaaattcatacgaaagagactttccaagttttgggcatgagttgtgctgtttgcgctttgaatgtggaaacaacactcggtgctcaagagggagtttacgaggcaaaggtaaattttgccggttcaaccgttttagtggattataatccgcgggtgattacacccgtggaacttcaaaaggccgtggagtctgccggttacgagctggtggtagaaaacacggaagatacggatcaagcggatcgtttacagcgggaagagtttctcgtgttaaaacgaaagacgatcggggctattgttttggcggtacccgtgttcgtgatcggtatgttttttatgcatatgccttatggtaattggattatgctggcttttaccattccggtgatggcatttttcggacgggacttttttgttcatgcctatatgcagttgaaacacggacgtgcgaatatggacacgttggtggctgtcagtacgggcgtggcgtttttgttcagtctgttcaacacgatttggccggaatactggacgagtcggggattggaggctcacgtgtactatgaggcggcggctgtgatcattgctttgattttgttggggcgtttgctggaggcaaaggctaagttcagtacctcgaccgcgataaagaaattgatggggttacaacccaaaacggtgactaaaattcttgccgacggcagcgaagaggaggtgcttatccgtgaggtagtggtcggagatgtgctggtcgtgaaaccgggagaaaagattccggtggatggagaagtgacggaaggatcttcttttgtcgacgagagcatgattaccggggagtcgatacccgtggagaaggtgaaaggacaacccgtgtatgccggaacgataaacgagaagggaagtttccgcttccgtgccgataaggtggggggagaaaccgtgttggccaatattatccgaatggtgcaggaggcacagggaagtaaagctcccgtgcagaaactggtggaccgtattgccggaatttttgttccggtagtgatggggatcgcggtgatcacgtttatcgtgtggatgctgataggcggagaccttgcttttactcatgctttgctgacgtccatcacggtgctggttattgcctgcccgtgtgcgctgggattggcgacgccgacagcgatcatggtcgggatcggtaaaggggcggaacataatatactgatcaaggatgcggagagtttggaactgatgtaccgggtgaatgcgatcgtgctggataagacgggaacgatcaccgagggaaaacctgtcgtgacggatattcactggactccgggggcggaagacgagcgttaccaatccatccttttggagatcgaacggcgttcggaacatccgctggcagatgccgtggtgcagaagtttaaggagagggtcgtgaatgaaatattagtttcggatttcgaaaatcagaccggtaaaggggtgacggcaaaagtcggggataaggtatatcttgtcggtaaccgggctttgttggaagtgaatcatgttgttttagacgatgataacgagaaacttgccgtccggtgggaaggagacggtaaaacggttgtcttttttgccggagagggccgggtgttggcattggttgccgttgccgataagatcaaggagagttctcgtcaggcggttgcgacgctgcatgaaaaaggaattgatgtttatatgctgaccggggataatgccttgacggctcgtgccgtggcagatcaggtgggcattcgtcattttaaggccgaagtgatgccgggtgagaaggctaatttcgtggaggctttacagcacgaagggaaagtggtggcaatggtgggtgacgggatcaatgattcgcaggcattggctcaggccgacgtgagtattgccatggggaaagggtcggatattgccgtggacgtggcaaaggtgacattgattacttccgatctgaacgtgattccccgtgctatcgtgctttcgcgtcagacggtgcgggcgattcgacaaaatttgttctgggcgtttatttataatataattggtattcctttagcggcaggggtgttgtacgggatcaacggttttttactcaacccgatgattgcggctgccgcgatggctttcagttcggtgtccgtggtgactaatagtttgagaattaaatggaagaaattgtagctattatataaaccaataaaagaa

SEQ ID NO: 2213 - DNA, 24179 bp, synthetic construct
  source 1..24179: mol_type = other DNA
  misc_feature 1..24179: note = Synthetic
atattggggctatattccgttcggcggcagctctcggtgttgatggggtgttgcttacgcgaaattcctgcgatccgcttaatcggcgtgcggtacgtgtttcgatggggtctgtttttctcgtaccctgggcatggattgacggacagatatcctctttgaatcaatacggattccgtactgcggcaatggcgcttagtgacaattccatatctatagatgctcctgaacttgccgcagaaccgcggttggctgttgtgatgggtacggagggtgacggacttcctttggagactatcgcttctgctgattatgtggtgcgaatcccgatgtctcatggtgtcgattcgcttaacgtcgcagcggcttcggcagtagcattttggcaactctgtaaatgatggtttatgtatgcggattttccaaatcatttcccaaccggtaaaataggttgtcccgaaaatatctgctgacttttgatttttgtgaggcatgtgacaaggcgtagtgccggtgtttatatataaaagaaaaggagatttccatttgaaatctccttttctttgggtggagggtggggctcgaacccacgacattcagaaccacaatctgacgctctaaccaactgaactacatccaccgtgttgttttggttgctttcttaaagcgagtgcaaaggtacgtgatttattttaaactaccaaataaatcacgtacttttttgccgtttttattattttgccttatctgaaactttttctgcattgtttgttgcaggagcagccttctcagcgttgtcttgagtcgtaggaacagcctcttgagtcttgctggcaccgaagccgggcagattgttggggttggttgtcgggttctcaatgttctccattaccgacatgttggttgttgcctgtggagcgaaatgtgcgcatgccacgctgataatgaccatggcggcagccagtccccatgttgttttttcaatgaagtcggtggtcttgcggacaccgccaatctgattgtaagaagcgaaattggaagaaagtcctcctccctttgactcttgaatcagcactataccaatcatagcaagtgcagctaaaacgataagagttactaatactgtgtacattgttactttatttttttattgttatttattatcaatttttctaagaaacgtatttggtctgcaaagtaagcatttttttttggataattcaaacttaatcgcctaataatttccaaagcctttgaatatctgccctgttttatgtaaattcgggctaaagtctctgtaaaatagctttcgtctccacctttttcttctttttcttcagagtcttctatctgtggtacaaactgtggcgtatcactgagaacgatttttcccttgtcgttttcaatgaagctgtctatcagattttggcctttcagcaacggaacttttccattgtccgacggtttttcttcactgtcggtttcaagcagatatgccacatagtccactgcggcatcagcaggtgtgggacgtcgttttttcttttcctctttctgttcttcttgtggaatggaatcaaggaaattgtctatcagcgatattgtcctgcttgtattcttttcggctgaattgtttttgggggctgtcggtttgttatgtttatgtgccgctgcaggtaatttatagtgggctgcttctacaagctggaatatgactttccggtcggttatgtatatagcggctttccgcagctcttcgtcgaatgacgggtcgtgcagcagatacagatttttaagcatcagtaaccgtgcggtctggaaatacgggtacagcgctatgacagagcgcagttcgtatagagtgtccctgtcgagtcgttccggatggtttatcagctcggttatttccataaatgtttttaccagttggctactgttgcattgaaaatttgatcggttatttcttttaccatttcagtcacaagttgttcctgtacggagttgagcgactgtgtcgtctcgtatgtcgatgtggccgtgaactgacgttcaaagtcttccgtatgatttttgttgtttgtgaatcgtacgtttaccgtcatcgacaattccgtctgtgccgaatatccctcgcttgatacggccttgttacgttgctcgtagcgtgtaatctcaccctctattttgaggtccccgttgcgtcttacttgtatcaggcgtgtgtggttggcaaatatgtctttcagttggttgttgaaaatacttgccatcggaccccatacatagctggagcgtatggggaagtctgctatttgtatggttttggtagtcgagtagtctatgcttgcaccgttgaacttgtatgaaacagagcacgatatcagtagtactgtcaaaagacaaaacgatatgagacgatagcacaggcatgatttcccatcagtctgtgacttgctgtatgtatcttttttcgtttctttcatatttcgttgttgtctttgactttcgaatctctactccagtccatattgttttattctccggtatagcgtacggtcggatattcccagttcctgtgcagccttcttacggttgccgccgttgcgttccaaagccttttcaagcatctgtcgctcaatgttgctcaggttgagattttccggttccttttccagttcgatatattcttccgcaatggcatcttcggccatgggtttttgctgttgcgggtttatgtatatctgttgtgatgttatggctggtgtgctgttgcctattggtacaggcttgtcgtccttctgtacgatttgtgcggcctgtgtttcttccagtctttttttgagtatccccatatcgcgtcgcaaatcatttacattgccacgtaattcgaacaatattttgtagagaatctctcgttcgttttcaaaactgtgatccccgctgcttttatgtatggtggcaagctgggtgctctcttggtcttgtggaatgaaattgcctaatatttcaggagttatctgtcgtacggtgctcagtatcgaaatctgttccgttatatttttaagttgtctcacgttgccaggccatttatacttcatgagaagttgtttggcctcttccgtcagcaccactttttccattctgtacttctcagccatttgcatggcaaacaggcggaacagcagaacgatgtcttctccgcgatcgcgcaacggaggcatttgtattgggatggagttcaagcggtagtaaaggtcttcgcggaagcgtccttcgctgatggctttgcgtatgtttacgtttgtggctgctacgatacgtacatcggtctttttcacatccgtagctcccaccggtatgtattctcccgtttcgagaacgcgtagcagtcgggcctgtgtcgccaatggcaattcgcctacttcatcgagaaacagtgtacccttgttggccacaccgaaatatccctgactatcgtttatagcgcctgtaaaagagccttttacgtgtccgaacagttcgctgtcaatagtgccttcgggtatggaaccgcagttgattgcaaaatatttctcgcgtcggcgtggtgagttgtcatgaatgacacgcggaatgatttcttttcccacaccgctttctccgacaatgagcacacttaagtctgtcggcgcaacctgcagggccacatcgagtacatgattcagcgcctcgcagttgcccacgatgttgtaccgctgttttatctgttgcagttctgatgtcttcatttagctgacaaaattacacattttattcgatatacagacttttggacagcgattttttgaatacggctttattttccggcttacttatatatatatgtacaaatttaggggctgtctcggatatatcaggtgatgtcaatgtcattattgttttgagccgaactttatcagtagcagtcctatggcagtccatatcagttcgcgcaatcttacgattacggctacgaaaataccggcacttgcagtcatggcaagtcctttggccgacatcaggaaaccgccttccctgcctccgagttgcaggggcagaaagaacagcatattggcaaatagagatgtgaatgccaagataagtatgcactgcagatagttggcgtcgggcattatgacaagcagtataaaatatatttccaaagccgaaaccacacggcatgccagttcgagcaccacggcgcttacgaaagtgcggggattctgattgtgcagggcggcaatctggcggtctatagatgccagttgttccttgtggttttcaaagaatcgttgtgctttgcgcttaattagcgggaaatggctcaatatacccatgcagcgcacggtgatgccctttttatatcccttgatgaaaaaccatatagcagcagtgcagaatgctcccacggaagtcagcataatacccataggcatgttcacctcttgcgtgacgatgtatagtaatatagacaacatccaaaaccaaaagtgcgagaagatgtgggtcatggcatagaggattactgatgaagatgctctttccgtaccaatctttggtgagagtgacattatcctgtacggttcgcctcccattaatcctcccggggtggcatagtttagtgcaaatccgctgatggtgattttgtataaccaccagaatgacaccttgcgttcagatgaaagatccgggcttatcctgtttttcgactgttcttcctgactgtttatgatgatataccatgctgacgtgttgaacatgtaaaggaaaaaccacaatacaatgacggcgacaaaccaataaccggcacgctgcaaccccgcccaaacctgggcgaagtcgagctgcgttaccataatcagcagaacagtgattccgaagataaaaaatccgttctgatattttttcttcattctgctgtctgttgtttattttccggggctgtctgttggtcgttttcagtctgtgtaactgtcggtcggttgcttccctgtgtattttgtttgccgtcgaccgtgggggctatcttgtcgttttcgtttgtttcggtctgtttgcttgctttttcttcacgtgtttgtctgttgccttcgtgtttgaactggtcacgtgctttcggtattgagaatcgggtcttctcgctttcgtcacgtttttcgtgatacaatttcggaagcgggtttgccataggttcgtcatacttcttcctgttgcggtatatgtcgatggctgtatatatagcctgacggaaagaactctcgttggctatgcccttgcctgctatgtcgtatgccgtgccgtggtcgggtgatgtgcgtacgatgggcagtcctgctgtatagtttacaccatcctcggcggcgagcgtcttgaacggagccagtccctgatcgtggtacatcgccattacaccgtcaaatttggtatacattccgctaccgaaaaagccgtcggcaggatatggaccgaaagcctgtatgccggcctcttccaattcggcaattgcgggaacaatctgttcctgttcctccttacccaacagtccgctgtctccggcgtgcgggttgagtgccagtacggcaatacgcggattggatatccgcatgtcgcgtttcagactgttgtggaatattctgactttttccactattgcctccttggttatggcatttgccacatccttgatgggcagatgtgtagttaccaatgctacgcgcaggcttccgttcatcagtatcatcagtgctttgctgccttcaccgacacagtcttctatgtattcagtgtggccgcagaaacggaacatgtcgctatgtatgctgttcttgttgattggtgccgtgacgagtacgtcgtatttatccgaacggaaatcggtcatggcacgatcaagtgctttaagagctgcctctccggcttctggcgaaggttgtcccatatctattttaacttcgtcgtcgaatgttgtcaacaggtttacccgtccgtctctggcttcttctgctgtgtttatgatgctgaaattggactgtagattgagcgcttttctgtgatatgccgcagccttgggcgacccgtatataataggcgtgcagagttcgagcatgcccggttcttcaaatgttttaagaatcacttcatatccgattccgttggtatcaccgtgcgtgatagccacgcgtataagtctatcttccataattgatttaattgctttatttaaatgtatataatacagcttcaagctgtttgataatgttccttttggctgttcccggagcgtatacgaatgcttccgccacggtgatgcgctgttttgtgctgtcaatgaggcaacggcttatgaacgggccacccattatgtcgcctttcattacccattgaccgcgcagttccatagttctccgtccgttgtgttgtgtcgtgcgggctgttggagcgggtgagtgtactgtggtcatgaacatttgagcagtctcgcccggtatgttcttgcgcataacgctgtcacgctttcttgcggcaccctccggtagcgtgacgttgtcgtaagcgtatgtatatatgcagatgttgcgcatggcagactttccattgtccgatagccagatgaagtcatgtccctttttcatggccgtcagctcttccggaatccatatctgcacatctccgaacatcttttttacggccttttccgctttgatgttgcgatgacgtgacagacgggttatgccggcttccagttcgaatctgtcgataatcccttttatatcgtcctgtcggcttcttatgtctgtggtcagttgtcttgctgacggcgaacagatgtttatcactatttgcggtttcgcataaacatccagcctgtggctcatcctcgttttgccagtcatttcagggtcgatattcacattgatgatgctgcgtgcatattttgtggcctgtccgatgccttttgttgtctgtgatatatcgaaagtcggctcccgttgaggcaatcctgccacagtcagcgcgccaagcaacgtgctcaccgcccttaccgcttcttcagtgtttcccgtcaccaccacctcgtaaggttttccgccacttttgggcagcagtgctccgtcatccgtacaggccgtcatcactatcagccagcatagcaacaatgcagcgttgcatatcggttgcagggtcttgtgcatcattatcctgattgttgctgtttgtgtgccgttgacagcaggccacaggccgcaaatatatcctgtccgcgactggcacgtattgttgtaaataccccatggctagtgagataatcgcgcatgatctccatcttgctgtcgtcggtgccgtgcagattgacatcgggtatggtgtggaaccgtatcagattgatacggcattccagtccgctcaccagccggataatctcgcgggcatgggccggcgaatcgttcactccgtcgaacacgatatattcgaacgaggcgcgccgctggtgtgtgaagtcgtactgcttcagaagttccaccacttcttttatcggcatctgcttctcggccggcatcagttgcatgcgctgttcgtgcagtggtgagtgcatgctgattgcaatgtggcattcgctctcgtcgagaaagcgcttgagcttgttctttatgcccacactgctcacggtgatgcgtttcggactccatgcgtatccgtagtcggatgtgagaatctccgtggatttcagaacattgtcaatgttgtccatcggctcgccctgtcccatgaacaccacattggtgaggcgctcgcgctcgggcagagagtatatttggttgagaatgtcgcccgcggtgagattgccctcgaatccctgcttgccagtctgacagaacagacagttcatcttgcaacccacctgcgacgatacgcacaaggtggcacgctctccgtcggggatgaacaccgtttcgacaaacttgcccccggcagtgggaaacagatacttcaccgtgccgtctaccgagcgctggctgtcggccggttccatcgtacccacggtacacacctcgtcaagacgtgcgcggttggctttcgacagattggtcatctcgtcaatactcttcacgtgcttcgtatacagccatttggctatctggcctgccgtaaatttgggcatacccagttctgctgtcaactctttcagttcttcggcagtcatgccgataagcacctttttaccgctttccattgcctgtgtaaattatattgtctgcaaatttacagcaattcgggctaaaaacaaaataaattgcgtataaacagagaaaatgtttaactttgcagtgtcaaaactgaataaacataatgggtatagagaaagcattgcttaacagatcccggcttctgctgggcgacgagactatggaccgtattggtagggcgcgggttattatattcggcgtgggaggcgtgggttcgtggtgcgcagagagccttgtgcgctcgggtgtgtgccggctgacgattgtagacagcgaccgcgtgtgtatcaccaacatcaaccgccagcttatggccactatcgagaccatcggacgggttaaggtggaggcgctcaaggagcatttgctcacggtgaatcccgctgccgagattgatgcgcggcaggaggtattcaccgaggagacggccgccggcttccggcttgacgactacgactatatcattgacgccatcgactcgctcactgacaaggcgctgctcatagagatggcttgccgtacgcgggccaagttcttctcgtctatgggcgcggcgctgaagctcgaccccacccgcatacgtgtggcggagttctggcatgtggagggctgtccgctggcacgtgccttgcgccagcggttcaagcgtttgaagcggagcccggcccgtaagttcaagtgcgtttacagcgacgaactgctcaccaacaagggcactgccggcccatgcggtgccgaggagtgcgtgtgtgccaaggctcacgccgaaatctcgccccttgccgccagcggtcacacccgcaaggctcagaccaacggctcgctgatgcacatcacggccattttcggcctcaccatcgccggccttgtgatacaggatttggcggagcgggtatctcagaaagagcagtagtctttctgcacccgtattttcattaccggtattatcgtgataatcaggagaatcggtggaatgtctttttccgggtgtatatcatttgattattatgagtttgcgttgtatattgtgttggttataatgcgtttcctggcggtcgcatttctgtttggtgaagccgggaactcctatttatttttacaaattactttgtcgctcgtcacaaaatcgccatttgcgcactacggcccgaaaaacgcgatttttgcgctaaaataggacacgctgataatcaactacttacgctcattacattcagatattgccgtgtaagaaaagcagagaggccctcccgaggttgccgcggcggcctcccggctctgcaacgaggccgtcgcgggaagacaacaacgccgtaatgggagagccgggaggcccttatggcaaaacttcgacacccgaaatgcgtgtcaaaaaagcagagaaggccttacggcttttctatttcgacaaaaaagaagtgcgcttttttaagaataaaatgtacattatgatttatccgccatactttcctgttacaacagggtcggaaccccttcgcttaggcaacacagactatgaatatataaaaacaggcaatgactatataaaaaatgcccaccgttaaggacgatgggccaacctgaatgttttcacaacggaataatccttattgtgatttgcttaaaattcactgcaaatatacgaaaaaataattatatacagcgtattttttattatttttcactatatttgcagttgtaatataatctgaaacctaaactatagattacgcattatgaaaagaatattaggacttgacctcggaacgagcagcataggatgggcgcttgttaacgaaagtgaagatgaaagggaacagtcatccatcataaaacttggagtaagagtgaatcctcttactgttgacgaacaacggaattttgaagcaggcaaaccgataaccaccaacgccgaaaggactctgaagagaagtatgaggcgtaatctgcaaagatataagctgagacgtgataatctgatagagatacttacagagcatggatttataactccagaaaccattttggctgagcaaggcaacaaatccacattcgagacatacaggcttagagcaaaggctgttacggaagaaatatcgttggaggagttggcccgtgtactgcttatgataaacaagaagcgtggatataagagcagcagaaagctggataccaatgaagacggtaagattatagacggcatggaggtggcaaagcagctctatgacgaagggcttaccccggggcagtatatgttgaggctgatggatagcggcaaacgttatactccagatttttatcgttcggatttgaaggatgagttcgggcggatatgggattttcagaagacattctatccggaactgctcaccgatgaattgcgtcaagaacttgccggcaagaacgagaagcagacatgggctatatgtgccaaaactttttcgcttgtaggattgaaacgtacagcaaaaggagaagaactgaagcgtgaaaactataaatggcgtgtggacagccttagtgaaaagatggatttggaaagcctgaccgttgttcttcaaaagataaacgggcagataaacgggtcgagcggttatcttggtgaaatgagcgaccgaagcaaggaactgtatttcaaaaagcagaccgtaggccaatatcttatgtcgcgacttgacaagaattcgcactacagtctgaagaacaaggtgttctaccgtcaggattatcttgatgagtttgaaatgatttgggaaaatcaggcccggtatcacagtgaacttaccgacagcttgaaacatgagattcgcgatgtagtgatattctatcagcgttcgttgaaatcgcagaaaggactgataagtttctgtgagtttgaaaacagacagatggaaacggtaaagtacggaaagaaaagactgaaaaccgtgggactgcgtgtgtgtccgaagtcgtcaccgctgtttcaggaattcaagatttggcagattctcaacaacatacaggtatcgggaaaagtggttcgcaaacagtctgtcgatttgtttggtgagactgttgagatggcgaacggcaaacgtttcctttatcaggaagaaaaagaaaagctgtttcgtgaattgaatatcaaggccaagatgtcgaaagccgaagtgctcaaactgcttttcaagaatcacaaggaacttgatttgaactataaggagatagaaggcaacaggacgcaggctgcgctctttgccgcctatcagacgattatcgacatgagcgggcacggcacacacgacttttcaaagatgtgcgcggacgacgttatggatattgtaagcaatgttttcggcgggttggaattcggtacggacatactgtgtttcgactcgtctcttgaaggcaaggcctttgagcggcaaccggcttaccggctttggcacttgctgtattcttttgccggtgacaactcgaagaccggaaacgagaaacttatcagtaagatatcagagctttatggtttcgacagggagtatgcggcgataattgccggtataagttttcagttggattacggtagtctgagcgccaaggctatacgcaagattctgccttacatgaaagaaggcaatgaatacagtgtggcttgcggatatgcaggataccgccattcaaaaaactctttgaccaaagaagaacttgccaacaaattgctttgcaaccgtcttaagccgttgccccgcaacagtctgcgtaatcctgttgtggaaaagattctcaaccaaatgattaatgtggtaaactctgttgccaatgtatatggcaagccagacgagatacgcatagagatggcacgggagttgaagaacagtgcaaaggaacgcgaggaaatgacaaaggccataagcaaggctacggccgaccacgaatattacaggcagattctgaaaaatgaatttggcatagaaaatgtgagccgtaatgatataataaggtataagctgtatatggagttgaaggacaaaggattcaagactctgtattcgaacacgtatatccctcgggaaaaacttttcagcaaagagtttgatatagaacatattattccgcaggcacggctttttgacgattcgttttcaaacaagacaatcgaagtgcggagtgtaaacattgaaaaaggcaatatgacagcatacgactatgtatgtggcaaatatgatgcagataaggtgagcgcctataaagtaagggtggaagaactgttcaaaaacggaactataagcaagaccaagcgcgacaagctgctgatgagtgaggctgatatcccatccggatttatcgagcgtgatttgcgcgattcgcagtatatcgcgcgaaaagcacgtgagatactggagagtttggtaaggactgttgtccccacgaccggcagcatcacttcgcgtctgcgtgaagactggcagcttgtggatgtgatgaaggaattgaactgggacaaatacaaccgtcttggacttacagactttgttgtcgacaaagacgggcggcgtatacgtcgcataaaggactggacaaagcgaaacgaccacaggcatcacgccatggatgcactgaccatagcttttaccaagccaagttatatacaatatctcaacaatatgaatgcccgtagcgacaaaggcagcagtatatatgcaatagagaagaaagaactgtatcgtgacaatggcaaactcaaatttcagccacccatgccgctcgatgtgttcagagcagaggcaaaacgtcatcttgatggaatactggtgtcgataaaggcaaagaacaaggttgtgacacgaaatacgaacgtatcgaaaatcaaaggaggaacgaaaaagaaagtacaactcactcctcgcgggcagttgcataacgaaactgtatatggacggataaaacggtatgtggtgaaagaggagaaagtgaatgcttcgttcgatatgcagaagatagacactgtggccaatatgcgttatcgcatggcgttgagtgacagactgcagcagtatggcggaaatgccaagaaagcattcaccggcagtaacagtttgcagaagaatccgctgtatgtcgatgatatgcacatcatagcagtgccagaacgtgtaaagacagtgggatttgagtatgtatatacaatacggaaagaggttacgcccgatttgaaaatagacaaggttgtagattccaaagtgcgtaacatactgaaagcacggcttgagcaatttggcaacgatgcaaagaaagcattcgttaatcttgacgagaatcccatctggctgaataaggaaaaaggcattgccataaagcgcgttacgataaccggtgtaagcaatgccttggcattgcacgacaaacgtgataatagcggaaagccaatgcttgatgtcaacggtcacaagatgcctgtggattttgtcagtcccagcaacaatcatcatgtggcaatatacatggatgcggatggaaagatgcaagacgacatcgtttctttctatgaagcaaccatgcgcgccaatcagggttatcctgtaatagacagggataagaacagaagtgaggggtggcaattcctgtttacgatgaagcaaaacgagtatttcgtcttcccgaatgaagaaacaggctttgaccctaatgagattgatttgcttgatccgaacaactacccgataatcagtccaaatcttttcagagttcagaagctatcgaaaacagaagggaggatctatatgttcagacaccatcttgaaactacagttgatgacaagaaagaattacaggaagtgacatggaagcgaataaactcgcttgataaactgaaaaatgtggtgaaagtgcgtgtagatcacgtcggtaggattgtgtctgtaggagagtattaaattaaaaacattgcgccatgataaagaaaacactgtatttcggaaatccggcatatctgtcgctcaggcaggggcagatggttatcaaactgccggaagtggagcgtaacgacagtcttccggaacacatgaaacgccggatggaggtgacaaagcctgtggaggatataggagttgtggtattggacaatcgtcagatcaccatcacccaaggtctgatagaggcgctgcttgacaataactgcgccatcatcacttgcgatagtcgcagtatgccggtgggacttatgcttccgttatgttgcaatactgtgcagagtgagcgtttttccgaccagctaaaagcctcacttccgctcagaaaacaactgtggcaacagactatcaaggctaaaataaggaatcaggcggcagtcctttctgcctgtaccggcaatgaggcgaagaacatgttgaggtgggaggatgatgtgaagagcggcgaccctgacaatctcgaagggcgcgcggctgcgtattactggaagaatatctttgccggatttcctgagataaatgatttcacacgtggtcgtgatggttttccgcccaacaatctgctgaactatggttatgccatattgcgtgctgtggtggcccgcgctttggtgtcgagcggaatgttgcccacgatgggcatacatcatcacaacagatacaacgcatattgtctggctgacgatataatggaaccttaccgtccgtacgtagatgaacttgtctttggtttaatagccgaaaatgatggatgtgtgcccgatattacaaaggagataaaagcacggctgctttcggtgccgacgttggaagtggttatcggtggcaggcgcagcccgttgatggtggctgtcactcagaccacggcttcgttatataaatgtttcagtggagagttgcgccgtatatcatatcctgagagataacgtattgatttttatggaccggtttagtgaatatcgcattatgtgggttttggtgtttttcgatttgcctaccgaaacgaagaaggataagaaagaatatgccttgtttcgtaagaatttgcagcgcgatggattcaccatgttccagatgtccatctacgtacggcattgtgcaagcatggaaaatgctgaggttcatataaagcgtgtcaaggcgtttcttccaaagttcgggcatgtggccataatgtgcatcaccgacaagcagtttggaaacatcagcgtgttttatggaacaaaaccgatggcaccaaatgcaccgggacagcaacttgaacttttttgattttttaacttcagaagatggagtttgtagctcattttgtctcgtttttataggatgaaacaaaccgaataagataattgctgtttatattacactaatggaatcctgcattaatgcaagattccgttagcaagacatacattcttttctttttctgatttctaagatatatctttgatatacagaacgttacatcaactgtgatgttagtctcaatgcaaagatacgaattttaaagcaaatcacaacgccgtttcgtcgtccgccgggtcgtcaacggatgttagtctcaatgcaaagatacgaattttaaagcaaatcacaacaaataccaaaggttttatcttttatttttgatgttagtctcaatgcaaagatacgaattttaaagcaaatcacaactgcggttgcttgtgcattttctgcggctgcgatgttagtctcaatgcaaagatacgaattttaaagcaaatcacaacggctttcaacagatgaaagaattgaacaaggatgttagtctcaatgcaaagatacgaattttaaagcaaatcacaacccgttcagctttagtcatgttgtttaaatagatgttagtctcaatgcaaagatacgaattttaaagcaaatcacaactggttgtccgttatccactccgaaaaacgggatgttagtctcaatgcaaagatacgaattttaaagcaaatcacaacaacccctcaaagtttatgcgcacccacgccgatgttagtctcaatgcaaagatacgaattttaaagcaaatcacaacggtcccaaagaagttattttcttggaatttgatgttagtctcaatgcaaagatacgaattttaaagcaaatcacaacaccctcaaaatgtcatttgaaacatcattggatgttagtctcaatgcaaagatacgaattttaaagcaaatcacaacacctgttgtgcgctttcggtgcgtccctccgatgttagtctcaatgcaaagatacgaattttaaagcaaatcacaacaacccccaatattcgggttgccgggttctgatgttagtctcaatgcaaagatacgaattttaaagcaaatcacaacggttccaaagaagttattttcttggaatttgatgttagtctcaatgcaaagatacgaattttaaagcaaatcacaaccgactgcttgtgcattttctgcggctgcttgatgttagtctcaatgcaaagatacgaattttaaagcaaatcacaacggtatcgccaagaacggaaccgaaaaaacggatgttagtctcaatgcaaagatacgaattttaaagcaaatcacaacgggcttcgggttccttgtttccgaacgtgggatgttagtctcaatgcaaagatacgaattttaaagcaaatcacaacgcatggaggtagttcctaccgcacttcttgatgttagtctcaatgcaaagatacgaattttaaagcaaatcacaacgggtagcatgaactttgattcaaagtctggatgttagtctcaatgcaaagatacgaattttaaagcaaatcacaacatgtactcactttgcgtaaatgatgttttggatgttagtctcaatgcaaagatacgaattttaaagcaaatcacaactgccacggttagcggctggtttgtcgggtagatgttagtctcaatgcaaagatacgaattttaaagcaaatcacaacaccccatgcgagatatatctttaacaattagatgttagtctcaatgcaaagatacgaattttaaagcaaatcacaactgaaaagtatgataaggtcttctccgaacggatgttagtctcaatgcaaagatacgaattttaaagcaaatcacaactacttctgtagtactgtaccacttgccgtgatgttagtctcaatgcaaagatacgaattttaaagcaaatcacaactattgacgaggggttcgctattgctgacgagatgttagtctcaatgcaaagatacgaattttaaagcaaatcacaacttccctccttaaattaaaaaatccttgtaagatgttagtctcaatgcaaagatacgaattttaaagcaaatcacaacacatctgatatactcagtctacctcctgttgatgttagtctcaatgcaaagatacgaattttaaagcaaatcacaactagagacaatacagatacccgtacgcgagggatgttagtctcaatgcaaagatacgaattttaaagcaaatcacaactatctttcttactactcattgtaaaaaagcgatgttagtctcaatgcaaagatacgaattttaaagcaaatcacaacttgatgctatctacaaagtcattgattgtgatgttagtctcaatgcaaagatacgaattttaaagcaaatcacaacttgacccgcttgtcataactacttcattgcgatgttagtctcaatgcaaagatacgaattttaaagcaaatcacaactcgctaacaattcttctgcagacaggaatcgatgttagtctcaatgcaaagatacgaattttaaagcaaatcacaacgtaccgttattagtccggagggacaacctggatgttagtctcaatgcaaagatacgaattttaaagcaaatcacaacctcttgagaatctctctaaggctattccaggatgttagtctcaatgcaaagatacgaattttaaagcaaatcacaacagagctttcaccattgagcatgcaggcttcgatgttagtctcaatgcaaagatacgaattttaaagcaaatcacaactgctgattatcttgttaattatatttctagatgttagtctcaatgcaaagatacgaattttaaagcaaatcacaaccaggaacgcgagagccacacacccttattagatgttagtctcaatgcaaagatacgaattttaaagcaaatcacaacttatttgctctgtaggaatgatctacatagcgatgttagtctcaatgcaaagatacgaattttaaagcaaatcacaacagtaatggtatacttatcgccagtccgcaagatgttagtctcaatgcaaagatacgaattttaaagcaaatcacaacctactaatggtggatcttttatcgcatctagatgttagtctcaatgcaaagatacgaattttaaagcaaatcacaacgtacgttgagttctcgggcaacatgaacttgatgttagtctcaatgcaaagatacgaattttaaagcaaatcacaacttgatttgattaattatttgaagaccttgagatgttagtctcaatgcaaagatacgaattttaaagcaaatcacaactatgtttgttacacttacttatgatagatgatgttagtctcaatgcaaagatacgaattttaaagcaaatcacaacctaaggctattccagctggagagtataccgatgttagtctcaatgcaaagatacgaattttaaagcaaatcacaactcattgcgttgcgtttgctctcaagcggttgatgttagtctcaatgcaaagatacgaattttaaagcaaatcacaacaacccggatgaagcttttgactttattcgcgatgttagtctcaatgcaaagatacgaattttaaagcaaatcacaacttggcttggagcccttgtttatcaatgattgatgttagtctcaatgcaaagatacgaattttaaagcaaatcacaacttttcatctagaggcagcttcacgactgccgatgttagtctcaatgcaaagatacgaattttaaagcaaatcacaactagagactctcgcggttgtattcttgtcgggatgttagtctcaatgcaaagatacgaattttaaagcaaatcacaacagaatcatcacgtaaactccatagccggctgatgttagtctcaatgcaaagatacgaattttaaagcaaatcacaacaggaaatacttggaagagacgccgtaagacgatgttagtctcaatgcaaagatacgaattttaaagcaaatcacaactgattgatgtctttttgaaagacttttcgcgatgttagtctcaatgcaaagatacgaattttaaagcaaatcacaaccgcttccggaggctctctcgggggcatttggatgttagtctcaatgcaaagatacgaattttaaagcaaatcacaacaatattgcttttgacaattcttttacagttgatgttagtctcaatgcaaagatacgaattttaaagcaaatcacaacgtacggagccagttaaaacagctgcgcttagatgttagtctcaatgcaaagatacgaattttaaagcaaatcacaacacgctgataattgtatatcacggacaactggatgttagtctcaatgcaaagatacgaattttaaagcaaatcacaacagggagttcacgccgcagcaacgccgcaatgatgttagtctcaatgcaaagatacgaattttaaagcaaatcacaacaacttgcggatagcctattttcacaaggctgatcagccgtgagtctttttacatcatcggcttgacatcgttatttgctttcataagaacaaatcggagtgttttcccgtgcgcatgagtgtaaccattttaaaggtttcctgtttggaatatatcagcaaccaatcaggggatatatgacattctcgataacttttatagtttcctacaaggacatggtcgcgatatttggcttcaagtggttctccagcggtgagtttggtaataacgccaatgagtttcttttcgtcaagtcctcgcttgcgtgcaagtttcaagtcctttagatattggcgtgtaaattcaatcctgtatgccatacccaacggcttttagatattcatctatattgtcacaaacaatggtatctccgttttctgcttcttgaaacgctttgagcgtataggcatttggtgtttcggagcgtttggaaacttttaccgcagctacaccgcgaatcattcggatggctctttttatgtcggccatcatcgttggattttctattgatacaataagttctgtcataatattaattattatttgtgatgcaaagataataaaaggtatatatttatacaaatcttcggcaattttttcggttttttatttggtggttcgggaattttttgtaattatgcaacgcttacggattataattacatttattccgcagaccagcagagcaagcggtctgttgtgatgttagtctcaatgcaaagatacgaattttaaagcaaatcataactcacgcgtgtgtggatgccatcggaggcgcacggctgaaccgttccacgctttttttgctaaatatccttaacgaataaaacaacattccagatatttaattatctttgcaaaaactatttgcggggtgttactattattcgcgccccgcgcggtcttaaggaagttagaagaacttcaccgttacggtgattattcttattttccaaaaccgcaacacaatttttacgctcattgtatcaaatggttttttggacggttgaggccgcccgcctttgcctgcaatatcgcaggactttaacagggtgttggtcgcaccctgttttttatcgtctccgcgaatcacttaaacgtgtcgttgggattacgtgccttatcttatataccgcttatatgcacccgtgcggcctgattgtattatactgtaaggcagaagccttgtgtgtttctgtaatttcattcataagttcaaattctatgagaataaaaaattgtagtgaagaaagcaaggcatttggaaataaagatattcattgccttgaacaatcatggagaagtctcgtatgatgataacggacagtacagaagattgaacttataccgtataggcatccaaataatgtatgacaaagttgtaaaaatagggataaacggttggatttcctctaaagaaaaatcattttcttaatcctgccggtgtataatctcgcgattttattgtacatttgcaaagaataaggatgcggagtgtacatgcgatgtgtatgtacgcagcctgtgtaaaaatagagaaacataacaaacattgcatataaaaatatgagaggaaagatagactgttttctggcgtgtggagatgtgcgtggtgtaagaccgctggtagagacgctgcgcgacagcaggacggtacataatataaacctgataatgacagccgcacatgccggtacagccgttgatgtgcccgagggatgcacggtgatgacggcagacagcgtgatttgcagcgccacgatacgtgagattgccgtgcgggccacggccgagtatgtgatgctgctgacaaagcccgtcaacgtgacattgggcatgtcggcaactgaacgtgtgctgcgcgtggcagacgattccgacgcggcattggtgtacagcgaccactggtctgtagagaatggcgtgcggtgtccgcatccggtgcccgactaccaggagggcagcgtgcgcgacgatttcgatttcggttcgctcctgctcatcaataccgcgctgctgcaccgctatgtggaggacgcgtcggccgactaccgctatgccggactctacgacctgcgtctgtatttgagcagggtggggcggttgttccacatcaacgagtatctgtataccgaggaagagaccgatctgcgtgccagcggtgtgaagcagtttgactatgtgaatccggccaaccgcgacgtgcagatagagatggagcaggccgttactgcgcatctcgaagccatcggggcgctgatagacacgcacaactatgcctgtccagatttcggagagcaggattttgcggtggaggcatcggtgataatacccgttcgcgaccgggtgaagactatactcgatgctgtaaggagcgctttgtcgcagaaagctacgtttgcctacaacgtgattgtggtggacaatcattccaccgacggcaccacagagactatagccacactggccgctaccgacgcacgccttgtacacatcattcccgaacgcaccgaccttggtataggcggatgctggaacatggccgtgaacgacgagctctgcgggcgttttgccgtgcagcttgacagcgatgacctgtatagctcggagtatacactacaaaccatagtcgatgcctttcatgaacaacaggcagctatggtggttggctcatatcgcatgtgcgacttcgacctgaacacgctgccgccgggacttatagcccatcgcgagtggaccgacgagaacggacccaacaacgctctgcgtatcaacggacttggggcgccgcgtgcttttttcacgccgttgttgcgccagattcagttccccaatactagctacggtgaagactatgcgctcggcctgattttttcacgccgttaccgcataggccgcatctacgacgagttgtacctgtgccgccgatgggctggcaacagcgatgccgcactgagcatagacaagattaatgccaacaatacgtataaagaccgtttgcgcacacttgagatttcggcacgccgacggatgttgcagggtaaggcagacattctggccgactcgtctctgcaccgtttcttcaaccttcagttggagcgttgggacgatgcccgtcagcgctaccgcgaattgcagagcgtggagacgcgcgagttgcaaggcgatacattcacgcttgtggcgcagtggaatccggcgcgcatggtgtcaaccggagcgtccgttgaccgtcgcacggtggagacgcgcccctgtttcctctgcgagaagaaccgaccggcggaacagataaagaaggtgctcgacgcacgtttcgaactgcttgtcaatccgttccccatactgcccatgcactttaccatccctgcccgcagccaccgcctgcaacatataagtgactgctacggcgagatgtatcgtctgctctacgattttcctgaccttaccgtgttctacaacggaccgagatgtggagcgtcggcccccgatcatgcccatctacaggccggcacgaccggtgttctgccattgcagcgcggttggcagcggctcagtcgcaatctggtgcccgtgctcacgctcgacgatggcagtggcatctggcacgtgtctgactatccgtgtgcggcgctcgtcatacgtacgaccgatactgtgtgcggcgagaagctgttccgcacgctctacgatgccctgcccgtggccgatggcgacaccgagccgatgatgaatattgtgggatggcgctcggccgacgaatatatcatggtggtgatgctgcgccgcaagcaccgccccgactgctattcggccgatggcgacgcacgctttgtagtgagtcccggtgcgctcgacatggccggacttatcatcacgccgcgtgaggaggatttccgtcggcttacgcccgaggtggctttcggcatattgcgcgaggtgtcgctcaccgacgatgaactggcggctgtggtggcacgaatcaagcccgcttccgcggaatcgtgcccggtgtcgttctcttcagttattggcgaagacatgcctgaggttcaggtaggcattgtgagttgcagccgtattggcttcactctaaatactccgtatatggctaaaggcaagacgatagagggagaacaggtggtggagttctcggagggcggcatactgtggaacg

SEQ ID NO: 2214 - DNA, 24176 bp, synthetic construct
  misc_feature 1..24176: note = Synthetic
  source 1..24176: mol_type = other DNA
tcgaaagttttcgtatccaccacattcaccagtgcaggggcctctctgcgcaatgtttgcgaacggtttgccgtggttacaacctcatcgagcgatattgcatcggcagtcagttcgaagttaagctctaaggttttacccgcaactgtcgttatttcgcgctttgaagtacggtaacccagcagtttcacctcaatggtacacgtaccaatcggcaggtgtttcagaaaataatgccccgtcgcatcggtcgatgtttcaagtgtagtgccgttcaccgccacatatacgtaaggcagatgttcatttgttttggcatccaccacatgcccgaatacattggcatcggtacctgtgtcggtcgtattgtcgtctgccgcccatagggtccccggcaaacacaagaataatgataataaaatgtaaaaagtagatttattcatatataaaaattaagtaaattaattactgcctatgaggcctttcacacatgcaaagttacacactgtggattgttcccgcaatacctaaaagccatgatttggaaaaataagaacgtcaaaagacaattttgacaaacaaaaatggtatttgcaaaaaccatatttctatgtcttacagactattacctttacaacacgctttacaaaccgccattctgtcagttttacaaactacccataagtaggcatgtaaagcaacacagatcatacgaacgcctcccctatctgtattacacatgctgcctacgcccaccggacatatcatctaacccttttggaaccactatctatatcgaataaatatatgcctcaactaaatcggcacacacgtttcatatagataaaggcatcttgcgacatgcccgtatgcatgaatatcgacagaaattcgcgcaacaatgcaataataagaataaataattaaacagacgatcaaatgcacgaaaagacaagaatacccttatatcatcatacaaatgatatttatatcctattagcgaacagcattttacaagaatacaggcaaacgacagtaaaaaaatacaacttgtcaggtattacaataaataccatccgaataatatccggtaacgagagaacatccagtatacgatactctatacaagcccatccagatgtattttcaaatcttgcaattgatctcttacagatatcaacgtttccaaaacctcggaactcttatctacaccctgccgattttcgttaagcatttttcttgcagcagcaagtttaaagccgcgcaccttcaccaaattgtagataagtcttatttgttcaatatctttttcggtatattgacggattttattctggacagatgtcttcggcttgagttgtgggaattccgtttcccaatacctaagcgtgctctcgttaatatcgaactttcgagccacctcgcgtatcgagtaatacaacttcgtatttttatttgcatttaacgccatagacagtagctttttattgatttatttgcaaaaataacgaaaacaaagtatctttgcaacacttttagatgaaatttaaatattaaagcagaaataaagatgatgacagcgaacgaaatccgtgattcgtacaagaagttcttcgaatcgaaaggacacgttatcgtaccatcggcacctatggtgattaaagacgatcccacgctgatgtttacgaacgcaggtatgaatcaatggaaagatattatcctcggaaccaagcagcccgaaccgcgtcggcgcaccgactcacagaagtgtctgcgcgtaagtggaaagcataacgatttggaagaagtaggacacgacacataccatcataccatgttcgagatgcttggcaactggagtttcggcgactatttcaaagaaggggccatcgattacgcttgggaatatcttgtagaagtgctgcatctcgatccaaaagacttgtatgtaacgattttcgagggttctcccgaagaaaatattccgcgcgacgatgaggcagcccgatattgggcaaaacatttgccgaccgatcatatcatagagggaaacaaacacgataacttttgggaaatgggggatacaggcccctgcggtccatgtactgaaatccatgtagattcgcgtactccggaagagaaagcaaaggtgcccggaagagaacttgtgaataaagacaatccgcaggtgatagagatatggaacgtggtttttatgcaattcaaccgcaaggcagacggctctcttgaactgcttcccatgcatgtcatcgataccggaatgggcttcgagcggttggtgcgcatgcttcaaggcaaacattccaattacgacacagatattttccagcccatcattcgggagatatcgcgcctgtcgggcaagaaatatggcgagcacgaagatatcgatgtggccatgcgcgtggtggccgaccatctgcgtgcggtagcgttctccattgccgacggtcagttgccgagcaatgccaaagccggatatgttattcgccgcattctccgccgtgccgtgcgttattcctacacgttcctcgaccagaaagaggcattcatgtataagttattgcccgtgctggttcgtgaaatgggtgccgcctatcctgaactttcggcacagcaagaactaattgcacgggtaatgaaagaggaagaagacagcttcctacgtaccttggagaagggcatcaatctgctgaatgcagccatgaacgaattgaaagcggcagggaaaaactgccttgatggtgcgcaggctttccgtctgttcgatacctatggctttccgctcgaccttaccgaactcatttgtcgtgaaaacggcttcactgtagatgagaaacagttcgataaggagatggagaaacagaaagcgcgtgcgcgtaatgccgccgtcgttgagaacggagattgggttgtgttacgcaaaggagaacagcaattcgtggggtacgactacacagaacacgagtgccacattcttcgctaccgtcaggtgacacagaaaaagaatacgtttttcgaacttgtactcgactatacaccgttctatggcgaaatgggaggacaggtaggcgaccaaggtgtgctggtgaacgggaacgagaaagtggagattatcgataccaaacgagagaataaccaaagcattcatatcgtcaaacaattgcccaaagagccctcggcagacttcatggcatgtgtagacaccgagaaacgtgatgccagtgcggccaaccataccgcaacgcacctgttggattatgccttaaagcaggtgcttggcgatcatgtagagcaaaaaggttcgtatgtttcacccgatacattgcgcttcgatttttcgcatttccaaaaagttacggacgaagaaatacgacaggtagaacggatggtcaacgaaatgatccgtcaggacttccctctcgatgagcaccgagacactccggtggaggaagcaaagaagatgggggcggtggctctcttcggagagaagtatggcgacaaagttcgagtagtgcgttttggcccgtcgtgtgagttctgtggaggcattcatgccaagagcacggggcgcataggtatgttcaaaattatctctgaaagcagtgttgccgccggcatccggcgctttgaagctatgacaggcaagatgtgtgaggaaacttactacgcactggaagatacgttgaaagacatccgtacgctgttcaacaatgctaaagacctgcgaggcgttatcggtaagtatatcgaagagcacgatttgatgaagaaagatatagaaaaattccacgcacagactgtggaacgtactaaagatgaggttatcaagcgtgctacgatagtcaatggaaccacggtggtaaggtctattctgcccattgaaccgtctgctgccaaggatttggtattcaaaattcgcgaggcaatcccgcaaaatctcgtctgtgtcataggctccacggttggtgacaaaccactgttgagcgtcatgctcagcgatgatatggtaaaagaacaccacctgaatgccggacagatgatccgcgaagctgccaaactcatacaaggtggcggtggcggacagccccactatgcgcaggcaggcggtaaaaatatcgacggaattaatgctgctgtcgacaaggtaatagcattggcaaacttgtaaacaaaataatctgtcaaaataaatcggtcgtatctcttcagaaagatacgaccgatttattatttcaatatggtttctatgaacagcaagaagcctttcataaaatcgagttttatctgaaaaataccattaatgttggtatttgacataaattgttatggcaatctccttctcatcaagccttaggaagtgaaagtacatagaaatataatatgagtcatatatgatatcttactgttctcctcccttgggatgaaaggaagaagttgcctacttaacaagcctatttaaccactcaaagagctcgttaagtgcgtagtcgccgctgtgagggcggttccaaggaagtttgaaatttacatctttccccgcattctgcaacttcatcgccaagttgataggcacggaaaaggcggtatctcggtctctcgcaccatgacggatataccaatgttgcgccacggtcgaccggtcgtcgccgataaagttcatagggttcagcagtctcacgttctctttcacgttctctgcgatggcttttcctgttttagaagccgcaaacaccgtaaaattagcattactcccgctggcatctccgaactctccgttctcgccacttgcagcagctccgcccaccatatagctgtcgaatgccggcacccccttcaatgcagtaacgtcagacacataattcaggtacttcgacatatctaaatcggtgatatactctcctacttgtttcttctgtatagccggcatcttattcccttttgtaggcaaactgggcattacaccaccattgagcggaggcatccaaccggcttcattgctgaaacggaagccgatactgtcgggaatatctgcccctgcatccttggcaaattgcgcactctcaataagcaactgtttgatgtatgcgagatagttgtcggccgtaagcggcgtaccgtcgggcttatgcagggtaagactattgacataaacgggaaacaacgcggaaagctccgccgaaatctgctttgcagtgatattggcaagtgcttgtcggcttgacgtgttcccataaagccactcataagccatatcggcatgctctaaatccgtaatcggacagaaacacacactggcaaacacgtcgtctcgaaccggcgccgcacccatttcaacaagatacttttcgtatgccggattgttacccgtggcgcccaacagtgccgacatggcgccgccggcgcttgtgccatcggtaattatcttctcggcatcgcccgagatttctttatcgaaatatcttaaataccttactgctgccttcagatcgagcaatgccttcggtgcacgtcccgtataaacggtcttcttacctcgctttacagtggagttacgcccgcgacttccgggtattacaaccacataaccctcctgcaaggcccgccccgtggcatcgccagcctgcggatatcctgcctctgaagccatataaccgcccacataggtgcgcatgaaaatgggtgaagactgggtggctccctcaggtacgaagatgttgagatactgataggtggagtcttctacttgggtaacaaaatagagtttcgtgtatgcggtgtacttcaactgctgcccttgcggcatggtaagctctccggacagccctttaccggcatcgaacgtcaacttcggtgcaactttctttgctgttacggcacccgatatgcacgttgcagcaacaacaaacataataattcttttcttcatatttccactatatataatttcaccttgcggaacaatgtttacggcatccggatacaatttacatatcagtactgttttagaacttcacagcgcggatgattccaccataacttctgtgaataagacggcaagagcccctattcgtttaatggttaaacccttattttaacatctttttcttatattcagattacatggtaaaaaggtattattatactgtattggggacagaaaataaaataatgggaattcaacgaactatagatatttgtaaatttaaggattaaagataaattgtagtgtcgagttacaaagaaatgtaaacggaaaccgctttgtttacaggatataaaataaacgggaatttgatggattcccgtttatttagtttcgtttccatctctgttatagacctttaatccagtcttttcaaagtttgaaagaccattctttccttttatatagaacttaataagacacaaattcgatgcacttacgttaagttaatattgcaccaccttaatatctgcgaaatggtcattaacccatccatatacataaagcgtacgtcttttccctgtatgattgggagtagccattagttctaattgagtatcaacaaatcttttacattttactgtcaaccattcataagtaacttttaacgagtcagctttgatacccccttgagggccggccccttcaccgttatagttggcaacttctatactgtaacaactgcttgttcctgaacaaattttagttcctccttcccttccaaatgtcactttagaaggataaccgaaattattttcagtatcacatgaagccagcagaagcggaactaataaaaacgcaattaatatatttcttttcataatcataattgttatatcggtttggcatatcttattatacgcacatgatggttatattttgtcttctccttgcccatccaagggtaatcgttatcgtcaggcatcagggaagtcagctacatatatcacattgtctacatcatttgttgcagctgtacgtgtagcaatacaacttcgtcatctgaactttgacaagcatttacccccatcaacattaccatcgcgaacgatagattaaataacgattttgtttgcataataatattttattaaaaagatagaaatatcattcgttgctacaaaaatagaaaaatgttcttataatcttcaaaaatattataaaaaattatacatataaaaacggatattcgcaaatattaacacagcctattggcggaatttattcggtgcatgcttgaccttcccaacgagtttgccattaataaaatggacatattgcagcattgtaaatgcattaacttttttattccgccaacgggtagaaataaaaaaagagaaagaccgaagcctttctctcattacgttttgtcttgaatgcctgtagaaccgcttaataattctgggcttctatctggaagaagctctgcggatggttacaaacggggcatacttctggcgctttcttgcccacaacgatatgtccgcagttgcgacattgccagatacaagagccatcacgggcaaaaacaacggcgtcttcgatgtttttcagcagtttgcgatagcgctcttcgtggtgtttctcgatggcacccacggtacggaatttcacagcaagctccggaaatccctcttccatggcatctttcgccatctgatcgtacatatccgtccactcgtagttctcaccattggcagcttcgagcaggcatccgggtgtagaaggtatatcgccttcgtgcagaaacttgaaccataacttggcatgttctttctcgttatgcgccgtttccataaagatgtcggcaatttgttcatagccttctttctttgctttcgaggcaaagaactgatacttggtgtgagcttgactctcgcctgcaaaggctgtctgaagatttttctccgtcttggttcccttcaacgccttcggatcgaaaaccttgaacttgtctgatttggcatggcataccggacattctgccggagcctccgttccatcgtagatgtacccacatacggtacagataaattttcttttcataatgctttgtataaattaaataaaatctctgatatcctttcttaatccggcagtcggggatattcacatatccctgtccgtgcattcggagcgtcttctgcctaagtgttacaaagataggtattttaagaagaaacgcaaaatatatttgtaattattttcaaaacggtaaggtaataccttttttatatcaatttcggtatattgcaaggatatgtatatggtaccacaccatacgccatctgcaaattgaaatgctatctattactatcaaacgatattcctaccgactttacacagtatgcctatctgcgacagatacgccgtttgcctgcgactgtcatcacaatgctctccgacatttttctccaatattcgccgtatcggaaaaaagttgtatctttacagccgcataacagtttaacaaaattatatgatgaaacgaattattctgatgcttacggccgcactgatcgtggccggagcgaccgcacagagcagtatttacgacataaaagtaaaagatgccgactacaaagaggtaagtttgaaacaatacgagggcaaggtgttgctcattgtgaacacggccaccaagtgcggatttacgccgcaatacaaagaactcgaggctctatacgagaaatatggcgaccgcgggttggtaatcctcgactttccctgcaatcagttcggcaatcaggcacccggaacctacagggaaatccaccaattctgcacggctaatttcgacatacagttcccgcagttccagaaaatcgacgtcaacggccccgaggagtcgcctctatacacgttgctcaaacagaaacagggctttaaagggttcggcaatggcccgaaggcacaaggcatgcaccggatgttgctcggtcaagacaaggattatgcaacgaagagcagcattaaatggaacttcaccaagttcttggtaaaccgtaaaggcaacgtagtgcagcgtttcgagcctacggaaagcatttcggaaatagagaaagccgtcgaaaaactgctctgacaattacaacattacgctcttatggcatatacaatgacgctgtttaaaaactgaacggtgtcattgtgtgtatcttttcgttgtataaatcggccgttacgagcttcccgcgcagacttcttacctgcgggaaaccgaaaaaatagtcatcctgcgtggtgtaccaaccgtagtgtttcagttcggctatactgcgtattcggcggttcagcacatttacatagcgcggatttaccaccgaaagcatgctccttccgtcggtcagagcaatggccagcacgagatatcgcttgggctttcgtgcctgttcggccacctgttttccttgcatccgtgtgcttacgctgatattccacccgtgttttcggttcagcgcctccatcatgccgcgaaacacggtgccgtggggcgatgtatcgcgcaatccggtgtaggcaatcgagtaatgtatcatctcatgaaacagcacattctggtaatcgcgctcgctcatgtcgtagtaattgcttaggtgtatggcgtaatcatagaagcgtttgcgcccgaaagaaagttgtcttttgcacgtcatggagcccagtcgggtgcgtgaacgcgacagagaaaggcgcggcacgggcagtccgccgccgaaatactcgcggttgaactccgcgaaccaccgctccatccactctacggttatctgcataaatatcctgttggttttatatttatcccacaaacagagtttacaaaaaagtccaccgttaaggacgatggacaaacctaatgttttcacaacggaataatccttattgtgatttgctaaaattagtaatacaaaaatacagttttatttgtatatcggcaaaacatttccgaatatttttcatatttttgtaaaataatactaatattataccatcatgaaaaaaatactcggccttgatcttggcaccacaagcattgggtgggctctcgtcaatgaaaaagaaaacaatgaagaactgtcgtctattattcgtttaggtgtaagggtaaaccctctgacggtagatgaaaagtcgaatttcgaaaagggaaaagatattactaccaatgccgaccgcacgaaatgccgcagtgcacggcgaaatctgcaacggtttaaactgcggagagaggctcttgccgactgcctgaaacggcatggactgatgacagatgaaacacctttatgcgaaacaaataacagcataatatttaaaacttatagtaacagggccaaagccgtatgcgagaagatagctttggacgactttgtacgcgtgctgttcatgatcaataagaagcgcggatataagagcagtcgcaaattgaatacggatgacgaaggcacactggtagacggtatggacgtggccaaacttctctataacgaacagataaccccgggagagtatctgctgcgactgttcaagaaagggaaaaagactcgtccggacttctacctatccgacttgaaagccgaattggaacgcatttgggattttcagcgcacattctatccggaaattctatgcaacgcattaaaagaagacctgaaaggtaagagccgcacacagtcgtcggctatcttctatgcaaagtataaggtgtcgacagccaaaatagccggcaaagacaagcgcctgcaggaacttacatggcgcacggatgcactgcgcaaacaacttacgatagacgaagttgcatatgtaatctgcagcatcaatggcgaggtaaacggttcgagtcaacgcctaagcatgatcagcgatcgcagcaaattgttgtatttcaaccatcagacaatcgggcaatatctgatgcagagattagaagaaaacccgaatgccggactcaaaaatatcatattctatcgacaagattacgaagacgaattcaatgatatatggaatagtcaggctacgtaccataaagagctgacaccggaactgaaaaaagaagtaaaagacattatcttttaccaacgcgggctgaagagttgtaaatggcttattaactactgcgagctggaacatgaggaaatcgaggtgaagacacccgaaggaaaactgcgcaaaataaccatcggaagcaaaacatgccccaaatcttcgccgctgtttcaggagttcaagatatggcaggtactgaataatctgcaagtgagtccgctgaatagccgaagaaaagccaaaaggaaaaaagatgaggagccgtcgctattctcggatgaagatatgaacacggcgtgcagatatctgaacgaggaagagaaactgacgctttttaaagagttaagcatcaaaaaagagctcaaaaagaaagacgctttgaaactcttgtttgagaattataaagagttagaccttaattataaagtcatcagcggcaacgttacaatggcaaacctttatagggcgtttcaagatattatcagtttgaccggaaacggagagttcgacttccaagccatgccggcagaagaagcagagaaaaccgtagaagaaattttcggtgggctgggctacaagacggctttcctgcacttcgatgcgagcctgcacgataaagaattcgagaggcaacctgcttatcgtttgtggcatttgctctattcgtatgcgggagaccaatcgaaaaccggcatcgaagcattggtaaagagaattcaagagctgtgcggtttcgaaccggaatatgcccgcatactggccaatatatcgtttatacccgattacggtaacctaagttcgaaagcaatgcgcaaaattcttccttacatgcaggacggatatgaatacagcgaagcgtgtagcaaggcgggatatagacattctgcaagttctctgacaaaagaagaaatcaataagaagaactataagacgcatttagacgaaataaaacgtaacagtttacgtaatccgattgtcgaaaagatattgaaccaaatggtaaatgtcgtaaactctgttatcgacacttatagcaacatagacgaaataagaatagaaatggcgcgcgaactcaaaaagagcaagcccgaaagagaagatatgtcgtttgccatcagcaaagcaacgaaagagacagaacgcataaagggaatactcgaacaagagtttaaaatacaacatgttacgcggaacgatatcattcgttaccgactttacgaagaattaaagcccaacggatataagactttatactctaatacttacattccacgtgaggatttattcagtaaaaagttcgatatcgaacatatcatccccaaggcaagactgttcgacgattcgtattcaaacaaaacactcgaacttcgagacatcaatatcgaaaaaggtaaccagacggcatatgattttgtattgtcgaaatatggagaagaaggcctttataagtatgaacaacgtgtagaagagttcaagaaaaacaatgaacaagcgggtaccaaatgcagaaagttgcttatgcgagaggcggatatcccgtctgactttcttaatagagacttgaacgattcgcaatatatcgccaaaaaggcacatgaactgttgcgggaaatcgttcctacagtaactgctaccaccggctctattaccaatagactgcgcgaagactggaaactggtgaatgttatgaaagaacttaattgggaaaaatatgataaattaggtttgacagaagaatataaagacaaagacgggaatactgtacggcacatcaaagattggacaaaacgaaacgatcatcggcatcatgctatggatgcactcactatagcatttaccaaaccgagctttattcagtatttgaataatctgaatgcgcggagtaacaggggtggttcgatctacggaatagaacaaaaagaactggaaagagagaacaacaagcttgtttttattcctcctatcgatcccaagatattcaggaaacaggcaaaagagcatttaagtaatattcttatttctattaaagcaaaaaataaggtcgttacaaagaatgtaaataagacgaaatctaagagtggtaccaatagaaaagtacagctcactccacgtgggcaattgcatcttgaaactgtatatggcaagataagaacctacaagacagaagagataaaagtcggcacaaaactgacagaagaactcattgcgaaagttgccgacaagaaaatcagggaagcgttgatgcaaagactgtccgaatacggaggcaatataaagaaagcattccaaaatatatcgaaacaccctatatggttgaatggttcgcatacaaaacatgtgcccgagaaagtgaaaatcgtgttctttgaagatgtatttacaatcagaaaagccatcacaccggatattaaaatagataaggttatcgactctaaaatacgccgtattcttcaagaaagattgaatgaattcggcggtgaagcatcgaaagcattctctaatcttgatgaaaatccgatatggttcaacagagataaaggaattgcaattaaaagtgttaagatacgaggcattgcaaaaggaacggcaatcagagtgaaaaaggatattcacggtaagactattatcggaaataatggctatcctgtagcgaatgattatgtgaacaccggtaataaccatcatgttgctatcttccgagataaagatggaaacctgcaagaacatatcgtttcgttctatgaagcaacggcaagagctattcagaacttgccgattgtggatagaaactataattctgaaaaagattggaagtttttattctccatgaaacagaatgaatattttgtattccctaatccaaatacggggttcaatccatctgaaatcagccttaaagacgaaaagaattatgcattgataagcccgaatttgtttagagttcagaaactcagtcattattattatgtctttagacatcatcttgaaacgaatgttgatacaaaccttcagcttaaagatataacgtggaaacgtataactgcagtaaataatctgacaggtgcggttaaagtacgtatcgatcatttgggaagaattgtagatgttggcgaatataaataaatctattgcagtatgataaagaagacattgtatttcggtaaccctgcttatctgtcgttacgagactcgcaattgatcatcaagttcccagaaattgtgaagccggataatattgcggaaacgataaaaaatgagtctgttgtatcaagacctatagaagatatcggtattttggtgctcgacaacaaacagataacggtaacatccggcgcattagaggctttgctggaaaataacagtgcggttattacatgtgattcccgttctatgcctgtaggacttctgctccctttgtacggaaacacgacgcaaaatgaacgatttcgtcaacaacttgaggcttcactgccattgaaaaaacagctttggcaacaaactgtacagtataaaatcaataatcagtctgctatattggcacagtgtacgggacacgttcataagaatatgcgggcttggatcaacgaagtaagaagcggagatcctgacaatatggaagccagagcggcagcatattattggaaggttctgtttgcagacatagaagactttacccgtgatcgcgacggaattcctcccaataattttcttaattacgggtatgccattcttagagcaacaattgcacgctctttagtggcaagcggcttgctgccaaccttaggtattcatcatcataaccgatacaatgcctattgtttggctgacgatatcatggaaccttatcgtccgtatgttgacaaattagtctatgatatctttcatgagacggggaaagaggaattgacaaaagacattaagtcaagattacttacaattcctactctggatgttattattggaagaaaaagaagtccgcttatgattgctgccggtcaaactgcagcttcgcttaataagtgcttcaacggagaacttcgtaagatttcttatcctgaaataacatcataatggatagactgagtgaatatagagttatgtggttacttgttctttttgatttgccgacagatacaaagaaagaccttcgggcttacacgcttttcaggaagaatctaataaaagatggctttactatgtttcagttctccatctacgtacgtcattgtgcaagtatggaaaatgcggaagtgcataaaaaacgagtaaagtcattcctgcctgagtttggaaaagtaggcatagtgtgcctcacagacaagcagtttggcaatattgaattgttctttggtagtaaaccaacacctccaaatgctcccggtcaacaactggaactattctaatacaaaagcgaattccatttaaaatatggaattcgctccctaagaaacatcattttttctttttccaatatcgttataaaacattgaatcacacaatattatgtaactcctgatgtttccgatattgcaaagatagtaattttaaagcaaatcacaactcaattgcccaagcattttgcgtactaattgatgtttccgatattgcaaagatagtaattttaaagcaaatcacaacacatcatcgctgtgcccgaactcctcgatagatgtttccgatattgcaaagatagtaattttaaagcaaatcacaacaaccctcggtgaaattgcagctttcattgggatgtttccgatattgcaaagatagtaattttaaagcaaatcacaactagttctccccttacttctatgtaaccattgatgtttccgatattgcaaagatagtaattttaaagcaaatcacaacagcgtgtggccgtcaccgtggccaataaaagatgtttccgatattgcaaagatagtaattttaaagcaaatcacaacacctcacgcgctattcgctttctccgaagagatgtttccgatattgcaaagatagtaattttaaagcaaatcacaaccgatacacctatatatattgagataccatcgatgtttccgatattgcaaagatagtaattttaaagcaaatcacaactgaaacacaattcgttgatattcaataaaggatgtttccgatattgcaaagatagtaattttaaagcaaatcacaactccattgccttcttcgtattgaagcggcggatgtttccgatattgcaaagatagtaattttaaagcaaatcacaacctgatgttgcgcggataaaaaccgataatgatgtttccgatattgcaaagatagtaattttaaagcaaatcacaacttgcaatcggtaatatatttataagcggtgatgtttccgatattgcaaagatagtaattttaaagcaaatcacaactattagttcttttaccctattcagcagcttgatgtttccgatattgcaaagatagtaattttaaagcaaatcacaacacggctgccgtaatacgcgcggcctgtaaagatgtttccgatattgcaaagatagtaattttaaagcaaatcacaacatatgaccaattaaaaccgccagcactccgatgtttccgatattgcaaagatagtaattttaaagcaaatcacaactataaagcccttgtttataagcattgcgacgatgtttccgatattgcaaagatagtaattttaaagcaaatcacaactgttttgggatttaaatgttggtaatcctgatgtttccaatattgcaaagatagtaattttaaagcaaatcacaacacctttaccatggtctcatgatcgtcatatgatgtttccaatattgcaaagatagtaattttaaagcaaatcacaactaaggctttatcaacgcctggagggcatccgatgtttccaatattgcaaagatagtaattttaaagcaaatcacaactgcatcgatttttcacctttgccggacttcgatgtttccaatattgcaaagatagtaattttaaagcaaatcacaactttcgcgctataatcttactttttaattcgatgtttccaatattgcaaagatagtaattttaaagcaaatcacaactttcgcgctataatcttactttttaattcgatgtttccaatattgcaaagatagtaattttaaagcaaatcacaacaggagataaaaagacgcacacaggataacagatgtttccaatattgcaaagatagtaattttaaagcaaatcacaacataaaacaaacataatcatcaagagatacagatgtttccaatattgcaaagatactaattttaaagcaaatcacaactttatcgtacttggaataattgcgaatatgatgtttccaatattgcaaagatactaattttaaagcaaatcacaacataaacacgtattaaggctaagacaaagatgatgtttccaatattgcaaagatactaattttaaagcaaatcacaacgagtgggacgattggatgaacacgtgggaagatgtttccaatattgcaaagatactaattttaaagcaaatcacaacgttgggcttttaattgaatgagatatgaaagatgtttccaatattgcaaagatactaattttaaagcaaatcacaacgggtaaaatgcgtacaacgaattacacgagtacatatgcaaattgcatggtctttcggagccaaaggggttgttgttcaggcggtggcaatgcatgtagctattatggggctgatgactgttactagtgtaggattggctataatggctgtatcagctattatatcggcattttccgacaaagcggggaatgctactgcagaaatgaaaaaggccgaaaccacaatgaaagactacgccacggccaataacaccgagacggagtccgttaaacaggcaagggctgcgcttgagatcaatatcgctaaattaaaggatttccacggcacaaaacagcaggaaaagaaaatcgtcgaggaaatgaacgacacctacggcgagacgatgggatacttttcaaaggtatctgaatggtatgacgctcttgtcaaaaacagcgaggcatattgtcggcagatgattgcagaggcaaaagctcgtaatttggcaaatcaaatagcacaaaaagaacaagaacagttttactttttaaagatttcattcatttctgagcgatgccacaaggtattccgactgcgtgccgatacggaacttaccgccccaaatgcctatgccgctcgtcacgaaatattgcgtccgccccttttgtaacggcccataagcgtcttcgtatatagcatcttcgatccacgagatgggccacacctgcccatagtgcgtatgcccgctcaactgaaaatctgtaccttgtcgctcggcatcctccaaatgataaggctgatggtcgagcacgatagtgtaacgtgagtggtctacggctgccatgaggtcttttaacgatttacgatgcacgttggtacgatcgtcgcgccccacgatattaatgccgttaaccacaaccacactgtctacaagcagatgaatgccggcatcgtgatagaacttctgtgcctgtgtatttcccgcataatactcgtgattgcccaagcaggcgtaaacaggtgcattgagccgatgaaactcttgcgccacattctcctctatgagcgggcgcatgtagcggtcgataatatcgcccccgatcaatataaggtcggcatgttcggcattaaccatatcaacccaccgcataaactccgccctgcgattgtgatacccgaggtgcagatcgctcatcatcactatcttcatgggtttcggcagcgctttctctgttttcagtacaatgggcatgcgcactttattacgataattaagattgccatacacgaagataatcgtgatgagtacacccacgaaaatgcttccgtgtacgctgttatgcaagaacgaggacggcacaagatgcacaagccgccccaaatcgagcaacagaaacagcatgaccatgtaaaaaaggataaaaagcgacgacgtgcccacctcatatacgaaagtggcaacagatatgtgccaattctcgatattggccaaaaatgagacgaaaagcagtgctaccgacagcagcattgcccccacaatcgttactttataaggtattgtcaacggcaacaagtgccacacatgccacaaaacatacgctaccccgacaagaggcagcagaaaaaacagaatagcccaaattttcataagcgcaaagttacagagaatttattaaataatccttgtttcatactcatttaattcataaaccgttatcggaaagtaccgctatatagtcgaacacttacgcagaactcctccgtcagtcatgcggcaaaagtacaatgaattatccccataccgactaatcattttacagattatatgaatagaattacagtttaagtccgtcagacagtctgtttgacggaaacaggaatgcccaataacaacgatacacataccgaataataccgaggcaccgacaatataatctaattactttttaaggaatcgacaatcgtactactttcaaaagaaacattgccgaaatctatttttacattaaaaactccggaaagtttgactcattcttaaactttgggtatttttgcaaacaagatacgtttgccccgtttagcgtttattaacctaactcttcgtagattgaatgccaaggcagtgctcgataaagccgataatcctgttaccgtgctgaaagaaagcataatcatcaaagaaacaactcccagtttttagaataaagacaaacgctcgaaattactaaaaatacatactgaagaacgaaacgatgcacttgttttgaaaacggatgtgaggtttaacaccccgagcggggcggccgacttctgtttagaaagagcagtaaacgggaagacggaatggcacgataaagacaagcgtctgctatcggtttatctgtaggataaataaataataaaaggtgcatcccttttcggagatgcacctttgacctattctgtctgaacaaagctcttattctgcagtttcaacctctgcagtacggaaatttacaaggtcttcagcacagaggttcttgatatatgcgtaatgacctgtcacctcttcttcggcatgccgcacaaacacgttggcactcttggcaaagagttcgggcgaatgggttgcatcatcgagaataagcagcgacattatgatgtctgccgtcatgttgaacagccggcgggcaacgaagtcttgcttctcctgattaccttcttccttcacttcattaagcacttcctcgtactgttctgcgagttttgccacgcgagtctgcaacggtgtgaggctttctaccacttcattgccaagcatttcgcggatgataccgaggtaagtgccgttggttatgtagcgtatggcggccactacttgcagctgcgtagtaccctcgtagatagagaagatacgcgcatcgcggtaaagacgctggctcttgtactccatgatgaagcctgaaccgccgtgaatggagatggcatcataggctgcctgcgacgcatattcggagttcatacccttggcaagtggcgtaaaagcgtcggcaagacgggtatatttcttgagttcgtcgcgttcttcggcaatgagtttggtatcgcgctgtatatcttcgagcgctttatagatgtctacgtagcgtgcagtctgataaagaagcgaacgaccagcatcaagtttcgccttcatacgcgagagcatatcgtaaacagcggggaagttaatgatcttctgcccgaactgtgcgcgctcttttgcataagccaaagcctcgttgtatgcctcttgttccacgccaacgctctgtgctgcaatgcccagacgggcaccgttcatgagtgccatcacgtatttaataagcccgaggcgggtatttccgcagagttcagccttggcattcttatagacaagctcgcaagtaggcgagccgtggataccgagtttattctctatatgacgcacatctacaccaccgttacgcttatcgtagatgaacatcgacagtccacgcccatcgtgcgtaccctcttccgaacgtgccagcacaagatggatgtcagagtcgccgttggtaataaagcgcttcacaccgttcaggcgccaacaattctctttttcgtcgaacgttgcctttaacataacgcgctgcaagtccgatccggcatcgggttctgtaaggtccatcgacatcgtttcgcctgcacagatacgcggaatatacttctgacgctgttcttcattgccgaattcgtaaagcgtgtcgatgcacgactgcaacgaccagatattctgaaaacccgaatcggcggctgaaatcacctcggaaagcatggagaacgtcgtattaggtaggttcaggccgccataacggcgcggcatcgagataccccacagccctgcctttcgcgttgcgtcgaggttctcaaatgttttcgaggcataaatcatgcggttattctcaaggtgcggcccttccagatctacactctccgagttgggttctactatgttagcagcgatatctcccgcaatatcgaggatgcgcttatagttttcgatggcatcctcatagctcacgggagcatcctcaaacttgtctttgtcagcatagttacgctctttgaggtcgactatgcgtttcatcagcggatgattcaaatgaaattcaatctccggatggtctgtataataatttgacatgatgtttacttgctattctgtttataatatttaatcagcttcggcaccacctcttccactgttccggtgatgatatagtcggcaatttggttgatcggagcatcgggatcgctatttactgagatgataatacccgcatcctgcatgcctgcgatgtgctgaatttgtccggaaataccacaggcaatgtagactttcggatgaactgttatgcctgtctgccctatctgtcggtcatggtctatccaaccggcatccacggcagcacggcttgcgcccacttcaccatgaagttccttcgccaactggaaaagttgatcgaaaccttccttactcccaacgccataaccgccggcaacaacaatggctgcacccttcagattgttctttgcggcctccacatgacgatcgataaccttcactacatagtccacagtaggcacatatttggccacttcgggatagagtacttcgcctttataattctcgtcgatcacctcacgttgcatcacaccgctgcgtacagtagccatctgcggacgatgatcggggtttacaatcgttgcaacaatgttacctccgaatgccggacgaatttgataaagcagattttcatagtgttttcctgctttcttatcgtcatagtcgccaatttcgagctgtgtacagtcggctgtaagaccgctggtaagcgaagaagacacacgcggtccgaggtctcgaccgataaccgtcgcccccatcagggcaatctgcggctgctcttccttgaagagattgaccaaaatatccgtgtgaggagctgatgtataagggaaaagtccctcgccatcaaacacaaacaatttgtctacaccgtagggaagaatttgcttttcaacctttccttttatgccggttcctgccactacggcatgaagttgcactccgagttggttggcgagcttacgtcctttggtgagcaattcctgagatacttcggctacctgtgtgccttcgatctcgcaatatacaaatacgttattcatatttctaatgagcaatgggataacaagtaccccctaccctataatcttttcgtccaacaattcttttaccatactctccacatcagcatcagagctcgtaagcgtcttgctttccttggcttgaaacacgatgttctgcactgttttcacctttgtcggtgaacccgacagtccgcattgtgccggatcgccgtctacatctgccacactccactggttcagcgtaagatacggacgctcttcatagagcgaactataaggctcatcccccttacgttccatcggacatgtggcatacttgtacttcattacgagcttggcattgcaaggacgtgcgggagctgcactgccatttacagtaataaccaccggtaacggagcctcaacagtctccacacctccatcgatatggcgcctaatggtagccacaccgttctctattttgagtatttcttcggcataagttacttggttcaagcccaatttctgagccacctgcggccccacctgtgccgtatcgccgtcgatagcctgtcggccaccgatcaccacatccacgtttccgatcttcttaattgcagtagccaaggcataagaagtagccagtgtgtcggctccggcaaacagacggtcggtgagcagccacccagtatcagccccgcggtacagtccttggcggataatttcaccagcgcgtggaggccccatagtgagtacgccaacggttgagcccgggttttgctcctttaaacgaagagcctgttccaaagcattcaagtcttcaggattgaagattgcgggaagtacagcacgatttacggtaccttctgccgtcatggcatccttacccacatttcttgtgtcaggtacttgcttggcaagtacaacaattttcaaactcatataatactaataaattgtgatagttgcatttatacgatctttcgttccagccggtcgactcatttaaattattattttctatcggccgaagcaccataatccagcgtgcaaaattagtgcttttttacttgtcagccaaagaaatatctctaaaaatgcacaaagcaaggctatatgtgcacagaatagatgttttgtgcaatactttcaattttagcaaataaatatagcgaccaatatttgcaacacaaggtaaacgtaatattccttcctgcgagaggagatgaaacgatatacgagtttaacgatattagacaaactgacatttttatgcaaacatttaattcataaatagggcattcttaaatgcataatacgtatgttcttgttattc

SEQ ID NO: 2215 - DNA, 24176 bp, synthetic construct
  source 1..24176: mol_type = other DNA
  misc_feature 1..24176: note = Synthetic
gaaattatagaggcgattttcaattatttattcgagacacttacgatttagatttcacagaagcgaggtgcgatcctatttttggggaagattttcaaactgctacagatgataccaatcttgatattgacggatggattaactatgctgaagcggggtctaaagtttggatggaaagtgtatatcaaagaaatggttacgctgaattcaatccgtttggatcgggtgatagttcaaatattgtatggttaattactcctgaaatcaacttagaagcacaggacaatgaaatgttaacatttcaaacgcaacatgcctatccagacgaggggcatgatccattagaagtactaatttctactgattttaatggtgaagaaggcggagttgagaacgctacttgggcaccattgccgtttaaggttagttatttagaaaacttctcatcttggtttacatttactgattcgggcgaaatagatttatcagcttattcaggaactgcttacattgctttcaagtatactggaagtgatataaataatgaaaatatgacgttgaatattgaaaatgttaaggtttcagcaaattagaaaagtttgagcgagtgcaatgcataaacccgagcttgaaaggctcgggtttatttaataaaaacttgattaaggttactattctttaactaattgttgcgtgtaaatgctattggtgtttgaaagagaaataaagtaaattcctgcagataagttagaaacgtcaatattttgactgtccgctttcattgaaatgttttgtaacaatttaccattggcatcgtaaatagtcacttctttatacttccataactcattttgtattcgaactgtgataaccttaccttttagtgggttcggagaaaccaaaacgactttattattgcttactaatgtagggattggttcggtatcatttactactctattaactccgcaagttccaatacgtttccagccgtttgatgttctttcgtataatgtgttaaaataaacgactttatcgccagactggtaattttggttggcgttgtattgaggtaccccagcacagatatcaggatcaggatccgttcctcctccttctgcaatggttactgagtaatcttcaacttctccataattaaaagccccgcaaggagaagggattttattgtattgcatactaacacgtatcctagtttttccgagctttgctgttgatggaatactaaaactaccacttacaggagattcagttgaaatggatttgctccataccaattcaccagcatcttcaaaatctgaatcttgattaagatcaatccatactgcataaccttcctgataacttcttcccgtccattttggagtaatagaaatggtgtgagaagtgttttgttttaattcagtgttttgagctgtgaaatcttgatatccattttgggcgctggaattattattaatgttcccaatagtgacattttgaatgtactcgtcgctaacattgtttccattagaactacaatatgaaggaaccgtaacgctacccttgctttttgctacttcaattaagtactcaagtccaagtttggcaaatttggcagcatgggtggcattcgctgtagggaacctggtagaagtatctctaatggtatgaatataagggtttgattcgttaaaagaagcctcgaaaggaaaagctgctgcgtacccttgctgagcccaactataatgatcggagcaaccgtagttacagcgtgtgtaatcataagtaaattgatgacttccagatgcgttgtaatgatccattaaattagccaaaaaagaatttaaagtagtgctattaaagctatcgtcagaaatatacacatctttcggagaccccttgtagttggtcatgtcgaactggacataagaaataacattgacatttctgtttttatagtcttccgcaatctctctagaacctcttaaacctacttcttcagctgcgtacgccataaactcaatagttcttttaggttgaaagttcatttcgaacagtactcgagccacttctgtaatggtagctatcccagaagcattgtcgtcagctccaggtgcgttggtatctcgttcaggactcacagaatcgatatgaccaccaataattacatattcatttggtaattcttgaccttgaatagtcattacaacggagggcatagaggtactttgatgttcaacaattttaacagatacatccgatcgtccatttgatatggtttcccatttttgctttaaatctagcaccgattgtcttgccttttgagtagtgtgatatctggttccataggcttccaattctctaatatgtgcatcgatattggtattgtttaccagagtaatcccttgatttaccaattgatcttcagaaattgaatagctagctgttttttgttgttgttgtctggattgatggttattgatggtgttgatggcttgggcttccgatttttcgaagataaaaccaggcccgtgagtcagtaccatgtgatgcagtttttcggcagctttatcacttagcttaaccgcactatatccatttaaggaggaaatgatattaatatcatttggagccaattttttcagttttgtggcatattctgtttcaatagtaccataaaacatgttgggggtttgagcgaaaacattgctcaaattcaggtataaaaataccgtacaaataagtaaatacttgcttttcattttagaagggtttaaagttaattttattcgtaaaacttaatgataagtttattagcttaaaagtaatgtatcttgtttataatcagaaggtaagttttgttttttatttgggtaaaatgcaaaaagttaaggtagggtaaattgtggtataaggttttagaaatttttccgcatctttatgctaataaaaagtaaggttatgtcttcaagttatagaatatctagagcttttttaaatgcaaaaaaattggatctctctaaagattccaggtatatcttgttttcggattgtcacaggggagataatagtttcgctgatgacttttcacataatagaaaaatttatcattatgctttatcagaatacttaaacaaagactttacctatatagaactaggagacggggatgagttatgggaaaataagttttctgcaatttttgatgcaaataaggacgtttttctcttgttgaaagaatttcatgagctcggacgattacatttcatttgggggaatcatgatatggattatagaaatccaaagaaaatagctgaaaacttgcattactattataatacttctgatgataaagaaaaagaactcatgatagggccttctttttcggaagggattagacttactcaaagtgatggtaagagtatctttttattacatgggcaccaagctgattggttcaattataacttttggaagcttagtaggtttcttgtaaaagtattgtggaagcccttgcaagttctcggtgtaaaagacccaacgagtcctgctcaaaatcataaagggttaattagagtagagcgccgattagaaagatgggttaaagaaaataataatcaaatgattattacaggacatacacataggcctaggtttccttctgaagacgaaccgccacattttaatgacggaagttgtgtccaccctcgctgtattactgggttagaaattgaaaacaatgaaataacattggttaagtggcatgtggtaacaagcgctgttggtgtaatgcaaattaaaagagatgttttagaaggtcccagtagcttgtcttattatatataaacatttaacataacaattatttaaggttaaattaattataacgtaactacaagagggtagatttgtacttctttaaatttgagaactagtcatagtttagtttttgtcgactatcgaatatgacgtactgtatttggccaaagcagttttttaataacattcacttaacacttaattaacgttaggtttggttctttgcgtccgacaaaaactaaatctaatgaataatagaaacgtgcttattgtactaagcatgctcatgacactttttgcctattcgcaaaaaaaaagtgagcctactactacaactacgaaaaaatttggtaaaggaatattgaacattgtcgataaagacagtacttggtccatgaagttttccgcaagaatgcaattcttaacacaagcaaattggagtaccgaatctggtacagagacatcaacatcatttgctgtaagaagagctagattaaaatttaacggttttgctttttcacctaaactaacgtacaaaattgagttaggattatcaaataatgatatcggtggcgctaatgaatttacaaacaacgctccaagagtaatttatgacgcggtaataaaatggaatttccacaagaactttgatttatggatggggcaaacgaaacttccaggaaacagagaacgtgttatttcttcaggagacatgcagttagtagatcgatctttattgaatagacattttaatatagatcgtgatatgggaatgcagttaagacatcattttaatttaacagataaatttttaataagagaaattattgctatttctcaaggtgaaggtcgaaatgttactaccggaaatttaggaggatttcaatatacttcaagaattgaaatgttaccatttggtctgtttactggttcaaagggcgattacaaaggagcagatttagatagggaagagaaaccgaaattggccttaggatttacctacgattttaataataatgcagttaaaactagaagtaatatgggaagctacatgagaaacgatgtagggtttcatgaaacgaatatttcaaccatttttgctgacgctatgttcaagtataaaggattttcttttatgggagaatatgctcaccgagatgcgcagaatgcaatagctaaaaattctgatgggtctattgtatttgatgataaaggagataaagtatcggttttagaaggaagcgctttgaatttacaagggggttatttgtttaagaagaattgggaagtttcaggaaggtatggtaatgtttcttttgaagagttgacaggtaagtctgatataaataactatacattaggactttcaaagtatattgctggacataagttgaaagtccaaactgatataagttatatagatgaaatgtttacagggaacaagtttttatatagacttcaggtagatattcatttttaaaaaatgataacataaaaataacatttgtgatattacgtgttagtaattttgcaacactaaaattataaactacagaatgggagatccatatattttaatgcttgtcgcgctagctgttttagctctagcagatttagtagtgggggtaagtaacgatgctgttaattttttaaattcagctattggctcaaaggcgataccgattaaaacaatcatgattatagccagttttggagtgttcattggggcagttacttcaagcggtatgatggaggttgctcgtaaagggatttttaatcctgatatgttcatgtttgaagaaattatgtacatattcatggcagtaatgattacagatattttattgttagatatctttaattcctttggaatgcctacttcaacaacggtatctattgtatttgaattgttaggggcggcagtagcaatggcgttaataaaaatttcggcaagtgatactcagactatcgctgatatttggtcttatattaatgataaaaaagctatggaaattataaccggaatagttatttcggtcatcgtagcctttacggtaggtgctatcgttcagtacttctcaaggttaatttattcttttgattttgaaaaaagacccgcttacatcaatgctttatttggtgggtttgcaattaccgcaattacatatttcattattatcaaaggattgaaaggaactccattctatggaaatataaaaggattagttgaaggaaactcagtagcaattgttgcgggaagttttgctctttggtcgttaatatcacatggaattgtaaagttttttaaacttaacatcttagtcgttattattgccgtaggaacattttctttggcaatggcatttgctggaaatgacttggtaaactttattggagtgcctattgccgctttaaattcgtatgaagcatggcaagcatcaggtgttgctgccgatcaattttcaatgggagtcttagcaaagaaagtgccttctaatgtttggttattattgcttgcaggagctgttatggtcattacattatggacttctaaaaaagcaaaagccgtaattgaaacaggaattaatttatcaagacaaggtgaagggcaagaaaagtttcagcctaataatctttcaagagttgttgtaagattggcaatgtttactaataaaggaattaatttagttatcccttctaaaactcaagattatataaactcaaagtttgagaaaccaataattaaattaccaaaagataaggtgtatgagttaccagcgtttgacttggtaagagcagcggtaaatttaattatggcaagtattttaatttctatagcaacctctatgaaattgccattatcaactacttatgtaacatttatggtagcaatgggtacttctttagcagatagagcatggggacgtgagagcgccgtgtacagagtagcaggtgtacttaatgtaattggaggttggtttttaactgctattgttgcatttacagctgctggtattgtagcttatttaattagttggcatattgcaatgattcctgtgttattgttattaattataggattggtaacaagaacgagtatcatgtattccagaaaatcaaaagaagaaaagaaacaggtttatgttgaaagagcagagttaatctcaattaatggagtaatcgaggaaagttctgatcatattgcgggagttgcagaaagaataaacaaattgttttcaagtgtggtgaatgatttggcaaatcacgatttaattaaattgcgtaaaacagataagcacgtaacgaaattaaacgatgaaattgatagcctaaaagatggggtattttattttatcaagtctttagatgatacttcagttcaagccagtagattctacattttaattcttgggtatttgcaagatgtagcccagtctattagttatatttctagagcgacatataaacatgttaacaataatcataaaaacctgaaaaaaggtcagctaaaggatttaaaagaaatagatggtacgttatcgtcattacttagtaatattaaagatgtttttgaggaacgtagttttgataaactttctcttatcattgaagaaaaacgaactttattaaaagaagtttctcgttcaattgaaaaacaagttgatagaattagaacggacgagacaagtcctaaaaacacaacattatattttagtatcttattagaaacacaagatttagtatcaggtcttataagtttacttgaaacttatgaagagtttcatataagctctaaaaatttgcaataaaaaatctattttttatttttgaacccttgcaagttgcaagggtttttaattaaaatagcttatgaaaaaaataatacttttagtcttttcaggacttattagtctcactacacattcccaaaaaagtatatcaagtaaattaggagatgtttccaaagaagagttagaaatgatggcctacgagaatgatacaattgctggagcactaattttaaaagagcatggaaactattatttaaataaaaaaaggaactatagaaaaactactgattattattttaaagtaaaaatacttaagaaaaagggggttgatgagtctattgttaagatacggtattatgatgaagagaaaatccatgatataaaaggaattacctacaaccttttagaaagtggcaaggttcaaaagaagcaccttcttgaaaaggatgtctattataaagacttggggaataaatggaaagaagccgtttttacaatgcctgatataaaggaaggaagtgtaatcgaatatgtatattctgtgacttctccatattcagcaattgacgattggaagtttcagtcggatatacccaaattaaaaagtgattttacagcatctattttaggaaattggcaatataatgttaggattctaggattccttaaattgaaacgaaatgatcagaaaatccaacatgattgtatcgatgttccaggattaagcagtggggcttgtgtaaatttgagttacggaatggatactattccagcctttgaagaagaagattatatgctaagcccagataattataaagcaaagttgtcatttgaattggccttgtataaaagcccaagggggagataaaaaggtatacaactacttggaaagatgctggtaaagagttgaaaaataattttttagataagcaagtgaccaaaaaaggatatttcaaaagaaagttaccagagaattgttttactacatcttctgacttagaaaaagcaaagatagcttttggatttatacaaaatcatttcaattggaatgagaagtattggccatcaagaaaggttaatgttaaaaaagcgtttgagcaaggaacaggaaatatatttgatataaacctgtcgttatacaatgccttacaggcattaaaaattgagtcgtatttggtcttgtctaaaactagaaatagagctttacccatcaaggtgcaccctgtaataaatgaattcaattacctttttgttaaaataattttaaatgaaaaagtgtattacctagatgcaacggataagtttttgccctttgggttggttcgatttgaagcggtaaatggtgatggaagagtattagattttgagaaaggtagtttctgggaaccgatagctatgaaaacaaaggtaaccgaaagtattagggtaaaactagatcttttagaagaagaggctatcggaagcatgaaaattgttaaaactggatataaagcgttggatagaagaagagagttggtctcaaaaaataaagaagaaattttagaaagctttgaatcaaaatatccgtatttagaaatagaagattttaatattgataataaaacggattttgaaaaatcgttaaccgagacctatcaattttcattagaaacagaattaaaaaatggtggatacataatatcaccaattttaatttctaagataaaagaaaacccgtttaaactgaacaaacgtgattatccagttgattttggttatccaaagaatttcacctacatattgtctattaaacttcccgagggctatactgtgaaaaaactattagaaaataaggcactgtcattgccaaataatggaggtaggttgctagttaataatcatgtcaaaaatcaagagtatttgcttttctttaaattcagtgttgatagaagtgtgtttaatagtttagagtattttaacttaaaagagttttttaaggaaattataaaggcgcaggcagcaacaatagaaattattagagaataaagataaaaataaaaaaggcgacaatactgccgccttgagtgttttcacaacggaataatccttattgtgaattgattatcaaattgtataacagctaatatacttatttttttgaaaagcttaacatttttggtgtaaacctctcattactatttcactacttttatgcctctgctaaaggacttttaccttgttttatttgcttcaatctaaaataattttgtcttacgttgaggttgagaaaattcatgtgattaaaaactatttcttagaaaaccaacgtaattgttcaacaatgggtagagacttgttttcgcttcctttgtaggagaatgaaaaacatatgaaaaactttaaaaagaaacatgagcaaaaaagtgttgggtataagccttgggactaattccattggctgggctctggtgaaagaatgcgaaagagattcttcagaaattataaaattgggggtacgtgttaaccctctgactgttgatgagaaaataaacttcgaaaaaggcaagccgcaaaaaaccaatgcggacagaatacaaaaacgcagctcaagaagaaatttacaacgttttgcattgcgaaggaaagcgctcatagatattttgttaaagaacaaaattatttcaaaagaaaccgttctcactgaacatggtaaaagtacaactcatcaaactttggcattgcgagcgaaggcagcaagaaaaaaaatttctttagaagaattggctcgtgtattattaaatataaataaaaaaagaggatataaaagtagtaggaaaataaaaaaggaagaagaaggaaacgcaattgatactataaatgtggcaaaagaacttcaagaaatgaaactaactcctggtgagtatagtttacaattattgaacgcaggaaaaaaaatgattcctgatttttaccgctcggatttgtttcaagagtttaattcgatatgggaatttcaaaaacaatttcattctgaactcttaaaagatgatttatatgctgatttacagggcaagagtaaaaatcaaacttggactatttgtcaaaagccttttgatattaaaggattaaaaattaaagtaagaggtgttgagcttaaaaagaaattatataaacttcgagtaagagctttatcaagaaagctaaatttagaacaacttgctatagttttccaagaaattaatggtgacattgttaaatctagtagatatctaggagccatttctgacagaagtaagagactttattttaataatcaaacggtaggtgaaaacctctatcaacaaataaaaaataatagacatacttctataaaaaatcaagttttttatagaagtgattatttagatgaattcgaacaaatctggagaactcaatcagcttttcatcccgaattaacaaataatttaaaggaagtattacgagatgttatcatattttatcagcgaagactcaagtctcaaaaaggattattgagtttttgtccatttgaaagtcgtgagcaaaattatgttaacaaagttttggggaagataaaaaagaggattattgggagaaaagtgatcgcgaaatcatcaccactttttcaagaattcaaaatatggcaaaacataaataaccttgagttcgaaaatattgaatcaaaagaaaaactaatttgtaaagaattagataaagaggtgagaaatcatctttttcaaacgttgaatataagaggagatttaaaaccatatgccttattaaaaatagttggcaaatattttcaaatggggaagctcggaaattggaaatgtaactacgatattattgaagggaatactacgaatcaagcactttttgctgtataccgaaatattcttgaaaacgaaggatatttatgtgaatgggagaagaaaagtgtttttgaaattaaagaagaggctactactgttttcagagctttaggaattgtgacagacattcttgattttaatgctaattatgaaggaagtgaatttgataagcaatcggggtatcatctttggcatttattatatgcaacagaagaagattctaatataagtgttgaggatacagaggtttacggaaacacttcggttggtttaaaaaagaaacttattcaaaagtttgggtttgctattgagcaggcaaaaatgatagcaaacatttcatttcctttagaatatggcaatttatccagtaaagctatcagaaaaattattccttacttacaagatggatatggttattctaaagcttgtgttttagctggatatcataattctgacaattcaccaaccgaaaagaaggaggatagagtattggtcgacaaattagagccattgcctaaaaacgaattacgaaatcctgtagttaataagatattgaatcagatgattaatttggtaaatcagataatcattgaatacggaaaacctaatgagttacgtatagagctttccagagaattaaaaaagaatgctaaagaaagagcattattagttaaaaatattacagaggccaccaaaaggaatcaaaaaattaaaagtatcataagacgagattttggaataccagatccaacaagaggagatgttatacgttttaaattgtatcaggaattagagccaaacggctatagagaggtttttactaacagaaaaatcgattatgaagatttgtttacttcaaaaattaatattgaacatataatacctaagtcggcgttatttgatgattcttattcgaacaaaacaataacatatcgtgaattaaatttcaaaaaagcaaataggactgcttttgattttgtctcgcatgattataagagtaagttagatacctatgaaaagagagttgataatttatacgattcaaaaggagtatcaggaatttcaaaggcaaaacgcaataaattattattaagccaacataatttacctgagaactttattgaaaaggatgtacgcacgagtcaatatataacaaagaaagctataaatattcttgaggcagctattgaaaatgtagtgccaacaggaagtagaataacggataaacttaagagagattgggatttagttaatgttataaaagatcttaacatttctaaatatcgagatttagaattaacgagttttgaggagagattagataaagggaaggaagaattaattaaagtggaagttattaaggactggaatcgaagaaacgatcatcgtcatttagctttagatgccctaacggtagcgtttacaactgaaaatcatattcattatataaatagtttaaaccttcgtttgaactcagaaggtaaagagtcggatatgttcagggaaatagaggaagaacttaaagggaaaagtttatttataccgccactaccaaattttagaagtacaactaaaaaatgtattgaagatgtattagtgtcttttaagaataaaaataaggtcgttacaaaaaatataaatgaagtaaaaacaggaagcggtgtactaaaaaaacaacaacttactccaagaggacaattgcataaagaaacggtatacggatatgtaaagaaagttgaacaaagccctacaaaaatttcaaaaaactttaaagttgaacaaacagagttaataatcaatgaagaacaaaaagaagcagttcattgtcatttgtcaaagtataaaaacaatccgtcaattgcgtttgcggctaaaacactcaggtcaacacctattctttataaaaagaaacctttaaaagaagtttattgttacgaacatttatataccattaggaaggagataactccggagaacttcagaaatcaaaaatgtattaacaaagtagtagatttaaaaatacgtgcgttgttactggagcgattggaagcctataaaaataatgcaaaagaagctttttcaaatcttgaagaatatccaatttggttagatcaagaaaggggcataagtattaaaagagttacaataactggtgttaccaatgcggaacctttacattgcaaaaaagatcatttaggaagagctattttgaatgaagatggaaatcaaattcctgctgatttcatcagtactgggaataatcatcatattgctatatatgccgataaagaaggaaatttggaagagaaggtaatttctttttatgaagcagttcatagagctaataaaggtctatcagtggtagataaaaagttcaatcagaaccttgggtggaaatttttattttcattgaaacaaaatgaaatgttcgttttttcggatgaaaattttaatccgaaggaaatagatttactcgatgaggaaaacgctaaaacaatagggaaatatctttatagagttcaaaaaataagaacaaaagactatttttttagacatcatatagaagcaacagttgatgataatccaaaaacaaaaggaattacttggaaaagagtgggactacttgggctaaaaaatgttgttaaggtgcgtatgaatcatagcggtaaaattgttcaaataggtgagtacaattaaaaaatatgagttttgagtgttgagtgttgagtgttgagtgttgaattttgagggtttagtgtttagtgttgagtgttgagttttgagttttgaattttgagttttgaattttgaattgttagctttttgctttcgactttggacttttgagtttcttatgccgcgcattacaattccatctcttggtttagacagtttcttaatttcataaaaaaaacctcacagtctttgaaagatgatgaggttcttaatcgcagggcgatagccaagggtttaattccccgaggcttgcctcgaaatataaaattatgaattcaacagataccccgtatgcttgcatcggggtagttcattcgtggggcgacagctcattatttctttagttttgaactatatggagagtccttttatttgtttgtattcgttagagctttgtccgtattgggcttttacaaagttcttaatgctttgtatttgcttactcaggtcttcaaagtatgttcttcgttgttctataattggttttaaggttgcgagtgctaaatcaacggcttctgtacttgcttctgcttcttcggctaaagcaagtagagatggtaatgttaactcggtatttgctggaatataacttggtcctagtgtggtgagtatatcaataatgtttctaaaattagctactctacttgcataggttctttcaacttgactgatggttttttcttcgttttcttcatccgttgtacttactttttttgaggcttgtccacgaattttctttattaaagagcttacttgtgatagttctgtgctgtcttttccttttaaggcttccacaaaggctctgattggtgccaattgcttatcaattgagtttgcattttctgtgaatacctttcttcgttcgtcggttttaacagtgtaatctgctttggcattgttgtaatcggtttgcaaaacttcaatttgtgtaatggtttcgtttaagtttcctaccgaggcttcagtaattggtggttgataggtggcaaagttgcttacaatggtttttaactttttagcattccctaatcggcttgaaaatgatttttgtgatgttgatgacataacaatttggttttataattaaacaatttttttaggtactcagaagttcttttttaagttttgagtgttaagttttaaattttgagttttgattgtccgttattgtttagaaccatgatatttctgtcattttgattttattctggaatcccattacactataaaacaagtgtttataatatgagactaaaataagttcagattgacagatagagttattatgaattacggattatcgtttagcaatttaataccaaataaacgtcaaaatgctacataaatacttgttcattttctctttttctacattgcaaaacaattccatagctattgctatgtaaaggttttacagctttgaaaaagaaaaaagcaaggtcgcattttttgtgtcattttaaaattaatttggtataacttctttctcaattctttgaatagcttcttttataccaattgagaataaatatataaaatatttggctagtaatcaaatgattaggttgtgaaaaatagtttttaacgcgtttttaacttttatatactcttgttaatcaatcctttgatcgtgttatggtattctgttgttatgtataacgttgcttatgtcttgttaagctttccttagaccttgttatgagattctcctgccttgtgaagcttttctgattacttgttaaaccatcctaaatgcttgttatactttcctgttgctttgttatttgatttttattgaattgtatgtgttgagttttgaattatgagttgctattagcttttcatttagggacttctcgatacaaaattatttgtaatgcaatggaaaataatttcactcgaagtgacatagacaatgcgtgttttatgacggtttcgagggagtggtaattatgaattttgaattataaattgatacttatcttcttttgtcttgatacaaaatgaagcaaaaaatcaagtctaacctaggaaattgctgcgcatcgttctctttcgaaatttcatgcgttatgctgcgcatcgcaattccatttcttcgttctctatttcttggtttcgacagttttttaagtagttaaatgtcgaatgttaaattgtgagttttaaattttaagggttgagtgtttagttttgcctctcttgattgttcgctacctgtcagttcgagtaatttttatagagtggcaacgaaataaaaattgtatcgagaactatttttgttgaatgcagggacttctcgatacaaaattattttccattgcattacaaataatttcactcgaagtgacatagataaaggatgtttacggttttttcaaaggaatgttaatgactgaaatccattgtttattctaaacatgaacttagctaggtaaaagattactgctcctcttcttttgtcttgatacaaaatgaagcaaaaaatcaagtctaacctaggaaattgctgcgcatcgttctctttcgaaatttcatgcgttatgctgcgcatcgcaattccatttcttcgttctctatttcttggtttcgacagttttttaagtagttaaatgtcgaatgttaaattgtgagttttaaattttaagggttgagtgtttagttttgcctctcttgattgttcgctacctgtcagttcgagtaatttttataaagtgtaaacgaaataaaaattgtatcgagaacaatttttggtgaatgtagagacttctcgatacaaaattattttccattgtattgcaaataattttactcgaagtgacatagataatgagtgttttatgacggtttcgaaggagtggtaatttttaattttgaattgtgagttttgaatgttgaaggttaaattttgagttttaaatttttagtgttgaattgtttgcttttgactttaaacttttggctttcgactttgggcttttagctaagggatgaaccctcttggtattttatataatggcttgctttactaaaaacattatgtattcaaggtctttggtgtctttcactactatttcgtaatcgccatttccccaatgtccgatattggaaacatcacgggtaatgttacgggtatcgtttaaagtgccttttgagaggtttataaagagttttaaacctgatttcatggtaacgatatccactatgttttttcctttcttaaatgcgatgtattgcttttttggaatagtttctatggaatcggataggtttaaaattgcctgtttgtacgcttcgtaaagttctttggttgcttcagtatatctttctaagtgaaattcttctgtatatacttttatttctctacttattttttgaagttcttggtttttctctgttaggggttttatactggttgccgaagctgtttttttaattgggttgatgcctattatgttgccttcgtatctttttacttcgtataattcaatggcaatgtctttgaaattggttgcttgcttttgattttcagtaaagtgaggtgatacaaaaaccacacgtgtttgagaccaatctaccgatttactatgtagggttttacctaaggtttcgttgtaggttaaaataaaatccgctttgttttctaacatcaaacttaaataggtaaacccttgatcgaccacgctatagtttttctcttttttgtattcgataatgataaatgccttgctttgttcatcaaaagccagagtatcaatacgtttgttttttattgtaaactccgactttaccatcgttacttcaagtaactgttccatattttcttcaaaaaaggtttgtatttctttttcaagtttaaatggctgctccttgagtgtttttagtgaagtggagttttggtatagtttcatttgttttataaagcctgtttattcttcgtttaaggtttccataatttctttaaaacctgccaagccggcttctatattttcaataatttcacctgctaatatatcagggtcgggtaaattatctaaatcggttaaacttttgtcttttatccaaaaaatatctaagcttgttttatctctctcaataatatcctcgtaggtatattttcgccaacgcccttcttgattttcttcgctccaagtttcttttcgcttataaatattttcagggttatagcacgcaacaaaatcagccaaattggcttcggtcattggttttttctttagggtatgatgtatgttggtacggtaatcataaaaccaaatatgttttgtttgatgttctttgctaccaggtttgttgttaaaaaacaatacattcgcttttaccccgtgggcataaaaaatacctgtaggaagtcttaaaactgtatgtaactcggtagttttaagtagttgttttcttattacttcacctgcaccaccttcaaacaacacattatcgggtaacactactgctgcttctcctgtggcttttaactgggtttttatgtgttgtaaaaaatttagttgcttgttagaggtggtttcccaaaaatcctgacggttataacttaaatcttccttttcagtatcgccgtcttcgttggtaatggtcatgctactttttttaccaaatggcggatttgcaagtatatagtcaaaacgttttccgtcatcggtaattaacgagtcgttcgggctaatggtagattcgccatctatttcaccaatattgtgcaaatacatattcattaaacacatgcggcgggtattggctactatttcattaccataaaaagtttggttttttaaaaaggctttttgctcacggtttaaatcgtgcttttctacaatataatcataggctgccaaaaagaaacctcctgtaccacatgatgggtctgcaatggttttttctggcttgggttgtacgcaggctaccatggttttaattaaggctcttggggtaaaatattgcccagcaccacttttggtatcttccgcatttttttgcagtaagccttcatatatttttccttttatatcagcccccattaaattccaatcttcacggtttatcatgtcaataactctggaaagcttggcagggtcttgtattttattttgacttttggtaaatatttgccccaaaattcctttttcactagccaaggtacgtagtagctgactgtaaaaagattctaattcggcaccgcgtttgtcggcaagattttcccagttacaaacctcagcatctttaatttcgttgccatctacatcttttagcttcggaaaatgcaagcctttgttgtagggaggcttgtttaattcgtctgccatttttaaaaatagcaggtaggtaatttgttctaaatagtcgccatagcttacaccatcatcacgtaatacgccagctaggttccaaatttttgatatgattgttgcgtctgtcattttttattgtctaatttgttttagtttttctataagggcttctattttttcatttgggtttacagaattcttaatttctaatacatcactaattattgaatcgttttcgtacatagaaattctttctctttgttctgccagtccaaccctgtctaacttacatttatctattgtaaattcacctttatctgttaaagcatggtaagaactatttgcaagaaattcaagatggtcaaaataattatcatagtgaccatgtattatattgaacgttgtgccattaattgggtaagtattctctggagggcaaacgctcattacttcttttttacttttgctaaaattacatttatgacaagatacaaccaagttaagtgtctcgaaaataaaatcaagtctcctgtttttatcaattatatgctctacctctacattatctgttccttcattaatagggagtcgacagtaactacaagttttattttgaatgctaaaataatgtgctcttattcggtctcggatcggtttatactcttttttactccaatctttagccaccttaacaggatgttcttgtaatatatcaagatcttcttgcgataaagcatacttttcatttattatccaagcttctctttcaattaataatctagtcatttgtaaactctttttcaatatttttaataagagattttaacggatcattatcttttaaggttgtcttcagataacttaacttctcaacttcatttgaaatttgttccttatctatatctttttttgaaatttccttcaatagatttccaatttcctcggctacatagaagtttcttgttgagctaacctcaaatatattatacaatacatcttcggccgaccatccataagtatttgtatttatatcaattgtttgaatttgattttcttctttttttaaaccaataattttggcagactctccctgtaaatcagaaataagaaaatgtgaatgtgtcgcaattatgatatgacaggtattatatttttcttccgaaaataattgtcggatgaactctaaatatctcatttgccaatttggatgcaaactaatttcaggctcatcaataaatattaaactgttaggtttaactgtggtcattaagcctaccatggtagaaaagaagtgaaattctccagaacttgtttcctgtactcctaattcttgttcttcttttattaatttaatatccggtgcgcttacaaaacccaattttcgtagttcgtctattaaagcatattcttcttttaaaaaggaatgatctttattatcatcaatacgatattgaatatagcgagaagaagaacctttcactgcttttgaaagcctttctttagtatagagataattcataaaatcaacaattttttcaatctgacccgattgttttttaattgatttataatgatttagtttaaaagggggctgggtgcctaaacttttataccgttcatctatttccctaaaaaaagaatctaatagatcaacagtagtaattcctttaaaaaacttaggagtatatgcggttttatattgcactaaaatacctccatcgtaacctaaaaacttcgacaaattatcaattccttctttgaatacatccgaattaatttgttcaacaataaactcaacggttcttcgaacatagcctctcgtacttgcctgttgaggtctgtttctaactcctaagtatttataaataggaaaggcttccttttccttgtcgtttctaggaacaatatacttatctgtaagcattaatgaaattgcaataatacttgagggtagcgaaacaattgaattattcgtttcaagtttattatatttttcctctttatcattccataaagataaccaaggtttagggtatcgttcatacggctttttcgtcgttgatgtaacaaaattatatttatcacgtaggtttccaaatctaattaaattccctttacagtagtactcaatttgaaaaaaatattgaacatcaaatcctcgatcgttcatttgatagactcctctgaacaattctaataaacaacgaaacaattcgcttttacctgtaccatttggacctattaacacactgaaataaatggactcagatgtgtcattttcatctaaaaaattaaaagtattgtttcctaaaaccggatgccctttaattacaagagatttcaatttgaatccgttatgtatcacacttttgctttccattaaattttgttatttttttgaaacttcaaaattaattggggttacatcaaattttgagaggtctgtcccttgaatgatataatagtttgctgattttcgatgatagttataattataaagacgataaatgcggtaattagatttatttacttcgcaaaaggccttttcattggctgaaatgtaaaagggttcatctttgcttcctttggttgttttaacctcaatgtatagctcgtttttgttttcatcaaagcttaaaatatcatagccttcaccatctagttttttttcaactttttccatttcttcataaaagccaagtttttccaacttttctttttctgcgcttattacaagttcttcacccaataatcctaatttacttgatgttaattgttttttgctccaatcaattttttttcctttgaaacttcccttttctttaacataagatttggttttttcgggtatatcactttctgttaaagtagcgatttgctctggaacgatgcctgttttagttaacaactccaatttgtcgtatagcgaggcatatttgtatatataattttgtgtgcgctgaattaaaccctcccaactataattttcaatatcatcaaacttaatttccatgccgtaatagtcggcttcctttaaatagttgtcaaacaaatcaatagtttcttcagaaagcgcttttgtttttccgcctgaatgatttgagcgttggcaattcaaatctaaatagagatttccatgtctgttaatacctaatacaaaatatactttttcactatcgccttctctataaatccgtatccataaataggttttaaaagtaccagaccattgccagtgattgtctggtttggcataaaaattttcaattacagtattttctgctaagaaatttagcttttttacattgggagcaattagctgactatatcgaacatctttatcatttgcctttctgtattttttaccagcaatttccttataatgctctatttcatgtttttttaagaagttaatgttttgagggtaaaacttaatctcaaagcccatactttttacataattgcggtaatgttctgttgatttaaagtttaaattctcgtctgtattatttgctaatttataagcataatttagtagatacttaaaaggatattcttttttttctacaacaacccaatatttattattaagagaatttttatcaattcctacatgatcaatttcgttggcggctttaagaatatgttcttttgtaatagtatctagtttcattgtatggttttttcttttattgttggttatattttattccatcacttctagtaaattatattttgtaaagctgagcgtagctttgtacttccgttgctctcataagagttatcaaaaagtattggtaacttataactagttctcgataccattttactccgtttctcttcgtaaaatcactcgaactgacattcgtcaccgtcattgcgaggtacgaagcaatctttgtattgatgaagagattattttatttgtctttatttctctttgtaacatcgttgttatcaacttttatttatgttattttctttttccattgatgaaaaagaaacaaaaaatctagtcttaaccacacttctctcaaaaataattatcctcgaacctaaattaaaagaactcgctttagctcaaacagcttttaattttaacggctcttgcggtgttatttttggattatctgtttatgacctcagcttatatattgtttttctattcatagttgtttaatgttttgctactctttttttgggtttcttttttacggttgtttttttgggagcttcttttgctgctttttctgccttaattttttccaacaacacgctggcaggctcatagttggggtctgctttacaggctgctatttcttgcggtgttaacaaagtaccctcaaaggctttttttaaaatactttggcgtaatgccttggctttttgtaaactggtaacaatgctttcttccaatttatcacataccgataaacggctttctatttctttaacgatttggtgttgttccttaatagttaaaaagggaattggatatgatttcaacaccttcatgtttaagaaaggttgcgctgtttgagaagcgatattctttagtttatacttttgaaaatagatataatactgaagcatttttggtagatatacattagaatctaatctaattctacagctccctgtcg

SEQ ID NO: 2216 - DNA, 24176 bp, synthetic construct
  source 1..24176: mol_type = other DNA
  misc_feature 1..24176: note = Synthetic
atttgatgggaaaaagtcatgtgtgaaagggagatctttccttgtgatttttgatacacctcttcagaaaatccgtatgggccgcctatgacatataccaattgcttgacgccgctattcatgcgtttttgaagctgggcagcaaagtcaactgatgaaaattgttttcctttttcatctaataggattacgcaatctgctggtgagactttggataatatctgcgcaccttcctttgtcttttgctcagactccgatagattctttgcttgtttaatatctggaatgatttctatactgaaattcacataatgcgacaaacgtttggtatattgtgcaatgagttcaataaggtttgaatcatctgttttccctactacaatgagtttaatgttcatggggtaaaagtaggaaactcctagaataatattgtaatgacttggtttaaaattgccgtgctttaacttggtagtatatttaaagactgtgggtaagtgtggtcattttatggcagaaataagttttctgctttttaaaattaaggttaaagtgtgtgatatgcgcaattgaagcccctaatatttttttaacttagcgaaaaaataattacaatgatatcaaaacttcaatttgagaatgaattggatttaattatagccaatgccgtacgtgaggatgtaggggatggggatcatagttctttggcgtgtattccgcctagtgcacaagggaaggcaaaattacttgtaaaggacactggtgttcttgctggagttgcctttgctaaaagggtttttgcttatgtggatcccgatttaaaaattgagattcttatagaggatggggcactggtcaaacacggtgacgttgctttttatgttgaaggtacttcccaatctattttaaaggcagagcgattggtgcttaatgcgatgcagcgtatgagtgctattgccacaaaaactgccaaatatgtaaaacttttggagggtacaaaaacaaagattttggatacccgtaaaactactccaggaattcgggcattggaaaaatgggctgttaagattggtggaggggagaatcatcgttttgcactctacgatatgattatgttgaaagacaaccatattgattttgcgggtggaattccccaggccattcaaaagacaaaagattatttaaaaacaagtaataaagatttaaaaatcattgtggaggctagagatttaaatgaggtccaaacaatcctagattcaggtggggtgtatagaattttattggataattttaattatcaggatagtaaaagagctgtggcccttattggagatcagtgtcaaacggaatcttcaggtgggatagatgaatcaaccattcgcctttatgctgattgcggggttgattatatttcatctggagccctaacgcactcagtatcgaatttggatctaagtttaaaagccctttaatatgtctatagaaattgaagaacgcttagataaaatccctgttgtaaactattttgtacgtttgctgaaaaatattcgtcttcctgggtttgaaggcttgtctatatacgacttgacagaaatgtattttataggagttatcaagggagcactgaccgatagggctagtgctatcgcatatagtttttttctggcgctttttccatttctactttttatattaaacttgattccctacgtgcctatggaagggtttcaggagaatttcatcgtatttattgagagtttacttccaccgagaacagtagggttcttcgatacaattattgaggatattgggaaaaatcaacgaggagggctgttgtcttctgcttttttgctttccattttcaccatggccaacggaattaatgcgatttttggaggatttgaaaactcttatcactcggtcaatacccgaagcatgattcgacaatatttggtggccgttggagtagcaatgttaatggctttggttcttctaggatctgtggttggttttattgtctatgaaatttacattggacatgttgtgaatgatcttgctgcgagtgctgcaaatggcgctgttggatctggtgagactcttggggtgaaactcggacgtttcttcttctttgtggttattacatttcttaccacagccatgttgtattattttggaacctcagaagggaagcagaccaagttcttttctccaggggctgtaatgtcgacagttcttataattttgaccacttattttttcggaatttacattgagaatttctctaagtataatgagttgtatggttccattggtgctttactgattcttatgctgtatatctggttgaattcaaatatagtattgcttggttttgagctcaatgcatctttaaggagtttacgaagaaatttttaactttactattaaggtattcgatatactaaaatcctaaaattatgaaagcactattgagtttttttctagttctgtttattggcgcagttcaagggcaaacagtcaccggcctatggaagactattgatgatgacacaggggtggaaaaatcgatcgttgaaatataccagcaggatgggaaaatttatgggaaggtcaaagagattttaaataaagatagggctgatgttgtatgtgatcgctgtgatggagataagagaaatcaacctgttcaaggaatggttatcattgagggtatggaaaaagatgggaatcagtacagtggaggaactatattagatcctgagaaaggcaagcaatacaagtgtaagctttgggtggatgaggataatcctaatattttaaatgttcgaggttatattgcatttttataccgtacgcaatattggaaaagggttgagtgatcattagctattataaaccaccagaaaaactgttatcaacttcctttataatcaccttataattaaatgcattttatagatgtcatattaccgattcccctgaccaagacttttgtgtatcaagtcagtgagcgggaggcagactttttggaaaaagggatgcgagtggcggtgccatttggaaaatctaagatttatacagctttggtgtatgcgattcatcaaaatgcgcctactacatataaggcaaaagagattgatcagatcttagatcgttcggcggtagtttctgcacgtcaacttgagttttgggagtggatagcttcttattatatgtgtagtttaggggaggtatttaaagctgctataccttccgctttacttttagagagtgagactattattcttccaaataaaaactttcagtggcaaggggaggagttttttagcgatcaggagtccttagtgtatgaagctctgcagcatcaatcctctttaaagatacaggaagtcagtgatatcattgatcgaaaaaacgtacttccgatcctcaaggctttaatagaaaaacaggtaattcagcttaaagaagaagtctatgagacctataagccaaagcttgttaagtatgtgaaaatgcatcaggattataattcggaccaggctttaagctctttgttggataccctctctagggcaaaaaagcaacgagaagttgtcctaaagctcttttccatggaagctgtaacgcaaaaaccaattcaagtcaaagagttggagaccgaaagtaaggtatcttctgctgtggtaaagtcacttatcgataaaggagttttggaggtgtatcatttgcagaccgatcgggttcaatatgatggtcaagagaccgttgagagtaaaaccttaaatgaataccaatccacggctcttactcagattaagggtcagttccaggaaaaggatgttgttctcttgcacggggtgacttcctctggaaaaactgaggtatatgttaaattaattgaacaagtcatacagaaaggtcagcaagttctttatttactccctgagattgctcttactactcaacttattaaacgactacagcaatattttggggaaaaggttagtgtgtatcattcaaagtattccaataatgaacgcgtagaggtgtggaacaatatattaaagtctgatgataaagctcagattgttcttggggcccgctctgctgttttgttgccctttagtaatttaggtttgatcgtagtggatgaagagcatgagcaatcctttaagcaatttgatcctgctccacgttatcacgctagagatgcagcagtggttctcgggaaattacatcaggctaaagttcttatgggaactgccaccccaagtattgaatcctattttaatacacaaaataaaaaatatgggttggttgaaattaataggcgattcgccggggtattaatgcccgatattgaattgactgacattaaagaaaagcatcgcaaaaagcgcatgaaaggccatttttcggatcgattaatcgaagccattgctgatgctttagaacttggagagcaggtgatactatttcagaatcgaagaggctatgcgcctattttagaatgtcaagaatgtggaaactcaccacaatgtccaaattgtgatgtgagtttgacctatcaccattatcgtgatcaattgcgttgtcattactgtggtcatgctatggctatgcagcagagttgtattgcctgtgggagtagtgagttaagtacgaagggttttggtacagaacagatagcccacgagttggcagacctctttcccgaggctaaggtgggtcggatggactccgatacaactcgtgggaagtatagttatgaaaagcttttgagctcttttgaaagattagaaattgatattttggtaggtacgcagatgcttactaaaggtttggattttaggaaggtgagtttagtgggggtaatgaatgctgataatttgttgaactttcctgactttagagctcatgagcgtagttttcaattaatacagcaggtctctggaagagcaggtcgtactcagaagaggggaaaggtgattgttcagacctataacccgtatcatcagatccttcaacaggcatcaatgaatgattttcaagcaatgtatacggatcaaattaatgagcgttatcagtttaaataccctccttttataagacttataaagcttgtgttccgtcacagggattttagtaaagtcaatgaagcaagcgattggtatgtgcaatctttaaaaacagtttttaaaggtagtggaaccgagattttagggcccgtttttccagctgttgctaggataagaaatgagtatcataagcatattataattaaaattcctgcgcatcaatctttgcccaaaagtaagcgagctattttaaaaatagataaaagctttcaggctataccggcatatagaagtgtaaggattgtttacaatgtggacgcacaatagtgttgtatcatcctatgagttactaagggcctcggaaaggtcttgttttttgttacggctaagtggaattagcttaccgttaacttcaacgtttttactattgaacttctgtaccttatccaaatttacgatataggatttgtggattcttaaaaaacgctctggtgggagttcgttttcaaatgctttcatggtagagagaatgacaatatttgcatcctcagtaactagtttgatgtaatcaccaagagcctctacccaattaatttcatttaaaaagacttttcgtttttttaagttactttttacgaaaatatgatcatcatcctctttggaagcaaccttgagtttgaaattctcttgtgctctcttaatagaagcctcgaagcgttcttgagtgatgggtttatgcagataatctgtaacatcgtagtcgaatgcttttaatgcatattgagcgcttccggtgataagtatgacttgtggtggttcacttagggcttctaataggtcaaagccatttaccactggcatttcaatatcaaggaaaattaaatcaatagcctgtttctttaggccattctttgcctcaatggcattactgtattcagcaaccaaattcagcatcggatgatttttgatcaacctagccacagacatccgctggatacttgagtcatctactatgatacaattcattttcatattctataaaggtgatcgattggtttttaacgtgtacaattttaatcaaaatacctcactgaagcaaacaattgttgtaaaatggggaaatatgttggcgaaaagggtgtttttcaccttagtttatcgaaatctttaagcttcactttgtaaatataataattaattctacttttgcagccttaaaaataataataatttattcaagattatgaatcaatatgaaactgttttcattctaaatcccgttttatctgatactcagataaaggaaacagttaagaagtttgagaatttcttaacctcaaaaggggctgagtttgtagctaaagaagattggggccttaaaaaattggcgtatcctattcaaaacaaaaaaagtggtttttatcacctttttgaattcaaagttgctggtgaagcaattgagccattcgaattggaatttagacgtgatgagcgtgtaatgcgttatttaactgttaagttggataaacatgcaattgcttgggcggagaaaagaagaaaaaaacttaacgaaaaagcttaattatcatggcaacatctatagagcaacaagcaaaaggtaaaaaagatggagagatcagatatctaactccacttaacattgagactaacaaaacaaagaaatactgtcgtttcaaaaaatctggtattaaatatatcgattataaagatccagatttcttattgaaattagtaaatgagcaaggtaagattcttccaagaagattgactggaacttcattgaaatatcaaagaaaagtgtctgtagctatcaaaagatcgcgtcacttagcacttatgccatacgtagcagatttattaaaataaaaggaaggtaaccatggaattaatattaaagaacgacgtcgaaaacttaggttttaaagatgatgtggtaaccgttaaaaatggttacggtagaaattatttgatccctaaaggatacgctattctagctaccacttctgctaaaaaagtattggctgagaatctaaagcaaagagcctttaaagagaagaaaattgttgatgatgctcaagttatcgctgatcaacttaaaggtttagagatcaaaattacagctaaagcaggtgttggaaacaaactttttggttctgtaacaaacgcggatctttctgaagcaattcaaaaagagtctaaaatagctattgagaagaaatttataagcatcttaggaggtaacgttaaagttgctggtccttatgaggctactattagacttcatagagaggtaattgttaacttcccatttgaagtagtagctgaggcttaattagtagaaattatttcatcatacgaggaggttgtataaaaatttattttttttgcaacctcttttcgatttttgtacatagataaatataagatttaagtgaagtacagaagattaacaaaagagcagttagaggaaatgcaccaagagtttataaactttttggctacacaatccataacagctcaggaatggaaaagtatcaaagaaaataaaccagaggttgctgaagaagaaattgatgtcttcagtgatttggtttgggagggtgtgcttgccaaaatcgagtttcttgaaaatatctctgctacacagatgcatctttttcatttgacagaaaagcaaatgaaccttattgcagttcgtgtaagtcagccagggatagacctaaggactcaacatggatttgggtggttcaaacaaaactttatgggtgagaatgttgaaattatgactgctgtcaaagcctattcagaggataagttactggataaatttgaactcattgagaagggagccataatcaccaaaggggagttattccgttactttgacgacatcattgaataatctaagtatttaaaatttaagtacggctagctttaaggtaatactcctattttttagtaactctatatagttgaggtataatttagtgtaaatctctaaacacatagtaacaatggcacaaaaaccaagcatcgcaaaaggaacaagagactttggaccagaggaagtcaataaacgtaactatattatcagtaccataaaatctcattttgaaacttttggttttatgcctatcgaaaccccaagttttgagaattctgagacccttatgggaaaatatggggatgaaggtgatcgcttgatttttaaaattttaaattctggagattatctttccaaagtcgatgatgcactttatactaaaaaagatgccagtgccctaacatcaaggatttcagaaaaagcattacgttatgatttaacggttccatttgcgcggtatgttgtaatgcaccaaaatgaaattgatctcccttttaagcgttatcaagtgcagcctgtttggagagcggatcgccctcaaaaagggcgtttcagagagttttaccagtgtgatgccgatgtagtaggttcaacttcactttggcaggaggtagagtttatacagctttatgatacggtatttagtagtcttggggtagagggtgtgaccattaaactcaataaccgaaaaatactctctggaattgcagaggttattggtgccaaagataaactcatcgattttactgttgctctggataaattagataaaattggtgaagatggcgtgaagaaggaaatgctggaaaaaggtataactgaaatggctattgagaaagttcagcctttatttagttttactggtagtaatggttcaaaattagaaagtttgaaaaccatgttatctacttccgatgaaggacttaaaggagtggaagaattgagttttatactaacagctattgatgccttaggtcttaagacttcgaacctggagttggatgtaactctagccagagggcttaattattatactggagcaatcattgaggttgctgcgcctgaaagagttaagattggctcgatcggaggaggtggtcgttatgatgatttgactggtatttttggtcttaaaaatgtcagtggtgtaggtatttcttttggacttgacagaatttatttggtgttggatgaacttggtttattcccaccatctgttactactacaactgaggtcctgtttttaaattttggccagaatgaagctttatatggtctaaaggcagttaaagcgttaagagaaagtggtataaaagctgagttgtaccccgatgacactaagatgaaaaaacaaatgaattatgccaacaaaaggggtattccatttgtggttttagctggggaatctgagatggataaaaatacctttactttaaaaaatatgaactcgggtactcaagacgaggtcgatataactgccttaattgagagtttaagagcttagacttccttttttggttcacacacaaggtgatttctgatggcggattatgaatccatagcgtagggattaattaattgattatcgaaatttttgtactaaaattaatggcattaaaacctgtctatctaatagtccatttctattttcatttgaatttcttattcattacactctaaaatcaagagggtgttcccgtgatttcatttaatacctcccttcttagccaattctaatactgctgaaggcagtcttttttggataaatcccaggtttatgagtgatgtttgtcgtctatttaattagatagggatcaatgccaaagtttttggataaaaaaaatcgacattccgaagaatgccgatttgaatgttttcacaacggaataatccttattgtgaattgctttcagatttcaaagatataaatttattttaatcttggtttgagggtttccgtaattgcgatattttttttcattgtatatttaggagcaaaactaattctactattacaatgaaaactatattaggtcttgatttaggaacaaacagcatcggttgggctttggttaaggaggcagaaaatgaaaatgaagtttcggatattatcaaattgggtgtaagggtaaatcctctgactgtagatgaattgacgaattttgaaggagggaaagcatactcaaataatgcagaaagaacgctgaaaaggggggctaggagaaaccttcaacgttataaattacgtagagaaaatctcattgagatcctcttgaaaaatggattgataaacaaggatacggcactcacagaagtagggaaagagactactcatcaaacattaaaactaaggtccaagtcggctaatgagaaagtttcattggaggatctggcaaaaattttattatcaataaataagaaacgagggtacaaaagtagtcgtaaagtgaacgctgaagatgatggtgtagccatagatggaatggaggttgctaaattattgtatgatgaaaatatgactccaggggagtatgttttaaggctattggagtcaggaaaaaagcatctgccggatttctatcgttccgatctacaggaagaatttaatctagtttggaaaaaacaaagtgaattttacccgcttatacttactaaggaacttttttttgaactccatgggaagaataaaagtcaaacttgggcgatctgtaaagaacctttaggaattgttggtgttaaacttaaagggtccgccaaagagcagaaatttgcccgatatcgattaaggaaagaagcgttgactcaacaaatagaacttgaacatcttgctatcgtattgcaggatataaacaatgatagtaataaatctagtggatatttaggtgcaatttcagatcgtagtaaagagcttttctttaacaaggaaactgtaggacaatatcaatataaacaattgcagaaagatccaaatacttcactcaagaatcaagttttttacaggcaagattatctggatgaatttgaagtcatttggagaaatcaagccaaattttatcctcaactaacaaatgaacttaagcaagaaataagggatgtcgttatattttatcagcgtaagttaaaatcccaaaagaatctaattagcttttgtcagtttgaaagtacccagcaaaactatgtggaaaaggagacaggtaagaccaaaataagaaccattggacgaagggtaattccccgttcttctccattgtttcaagaatttaaaatatggcaatctctcaataatctgaagtttgtaaattcagagagtaatcaaataattcagttcatagagttggaggatgatgtgaaaaaggttgtttttgatgaattaaacctcagaggggatttaaagccgaatcaagtgctaaaaattttatcgaaatatatgaaaattgggaagttaacccaatggaagtgtaatttggaagaaattgaaggtaacagaaccaattcagctctgtataatgtgtttcaaatgattgcggaggaagaaggttatgggtttaattggggaaagaaaagcgctttggaaattaaatccgagttaaaggctatattttcttcaattggaatcaatgattctattttggattttgatttcagcaaaaaattggatcagcaactgagctaccaattatggcatttgttgtactccgcagaggaaggtaacagtaaaataacagaagaggataagtttacttatggtaatactggagttgctttaaaaaagaagctccatcttaaatttggttttaaaccagaatatagtactctaatttcaaatttaaggtttacttctgattacggtaatttatcatcgaaagccattagtaagatccttccttttcttcgggatgggagtgattactcaaaggcatgtcaatatgcaggatataaccactcgaatagtctaagtgcagatgagttggataaccgagaattaaagccaaagcttgagttgcttaagaaaaacagcctacgtaatccggttgttgagaaaattcttaatcagatggtcaatgtggttaatcaggttattgataattacgggaaacctgacgaagttcggattgaactggctagagaattaaagaagtcggctaaagagcgaagtcaaatgacaaaaaacatttcagatgctactcgaagaaacgctgaaataaaaaaatacttaagcaaagagttcggtatcccgaatcctacaaagggtgatgttatacgttatcgactttgggaagaattggcatctaatggttataaggatttgttcagggataaatatatcccaaaagaaaaattgttttctaatgagattgatatagagcatattattccaaaagctctgttgttcgatgattctttttcgaataaaacattggctttcaaggtagataatttgaaaaaagcggatagaacagcttttgattttatgtctacggatttttccaaggatgttgatagctatattggccgtattgaaacattacataaagatggaaaaatctcatcctctaaatataaaaaactaatgattccaaagagcaaattagtggatggatttattgagcgtgatctacgtaacacacagtatatagccaaacaggcaaggaaaatgcttttagaggtgtttaaaactgtagtgccaactacaggtaaaataaccgataaattaagagaggattgggatttaattaacgtaatgaaggagcttaattttcctaaatacaaagcacttggtttaacaaaaaaaatagaaaggtttgatgtaggttcagagaaaattaagtcaattaatgttatagagggatggagtaaaagaaatgaccataggcaccatgccatggatgctttagctgttgcatttacgactcataatcatatccagtacttaaattatcttaatgccagaaaagatattcatcatgaaatgcatggcaccattaagtctattgaaaatcagattatagggaaagatgtaatgggtaaaaggcgatttattccgcctatatcggatttaagaatgaaagccaaactccagatagaatcaatcttaatttcatttaaaaataagaataaagtagtcacatggagtgtgaataaaaccaagctaaagggtaaagacaactataataaaaggagacaacttacgccgaggggacagctacataaggagacggtgtacgggaaaataaaacttattgatccaaaacccttaaaacttaataataaatttactttagttagagcgtcaatgattgtggacaaagtccatagagagattgtgttacaacatctttctaaatacgataataactctgaagttgcatttgattcaaaaacaatcaagatagatccaattctaattgaaggaatagggcttaaagaggtggtgtgttatgaagacgtattcaaaattcgaaaaaagatatctggggataattttaaaaatgagaaacatttagaaaaggtcattgacgaaaaggtaaaacaaatattgaaagatcgtgtgattaaatttcaaggtaattttaaagaggccttttctaatttagaagaaaatccaatatggttaaacaaaagcaaaggaattgctgtgaaaagtgtggcaattaaaggcgtgaataatgctgagtctctccatgaaggaaaggatcattttggagatcaaatattggataaaaataaaaagcaaattccagttgactttgtgagtactgggaataaccatcatgtgggtatatatgaagacaaagatggtaatctgcaagaaagggtagtttcgttttttgaggccgtaacaagagttaatgaggggctgccaataattgataaaacttataattctgatataggttggaagttcaaatttacgatgaaacagaatgaaatgtttgtgttcccatcagatgattttgatccaaatgaatttgatttaacagatggaaagaatgctgctaaaatatcgcctaatttatatagagttcagaaaatagctactaaaaattatatgtttcgccatcatctcgaaactgttgtgacaaacgatttagagtttacctataagagtatcagatctactggatggcttaggaatctcgttaaagtcagaattaatcacctgggcgaaatcgtttatgtaggtgagtattaatatactaatttaaaacgaaatggtaaaacgtactctcttctttggtaatcctgcttatctcagcaccaaaaacgaccagctgatcgttaaattcccaggagatgaaaatgctgagaaaagtcttcctattgaagatttaggatacgttgtattagaagaccctcaaataacaattaccaatggactattaatgaaattggttcaaaataagaccgccgtaattacatgtgacaagcagcatttgccttgtagttttttacagccactagtggggcacaccgagcagaccgagcggattcgatatcaacttaatgcaagtgtgccgcttaaaaaacagttatggcaacaaactatttcagctaaggtcagcaatcaagcgaatcatttgctgttgcggtccaaaaatgccttaaaacttaaacgatgggcaacagaagtcaaaagtggagatcttggaaatatagaagcaattgccgcagcatattattttcaaaacttgtttgatgatgatgtggttgagggttttagtcgtaatcaaaaagggatacctcctaataatctattaaattatggatatgccatattaagagcgattgcagcacgagctcttgtaagtagtggattactaccatcagtagggattttccatagtaataaatataatgctttttgtctggctgacgacctcatggagccatacaggccctttgttgattctttggtgtttgatatagttaatacgggctgtaatattgaagaattgtctaaaaatataaaatcagaacttttaaagataccgaccatcgatgtgcaaatagagggtaagcttagccccttaatgatcgccatgagtcgtacaacgaatagtgttcaagagtgttttgcaggctcgagtagaaaggtactgtatcctgatttctaaagtttataaagagcatctatagaactattgaagtgttgtcatgcaaacggatagattttcacgattaaatcaatatagaagtatgtgggtactagtgttttttgatttaccaaccgaaactattacagatcggaaaacggcctctcggtttagaaaaaatctacttaatgatggtttcaatatgtttcaattcagtatttacatgagattctgtcccagtagagaaaatgcagctgttcacataaaaaggacaaaaaatgccctaccaaaaaaagggaaagtctgcatcatgcagattacagacaagcaatttggaatgatggaactctttcatgggaaaaaggaaactaccctcgaaaaacccaatcaacaattggaattgttttagtataatcgttgaagaattactctaatttttctgtttttgtgcattttgttttataccaaataggatcaaaaatgtgcaaacatccttgtgccgaatcataatttttcattctgattttaaatcctgaatttggatttaaaacacaggatgccagttttttacggctggtatcctgtgaattccatactaagatagtattctgaaagcaattcacaacacatatactgacatattgacaaagatactgcctgtgaattccatactaagatagtattctgaaagcaattcacaacacatactgacatactgacatatactgacatcctgtgaattccatactaagatagtattctgaaagcaattcacaacacatatactgatactgacatattgacaaagcctgtgaattccatactaagatagtattctgaaagcaattcacaacggtaggcaatatctcgccgttaacgatgcccctgtgaattccatactaagatagtattctgaaagcaattcacaacgcaaaatattcaacctatagagatagatctcctgtgaattccatactaagatagtattctgaaagcaattcacaacaatggttgttatgtttatggttctgatggtcctgtgaattccatactaagatagtattctgaaagcaattcacaactcatatctatcatatcctgtccctgctcttcctgtgaattccatactaagatagtattctgaaagcaattcacaacattatgacaaggtatctaaattcgaccaacctgtgaattccatactaagatagtattctgaaagcaattcacaacaattgttaatttcatggtcgtaaatttcgtcctgtgaattccatactaagatagtattctgaaagcaattcacaacacatagtgattgagtatgtgttcccttttgcctgtgaattccatactaagatagtattctgaaagcaattcacaactagccttagttgtgggtggattaggtcattcctgtgaattccatactaagatagtattctgaaagcaattcacaactagtttccatctctgtcttgttttattgttcctgtgaattccatactaagatagtattctgaaagcaattcacaacggctgtttttctctgactctagcgaaggtcctgtgaattccatactaagatagtattctgaaaacaattcacaatattaagacaccggatgttttgcaatggatctgggtacaaaactgccctcccctctatttgtgtgaccagagtttatcattcgtatcccaagtttaacttctgtgcttgattggataaaaactccagctgtgcatctcgttccttagcaagctgtcgcttatactcgataacatcttttaacaacacccttctatgactccctacctttctaaatggaatttttgtagtctctaatagttttactacatgaggccttgatacattgagtgtttcagctacttgttgtgtgcttaactccgatttggaagagactattgagatcgatttgccttcagccatattttcaattatagtagaaagtattgccattgcctttttggttgttgttatgaattcatctgtttcttgaatctttattttgacatcatttttcccagaaaattttatgctttgaaacaccacctgaaaatcttgcaaacagttctttgcaatctcttaataagtatttgtagttatttcgttataatttctcatgacattaatttttaaataaaaataaacgaattaaatgaaataatttttaaattttttctatacgtaagctatttaatatttcgttaataaccacttgaatcatggctaaacccaattcattggagcttaaatatttatatagaaaacttgcttcatcaagatattggagatgtgcccaatgatacttgtgattagatgtgggtactagaacctaccgccaattttaaaaaaggccttaataaaatcaaaacttccaaaaaaagtacaaggcaacagctgtgtgccaaaaaagcttgaaaaatggaggagtggcgttattaccaaagtcaataatgcctcatcgattgaagggtaattacaaagatcactgataatcaagttgataaaaataggttcccattcagatttattcaagtaataaatagcttagtattttttgttatcataacgtattttactcataaaatcccccttttaaaagtttaatccagaggataataagatcatcctccggattaggttcactgttcgtttttgagatagtgtctttttttgatttatcgttcataaaaaaatggaggctcgatatttaagcttctcaaatatacatagccttgacccctgtgatgtatttcattatctataaaatacataatagaagaggtgatcgtcccatcatattggccaaagagtttgatctgtttttgaaaatcttctggttttattttagcgaagttttcattgatgatatctgtggtttcatcccaagcttttaaataatattcttttttattgggatattctggctcggtaaatgttccggtgtttttttctacaatctctttgattccaggacctgcaatggctaacaattcttgaataagtttagcgtaggttctcatgcctccaatgctatgtgtgaagaattcttcttcaggaaacgcttcaatggttctacgggtaagtccacgatgtccttgccagtggtttaatagttcttctggtgtcattactgttgcttgtactgtttgtgtttttgaattttccatgataaatgaattggtatttttattattggtttttaatttcaattcaaaattaagattggtatatgacaagggtgtgtcagtagtaattacagtttgtaaatttttctagtattagctcatttttaaccttctttactatgttgacaaggggttgtcactagctggttttttctttgtgatgaattaaaatcaaaacgttatgaagaccatgcctaaagtaagtttaaatcaaccgtccatagagaatttaataaaatcctattctagatatcattattgggcaaacaaaattttgattgattggatacgggaagaatcagtttgtgagtctcaacaattacattctgttagtttttcagaagttgatttagcgctcagaaccgttttgcattcccaagagttttggttaaggatcatcaaaaatgaacaatgtaatagggttgacccacctgaaaactcaattatagaagcttatgatgagttgccattttatgaactcatggatggtgttgtatctatttcattgcaattttcgaactatgtgtctgcattaaatcagaacgatctcgaaagaaagcttcaccttaagagtccatggtttgagtcgttccagagacgatttgaattgattttacatgtagttaatcatgccgcgtttcaccgtgggcaaattagcagtatgggaaggagtttagggtataataatgttcctatgatggactataattactttatgctaaatgtaaactaatgtcctttaaagaattgtacttccaatggatgttttatctttggagtatatgtcgatcagttatgagtgatgaaagcgttaaacgtttcgatagaatcgtttccatacacattcaattgcagtctaaaaaaatcgttcgagcccaggatctagcagatcgcttccaggtgagcttgagaacgatttatcgggatattagaactttagaatcctctggtgttcctattgtgagtgaagcaggggtcggttatagtattatggaaggatataggttacctccagtgatgtttaccaaagaggaagctggaagttttgttgcagcggagaaactaatggaacagtttactgatgatactttgggagcttattataaatctgccatgtataagattaaatcagttttacgtggtagagaaaaagactggatcgatgctatagaatctaatgtgtgtattgatggacgacaggggttatttaataaggatatcccagatgctctagaaattatctttgagagcattgcagagaaaaaacaattatttttaacctaccaggccttagaggctgattaccctagtgagcgacatattgaacccgtgggtttatttcatgaacataattattggtacttaatggcgtattgtcatttacgccaggattatcggcagtttagaacagatcggatgcttcaaattaagcgcactcaaatacctaatgttcttgaacatggtgaattggatgactacagaccaaatcacgtggaacgtgaacaaaccaagattgttcttttggtagataaaagagtagctcgttatatgcgcagtgcgacgaactatcaccgtttggttgctgaggttcctaaaggagaagaagttgagatgacttttttaagttctaatattgaaaatgattttgctagatggtacttaatgtttgcagattatgctaccatcaagtcgcctaattcattgaaaattagagttcgtgaaatactttctgttgccagttcacgcttgtgaattgtaaattttaggaatatttaagtgttgtttttctacaaagttttgtaccttgtttttaaataaattaactgtgaaaaatatactagttttaagcttaatttggtgctgcgcgattgtaaatgctcaaaatgtaaacgaaatgaaggacacttctatctatcagtttaccgttcaggatatcaacggtgatgattttccattaagtgaattaaaagggaaaaaggtaatgattgtcaatactgcaagtaaatgcgggttaactccgcaatatgaattattagaaagtatatacaatacctataaatttcagaacttcgtaattattggattcccagcaaacaattttgccaaccaagaacctggatctaaccaagaaattgctgaattctgtcaagccaattatggggttagctttccaatgatgagcaagatttcagtaaaaggggatgacatacacccgttgtataagtttctcacccaaaaggataaaagtggtcttgaggattcagaagtggcgtggaactttcaaaaatatttaattgatgaaaatggacagcttgccaaggtgatatctcctaaaaccttacctacggataagagtgtgattgattggatagaacagtaaatttgtctccaacttcctgatgccaaacactaagttggtatcaataattctttaaatttactttattaaacaaactggcatgattgctgtcgctcaggcattatctcatatcgaaaaatctattatgtccaatactattattgagacaagtattacagaagctcatggttatgttttagctcaggatgtagtttctgatatcgatttaccaccttttagacaatcagctatggatggatacgcagttcgtctatggggtcatgaggaatttgttgtaaaaggagaaattcaagccggttccaatatggaagtttcattacgacaaggagaagccgtccgaatttacactggagcccgagtacctgaagaggccaataaggtcgttatgaaagagcatgttgaggtttttaattcatcgattaaggtagttaaatttcaggagaaaactaatattaagacccaaggcgagcagataaagagaggagaacgtgtgctttcaaagggagatgaactcaatactgctgcaatttcttttttggctggtttaggggtggcaaagcttatggtttataaaaaacctagcgtagctgttttaattagcggtaatgaacttctacaacctggggatccatggcagcaggccaaaacctacgatagcaactcttatattttgaaattgttacttcaaaaggtaggagttgatgacatctcattctattatgttgaggatgacactaaatccagtgttgcaatggtaggtgacctacttgatgatcatgactttatagtagccaccggcggtatttctgtaggagattacgatttaatgcgggtagcatttcaggctaatgatgtagaggaacagttttacaaaatcaatcagaaaccaggcaaaccaatctactttggtttaaaaaacgataaggtagtttttggacttccaggaaacccagcagcatgttttataaatttccaaatatacgtattaccagcacttaggcggtttttgggaaaaagcatctcgagttttaaaaaaggtgtaactgaccaaaagattgtaaacaactccggtaaggcgttgtttctaagaggagagtgtttaaatggacatctaaatgttttttccaatcaaagttcgtccttactacagagtttaattcaggccaatgctttgatctatgtgccggaggatatggaagctgttgaaattggagatgaggttcaatatgtggatatagttcagtaattttaccaaaaggaaaaataatattatggagcggaagaagaaaaatgtatttatacaaggggcaataccacctgaatttattgcagaatctattgcaaaacaccaatccaaacacagcattggagcacacaatatatttttagggcaaattagagctgataataaagagggtaaagttgtttcggctattgaatacacgacctatcaagggatggccgatcaaaagctgtatgaaattcgagaggaggcttttgaaaaatttgaccttagctgtatgcacatttaccatagtttgggaagggtaggtgtgggagaaatctgcttttttgtttttgtttcttcacctcaccgcaaaggagtttatcaagcaactgagcatattgtaaaccgcatcaaggctgaagttccaatttttggtaaggaaatattcgaagatcagacccatcagtggaaggtgaacagctaatcgaaaattctagaattattatggaagatataggagatcatattacagcaaattgtttggccatagctcagattgtaatcgaaatggatgaaatggcacggcaagtctataatgatactgctttttccaaaattcaagtagctgcagaactggctgttaaaaattcatccacggtaattcctggggtacacgtagtggcatttgactttatttcactctcacaagaacaacaagatgatcgactgatatatcaacttcagctaaaagctatacacaaaacaggtattgaaactcaagccctttatggtatttccgttgcgggcttaagtcttaaagaattcatcggttcaaaggggaaggtcagaatcggtgctcctcaaattataaaaagtaatagcccttactcaaccgataaacgaatgtttccaagtggactcaccgctgctgtggtagtttgttccgatagtatttctgatggttccaaaacagatgctgcagggaaggctataattgcagaacttgaaaagtatcagataaaggtaaatcattaccaagtgattcctgatgaaaaggaaatcatttctcaatgcgccactagcctttctaaggagcatcaccttttaatctatactgggggaacaggattgtcattaagagatgtcacacctgaggctctagagccgcttattcacagaagaattccggggattgaagaagcgataagagcatatggtcaacagcgagtgccttttgcaatgctctctagaagcttagtgggtactattgggaattgtttggtaatggcaattccaggctctaccaagggggctagtgaatcaatgaaagcagtatttccacatttattacatgtctttaaaattctaagagggcaaacacagcattagaccatcgaactcatttttatgattagtttataggtgttactgcctgatttatggggttaaaatctgattttggagcctcacatagggagcagtgataatgctcaggtaattgttcaaatggtgtgttttgagggatgtcttgttgtatatctccgtacatttgatcgtatatagttaggcagttactgcactgatttacctgtttttctttaagtggtttggtttgcttgttacttttatcttttaatgatttatcggtttcttctgtggtttgaccgagctgttgaaaatacgccttactcagctccattaataatccaggtaattctatcttatcgacatgtagcgcataggttttataagttctggtattgggattgaaatctttagcatggcgtacactgtaagtgtttcttaattttagattggcctgactatagatcggtggattgcactgaattacaatggaagtgaaatgaaacactttgtcgtgcttccttgtaattccaatggtcagaccataggtgctaatatcataactgtctaatttagacaccagatagtttttaagtttaagcgccttttgatcccccacgggaagatgccagttgagttctaattgagaatgccgaacattaataccatgctttcctaaacatttctcccactctagtttagcctctgctggaatgcctttaatgataaaagacttccatggggtgatgcatattttcccgatcttcgattctgcacaaagctcacataatgcaagtagaaaagggagatcgtaattgttattgcgccagtataaacctaaccagtatttattggttcccattttgttcatgccctcataatagagaaatggatgaaaggaagtatttaaagg

SEQ ID NO: 2217 - DNA, 24176 bp, synthetic construct
  source 1..24176: mol_type = other DNA
  misc_feature 1..24176: note = Synthetic
atcctcttgtttagatcctgaaactcttgtataaataacggcattgttattacgaataatttttctcttattctgcttggcgaagctttgaaattgattcagattgctcatagttggtaacgatgttatgagttaataatgataattcttttagtgttgctatgatatgttcagcttcttgtatagacacatcagcaaatccgtcaaagctttttaattcttcaacggaaattgtttttaatgctgtgttgtcttttacaatcttcatatacaggaactatcatatcaacgcttatagctagttcattgctaaaaggcttcattccctttttgataattgtaattttgcttgaaatcatatcttcaatattacgaagaattgaaatcttttccaatcgttttccaattatttaacagtctaaaacctacaattttgttttataaagggaaatcaaacgtatttttatataattattttttatttaatttttaaacttttattctaatactacaaaggttatctataaaaaatttgcctttgctgggttttgcagacattcgacgagattcgctgagatttgcagacattctatgtagttttcaagttttattattgatagtaaaggttgaaataaaaaaaataatgtcggacgtatagcgacgtatagcgacggacaaagacggctagtcatacaatttttaacatattattttgttttctcttttattttaacaaatgttgcaagaaaaaaatagtattagtaggctaatgacagctagtgccgaataaattttcattcttactttgtgaatacaaaaattataaaaaatgaaaaataacttttgtgggattatggaggtttttggaagatgatgtaggattatggagaataatataagctagtgtgatagtttttttattggttaaataatagataaatatccaatatgtatgaaacttgtatttcaaaacataaataactcatgctaattaaaaatatgcaaaaaaacactaaatcaaaatctacattcgatttggtattagattaaatgatttgttaccatactacacaactgatttttaataatattggtatggtatactgtaatttttaatgtcaaaaacttcatgaaactgatattaacaataaacaaagctaattaattacgcttttaacgtaaatacattacggaaatacgttaaatagttaatgtaaaatgaaataagtttgataattaaatcaaacttattatatattagcattcgtaaatatgtaaagttaaagttttgtagtcatcaatcaataaattgatattgactaaaaacatcaagtatttagtctaaaaatcaacgcttatacaatattatcgacgcttattaagtttatttgtgtatctgtaatctatttcttttatttgaagtaatccttgtatttttatttatgaaagttaaatatctttttctttttctcattgtatcattttttttaacatcatgttggacaaaacccaataaagattacttagcagatgactattacttaagcgtgtctgaagccgatagcctttacattataaaagaatatgaaaaaagttatgagattttagatgaattattttctaatgtagcaccattgaatacaactccttacaaggaaatttctacttacgtcaaattaaaagtgattttagatgacaatttggaatacactgaatatactgaacttatcaccaaatatggttttcctattaaatatttaaaaaaagattctgtattgagtatttactatgctaaagtacgtgacagatttgatactgaagcttccacattaagaaaggaatatgaaacgtctttaaaccttgaattaagagataaaataatcgaaatgaaaagattagatcaattatatagacagggtaactataaacaaaatattgagaagcaaaataagattgattctacgaacgcagaagagttaatatatatttttgacacctatggatttccctcagaaactataattggaggttattatatagacaatcaatttgtaaatattgatgcacttttattacacacaaaagattccattagagaaaactttttatccctaaaattttggactatgtaaagaaagggaaaagcaaatcctcgttacgttggcttcatgaaagatcaattgttgatttacgcaggaaaagagcaatattatggtacatatagtaatgccaagccaatgaatacaaccataaaagaaattaatgaaagacgtcgctcaatcggattatacaatttaggatatgaagattggagaaacagcatattgtatccagatgatggcgaatactagttagctattaaagtgatacaagaattgattgcaatcaatgaagcggaaaccgaaaagctattaatagagtaggtgaaattttaattatttataaattatgcaaagattaaagcatttaaaaaaagcaaaaattaatagtactgaatataacagtattcttggaggaacagaaatatctacttgttacatggataatatttgtgatatccattatgatgataatgatgacggaataatgaaccccggcgaatgcatggatatcgttaaatgtgaaactgctactataacccaataaatcaaacttattatgacaaaaattgataaatttttaaataaaactgccgattctaattgtattcaatctatgttaggtggtaaagagaaaacaacaggaactcacgacgattgtggtaactacgaagatacttggtacgacaacgataatgatgataaattttctccaggagatacaatttgtacaaatagtaatcctccatgtaatcctgaaattacacaataattcataggaattatttgtattttatttaaaatgaattagaatgatagagcaactttatcattctaatttttaaattaaaaaccgaatgaaaatatattacgtattatttatagcttttttaacagtaggttgtaactcagataaagttgattatgaaacttatgacaagcttgtttgggaagcaatgttagaatacaagaagcaagagtattcaaaatcattaaatctatttcaaaaagctttcaagataattcctaatgaaagtgtttcagattatttctatgcggcggcggcatctttacatttgaataaagatattttagctaaagaattgattactgaatcaataatacaaacagatgcttctaaagggtattttgaaagatttgatgaattcaatcaatttagggaaaacaaattattttcagaagttgaagccgactatgaagaatataagtcacaatttttgaaaaatttaaagaatccaatcgcttacaaaaaacttgatagcttacttgacaaagatcagcaagctagaaatagcggtttgacagcagaagaacgatatccgatagattcaaccaatgttgtttctttaatcgaaataacgaaaaaacatggatggcagaaaaaaggatggttaatcttatggcatcaaagaggaaactttaaaaaagacgattatgtttggagtttttttagaccttatataaatcaaggaatcaaaaatggagaaattagaaaagatttttgggtaggttttgaagaacaagaatccataaccaaaaacaagaaacaaatttatggtttttataccaatcaatttgatcaatatccgattacagatgttcaaaatgtagacaaaagaagaaaagaagtagggcttccaccattatggtatttgaatgaaatttatggaactcaattacccgcaggctatcaaagtgataaaactaatttttaatatattttacttatgatatatgtaattagtgaagcggaagatgttactacaaattatgtgcttgaatggcttctatactacaaaaaagatttcattagaaggaattttcaagatgttagcaccttaaatttcttagagttatcaaatgatactttagatattaaaattgacgaattaagaaaggttgaaattaaaaaaatatggcacaggagagcacgtacaaggttcacacctcttagtttaaggaaaatccctagtatgtattcatatttaaagaaagaagaagaaatcttagtaaaatcaattgaaaatatcctaaagaaagacatagattatattgggagttttcagaaagaggatgaaaattataaaattgattatctattattagctaaaaaagtgaacttgaaaatccctgatactttagtaactacatcaaaagaaaaattatatttattttttgataagcatgcctcaattattacaaaagatttaagatatccaataagggttaatagtgagaactttaaaattacatcggcaggaacaacagtgattacggcaaagatgttgtcagaaatgaaaaataattttgctccaagtttatttcaagaaagaatagacaaacaatatgaaattcgtattttcttttttaaagataagttgtatcctatggctattttatctcaaaatgatgaaagtacttctttagattacaggaactataataatttaaaacctaatagaaatgtccctgttttactacctagtaaaattgaggaaaaagtcatcaattttataaaatcatcagaattaaatactggatctattgacttaattctaagtacaaataatgagtacatttttttagaagttaatccacaaggacaatttgattgggtttctaaaaattgtaattattatatcgaaaaggatattgctgaatatttaattaattaggattactatggaaaaaatagaatcattaaaatcggagttacctcttacgtttcaaaaatgtaatatctctacctcaaaaaaaagtcaaaccaacaagaaatttttccaaatagaatctcttggagctactcataatagtacacatagtttttacagaccaatatctaaaactttgaaaattaaatgattcaacaagaaattcctttcgttttaatagcaaattgtattcctgttaagggagctaatcaaagtttaatttgtgatttacaacgcaataatatcgttcatatacctaatgatttatacgatataattataaaatttgaaggcgaaactttgcatgaaataaaatcatactataaaaatatctatgatgataccatacaagagtactttgaatttttatatgataatgagttcataattttcacaaaaacacctaatctattccctaaaatagcacttgattggcatgaaccatcccaaatttcgaacgcaattattgatatcaatgaaagttcaaaatataacgttgaaaaggtcattgaacaactaaatgaaataaactgtaaatacttggagttaagatttttcaaatcaacaaatctcaatgagttatcacgtttagctaactttttagacaacttgaaatcatcaataatatcaattgattttaatatgccttttcaacaaggttttgatgaacttagtttatttagtttcatttctgaatttccaagaatttcctcttttagaatccattcttccccatttgataagtttattccaccgaaaaaagcgcaaagtggttatattatatattcccaacaaaaggtaaaaaatgaaaaattttgcggtattgtagatactagcttgtttgcaataaacataaaaacttttacagagtcacaaaatcacaactcttgtctaaatcgaaaaatctcaattgatgtagagggtaatattaaaaactgtccgtctatggctcaaagtttcggaaatattaaagacacaaccttacaagaagttttacaacaaaaagagtttaaaaagtattggaacattactaaagatgaaattagtatttgcaaagaatgtgagttcagatatatatgtactgactgccgtgcttatactgaaaatcccaaagataactactcaaaacccttgaaatgtgggtatagcccatatacaaacgaatggtcagattggagtacgaatccgttgaagcaaaaagccattgaatactatgatttgaaagggttgatctagtaaattttgcttttcatatcataattaagttgagcttttttgaattcataagcgacattattttcttcactaagaacactaaccttaatcaaaagaaggtaaaaccgtactttttatatgtaggtttttatatttgataaaaaacacaaactttttattatattgcctaacatttctttcttgtgatagaatgaactttctgacagttccttttttaaatacatttgattttaagtactaatctttaaatcaaataatcatgaaaaaagtattattagtttgtctattcatagtaggaatgaatttatcaacaagttgtaaccccgacagtatagcagatcaggaatatgaagaaatccaatcaacagacaaaaacaacaacggaacaatcggaaatagtggaggacaagaccccgacgaagattacaattagaaagtattttataatcattgccgtaatgattggtgtttttgcggcaatgtctcaagtcttttttgaagttaatagtgaagatgttgaaattgtcagaaaagaacagcgtacagcaagaaatgaaagagatctaaaaagggttgaagggatacaacttttagcagatattcagacgatgaatttgttgccggattcattgaatcaaaaaataaataacttagtaagttctcataatattagtgaacaaaaatctgaaaaactatatgttagtttaatcgatcttaaaaattcaaaaaaaataagaaactttccaaattacaactcatttgcagacgctataggaaacccatttttaatattaataacgggtgttttatttataatattacattttttcagaaatactattaattggattcaaatatcaaagtcctttatttatttaggcttcatgtatttgttcgtggcttctgtatacctaatttgggcattttcaaactcacttgaaattcacagagtttattatataacaggtttaatttttggagcaatttttgccgcatttgggttaaaatatcttctactttacttgtttaaaataaattccatagaagaagaaaagctattaaaagccatcagaattttgtttagacaactcctttttaatatcccaaaaaaagggtttatcaaagacgataaatttgttgaatttacagaatctaataatgacgtaattaataaagtagcaaaagaagtagattaaaatgaatgatttcactaaaaaaaatctaactaaactttacaataaaaaatttattgataaagaagtaaaaaacgcccatgaagaaattcttgaaataatagaaaaagaaaccgaagaacttaaaaaagatgcagaagaaatcaaaaagcgtaataataaaacttttgaaaacttgccaaaaggattagtttttacaattggtaatattgaagtttgtacttaattatcaatatttcttgcttttacaatgactcctaaatcttttaattcttgaagtcttttttcaattcccttttcaactagtccatcgataaaaaggctgaaatattctgaacgctccaaataaaaatctttatttttcacaaaatcattgacaatggataatcgtatagtttctgacttatccaaataagcactttgatgctttaaaaagtgttctattagctcatcaagtgaaacgatgacaccttgtttttcaaaatcgtgattcgattcttctttcaaatacatctcgcctgttccatcatttagccattctctggaaacattataatctttgcatagaaaattaaccaaaatatcaattgaagcttgtcttggttttgctgtatcgccgttgataatttttcttgcggctacattagaaatatgattattagttcctttttcaattttataggcagtaatctgttgttcattaataatatgtaggattcgagaaatcatttatttatataacttatttgttatttttgactaactttttcgtttttatgggaaactttttttatattagcatagcgttaaaccaaatatattaaaataacatcaaaagccttgaaaacctttatctcatgtcagaatataaaggttctagtttttgacttttattgaaaattgatacaaatagccatcaatatttatttgaaatttaaagctgaaaaatggcagaaaacgtattattaattttttcttgatgtgtatactaacaatttttgttattagtatgtaccgaacaataagaagatttagagtgctaataaaagacgagttcaattttaaaagtaaggttgacgaatgatttttttcatgattaaagttttattggttaatgctcttttccgaatatgggagcaattgattagtaacttaatcaattagttaggtcgtttgatctagctgtttagttggcaaagcggtatattctgagagcgtggtagttttaatgagtaaaaagcgtttgataggtgatatcaaagagggcaaagccgctttgccttttaaaaataaagaaatgattcaaaaaaaacatttacaattttttgctggatttgtagttggctttgtggttgccgtattgttaatgatgatatttattatttcatggatttattatttaaaataacctaaattcctctagtatccaaaatttcctgttttagtcgaaccttcaattttaaattgaaggtttttaaaaaaagtaatgcaaatgatgtttacttttcagaatattaatttatcgtaaaactaaaattattctgagtgagaaagccttgaattaacgttcaaggttttttttgttgctaggactacacgttttgtttttttagtaaactgatgttttgttgcaagttgttgcgttctgttgcaaattatcacagtacgctctaaggtcaatcgtatatatatacattaatgcgttctcctaaaaactcaagagcgtatatgtaaagaggttttacaattgctttactgtgaaagaattcaattctaatatcttcaaaaatctcatttaagagtaggtataatttatattcgtatgaactgcgtaagtaagagtaggtagccgtacataataaaatatcatgtaactcatacttttttaatagactttcaagagtagctaggtttttcaagattggtaagaaatcaataaaaccaatatcgctgtaaatttcattagtatttttttgatcctcttgcatatattgtaaaggatcaacttcatttaaaaataaatcttcatcttctgtaaaaccacttaaataacctttagtgtaaattttattatagggatcgtgttcgctacctattacaatataaagagaatgcttttttatgtcttcattttttgaaaaaactgtttgatttaattcatgaattgattttttgatatctattgtcaatttttgcttaatagccttttcatctaagtctagtttttttgcattttcaaaagcattgataagttcttgattttctctatgcttcactaaatttaaaacatcttcattgtagagtggatcgtcaagaagtcctttttcctgaaggttttcacccatgccttgaatgaagtcttcaatcataatttcaaaagtagcattttccaattttttgaaattattatagaaaagctccattagttgtgagtgaatgattttgttcattaattaagttttgtagataacggaaatttgatattttattatgcttggaagtttcttattgtaaattgttgtgtttttgtttcgtcttcatgctattgcaaattactttgagcatgaaaaaagcgacatcaatgatgccgctttaaatgttttcacaacggaataatccttattgtgaattgctttcaatttgtatatttcaaatatacggaaaagatttacataaaagaatgtggttttccgtaagggatattattatttttaattcatttttatagaaattcacaaacatgaagaaagtattaggattagatttaggaacaacctctattggttgggcgttagtagatgagggtgaaaacgaaaaagaagaatctgaaattataaaattaggagttcgagtaaatcctttgactactgatgagaaaacagattttgaaaaaggaagaccactttcaacaaatgcagatcgtacactgaaacgtagtgcaagacgaaatttgcaacgctttaagttgcgtagaaagaatctaatcgaaattttaacaaagcatcacattattgatgagaatacaaaacttactgagattggaaatcatacaacgcatcaaacagtggctttacgagcaaaagctgcaaaacataaaattgaaaaagatgagtttgcgcgtgtattgttggctattaataagaaaagaggttataaaagtagtcgtaaagttaaaaatgaagatgaaggatttgctattgatggaatggcagttgctaaagaattatacaaccaacaactcacacctggtcaatatgtacatcaactattaaaggagaataaaaaatatattccagatttttatcaatcggatttacaacaagagttagatactgtttggaaatttcaacaacaattttatgaatcgattttaacagatgaattatacaccaaattaaaaggacaaggacagcaaaattcaaggaagttatttttagcgattcatcaaatctatactgctgaaaataaaggaaaacgaaacgaagtccgattgcaacactatgcatggagaaatgaagcacttacaaaacaactttcaattgcagaagtagcatacgtattggttgctattaataacgaaatcaataaatctagtggatatttaggcgcaatcagcgaccgaagtaaatcactttattttaaaaatgtaactgttggtgaaagtttatacgcacaacttcaaaaagatcggcatatttctttgaaaaatcaagttttctatcgccaagattatttggatgaatttgagaaaatttgggaaacacaagcacaatttcaccctgaattaactactgaactcaaaacagaagttagagatataattattttttatcagcgaaagctaaaatctcaaaaacatttaatttctgattgtcagtttgaaaaaggacacaaagcaattccgaaatcttctccgttgtttcaagagtttaaaatttggcaaaacttgaatcatttagaatttgaacatattcaaacgaacgaaaaaataaaatttacagaatttgaggatgaagctaggcaatttgtatttgaagaattgaatcttagaggtactttaaaaagtaaagaattaaaaaagctgcttcaattgaaaactcctaagtattggaaagctaattttgaagaaattgaaggtaatagaacaaatgaagtattgtataatgtatatcaacgcattgctgaaattgaaggatatggttttgattggaataaaaaaactgctaaagaaattcacactgaattagcaataatttttaaagaagcaaaaataaattctgaaattttaacttttgataccacgattgaaggaaatgattttgacaaacaaaaaagttatcaattgtggcacttactctacgctgctgaagatggtaaaaaaataaccgaagcagatcgattattatatggagataccaatgttgcacttaaaaagaagcttcatatgacgtatggttttaagccaaattatgctagtttgttggtacatgtatcttttcaacaagattatgggaatttgagtagtagagccattcgcaaaatcattccttttttaatagatgggcataatttttcggaagctgcacgactcgcaaaatacaatcattccaattcactaactaaggaagaacaaaaaaatagagttttaaaagaaaaactttcactgctgaaaaagaatgagctacgaaatcctgtagtagagaagattttaaatcaaatggtaaatttggtcaatcaagtaattgaaacgtatggaaagcctgatgaaattcgtgtagagttgtcgagagaattaaagaaatcagcaaaagaacgagctgatatgacaaaacatattaatgaagcaactacaaaaaatcaaaatattagagagttacttcaaaaagaatttggcatacaacatccaactagaaacgatattgtaaagtataaattatatgaagaactgagtctgaatggatataaaacactctttacaaatacatatattcctaaagaaaaattgttctcaaaagaaattgatattgaacatattatcccaaaagcaattttatttgatgattctttttctaacaaaaccttagcctatcgaaacgtaaatttagctaaagctgattccactgcattggattttattacacaaaaatacacgagcgatttggatagttatatagcacgtgttgaaacattatatcaatcaaaaaaaatatcaaaagggaaatataaaaagcttctaatgtcacgaaacgaacttcccgaaggattcattgaacgagatttgcggaacagtcaatatatcgccaaaaaagcaacgcaaatgcttcaagaagtgtttggaactgtgcatacgacttctggacgaattactgataaattgcgtgaagattgggatttaattaatgtaatgaaagaactcaacttgtcaaaatatcaggtgttgggacttacagagaaacaaattcgaaaaaacggaaatagtgttgagatcattaaagattggacaaaacggaatgatcatcgtcatcatgcaatggatgcgctaacagttgcttttacaacgtacgaccatgttcagtatttaaataatttgaatgctatttatgggctaaaagatgaagaaattgatcataaaaaaagtaatttaaaaggaatcaaaaataagatcacgaaagtgtatgttaaagatggaaacaaaaagcgaaaatttattccgccactaaaaaacttcagaacgaaagcaaaagatcatttggagcaaattttgatatctttcaaaaataaaaataaagttgttaccaaaaataaaaacaagactaaaacaagtcagaaaggcgtgctgaatgaaaaggtgcagttaacaccaagaggtcaactacataaagaaaccgtgtacagtcatactaaaaaagtgattgtgacaaaagaaaaagtttcgagtaagtttactatcgagaagattcagcaagttaccaaaccaacatatcgagaagcgttactaaaacgtttggcggcgaataacaatgatccaaagaaagcatttgctggaaaaaatagtcttagcaagaatcctatttatttggatgaagctaaaacaaaactgttaccagaaatcgtaaaaacgcagtattttgaagataattacaccattagaaaagaaataaatcctgataattttaaggatgcaaaaagtctattaaaaattattgatataggagtgcaaaatattttaaaactgcggttacaagaatacaacggaaatgccaaattagcattttctgatcttgagaaaaaccctatttggttagacaaagaaaaaggaatttctataaaacgagttcgtatcgatggcattaaaaatgcagaagcattacattcaaaaacagatcatttcggaaaacccatattgtctaaagatagtaaaagtattgctgttgattttgtaagtacaggaaataatcatcatgtagctatttataaagaccaacaaggaaaacttcacgatgtagtagtttctttctatgaagctgtagcgcgtgtaaatttaggaattccaatcattgacaaagcactaaatgaaaatctaggttggaaatttttattcacgatgaagcaaaatgaaatgtttgtatttccttctgaaaatttcaatccgaaagaaattgatttagaagatcaaaaaaataatacgatagttagtaaacatttattcagagttcaaaagttttcaaagcttgtatacggaaattctgcaattagggaatatgtttttagacatcatttagaaacagaactgatagataaaaaagagctaaaagaaattacatttcatagcttaaaaagtttatcacttttggatcaaatagttaaagtaagaattaatcatattggaaaaattgtacacgtaggagaatattaaaaatagaagttatgataaagcgtaccatttatgttggttcccccgcttatttaagactaaaacaaaaacaattagtagtagaagatcccgaagacaaaagtatcaaaggaacaattcctattgaagatatggctttattgatgttggatcattatcaaattactttaagtaatcaattattaataaagctgcaaggaaacaatatagcagtggtaagttgtgatgcacaccatttaccatttggcattatgttgccgctgtatgggcataccgaacattcagatcgtataaaacaccaaatagctgcttccgaacctttaaaaaaacaattgtggaagcaaaccatagaacaaaaaattaaaaatcaacaggcgttgctcaaactaaataacaagccttatgagcaaatggatttctattggcagaatgtcaaaagtggcgacactactaattgtgaagccaaagcggcgcaacatcactggaaacatttatttgagaatttcactagagaacgttttggcaatgctcctaataacttattaaactttggatatgcagttctcagaagtattgttgcaagagcattagtaagtagtgggttattgcccgttttaggtatttttcatcgcaacaaatacaatccgtattgcttagcagatgatattatggaaccgtaccgaccttttgtcgataaaatggtatacaattatatttctttgcatggagttcacgaaaaattgaccaaagatagtaaagcatacttactcaatatagccacacaagatgtatggattgatggtgtagaacgtccattaatggttgccgtaacgactacaacagctagtttgtacaaatgttatggtggagaacaacgacacataaaatacccaacacttgattaatactactatgatatgttatcaaatacaaatcgttttaatgcctatagaattatgtgggtattagtattttttgatttacctacggaaacaaaaaaagagcgcagagccgcttcacaatttcgtaagaaactgattgatgacggatttacaatgtttcagttttccatatatcttcgacattgtccgagcagagaaaatgctaaagtgcatacaaagcgagttaaaagtatattacccaaacatgggaaagtctgtattttagaaataaccgataagcaatttgagaaaatggaactttttcacggtgtaaagcctatagatattccacaacctatacaacaactagaactgttttaggataaaaaaaatggagtaagactctaaaaaatgattcaataagatgcattttttaaattctaaaaagtaatcccgaagtactgattttaggcaacatttcgggattgaccttgtgattcctcacgtaaaaatacaatttgaaagcaattcacaacaagcagcacgtgcaatattaggagacgaaacttgtgattcctcacgtaaaaatacaatttgaaagcaattcacaactagacgatgccttgtgttccacttgtgactcttgtgattcctcacgtaaaaatacaatttgaaagcaattcacaactaaatgcagggtgtattgatattgatggatcttgtgattcctcacgtaaaaatacaatttgaaagcaattcacaactagggagcgtaggactagaacagataaaatcttgtgattcctcacgtaaaaatacaatttgaaagcaattcacaactgaggtttgcgcattcctttaacttttaaacttgtgattcctcacgtaaaaatacaatttgaaagcaattcacaacggagtctagcaaacacattggctattttagcttgtgattcctcacgtaaaaatacaatttgaaagcaattcacaacagagaggggggagcacattatgttgatattcttgtgattcctcacgtaaaaatacaatttgaaagcaattcacaacctatggagcgcgctaaaaaaataattaaagcttgtgattcctcacgtaaaaatacaatttgaaagcaattcacaacaaataaaagaaattgttttatgagtcataacttgtgattcctcacgtaaaaatacaatttgaaagcaattcacaacactaccgcaggaatgacgaaaattattaaccttgtgattcctcacgtaaaaatacaatttgaaagcaattcacaacacaaatataaatatgttatgcttaataaacttgtgattcctcacgtaaaaatacaatttgaaagcaattcacaacattgagtctgagcaagattataaaatgaaccttgtgattcctcacgtaaaaatacaatttgaaagcaattcacaacaagtaatgcaaacagtaaaacaaatcagctcttgtgattcctcacgtaaaaatacaatttgaaagcaattcacaacacagttgtctgtattccatcaataacatttcttgtgattcctcacgtaaaaatacaatttgaaagcaattcacaacatgtatacactattctctgaggcatcaaaccttgtgattcctcacgtaaaaatacaatttgaaagcaattcacaacagattatgaagaaatacacccttagagatacttgtgattcctcacgtaaaaatacaatttgaaagcaattcacaacaccagtgtggttacgcaaaacttatactttcttgtgattcctcacgtaaaaatacaatttgaaagcaattcacaacattcattgataacttctgaccagtcttttacttgtgattcctcacgtaaaaatacaatttgaaagcaattcacaactgggtgtctaacgtgcatgtgatggtaattcttgtgattcctcacgtaaaaatacaatttgaaagcaattcacaactagacggagattttgcaaaagcttatataccttgtgattcctcacgtaaaaatacaatttgaaagcaattcacaactcgtcttgctcttgatgtttatacctctttcttgtgattcctcacgtaaaaatacaatttgaaagcaattcacaactaacccaatttttattgtttccagaattcacttgtgattcctcacgtaaaaatacaatttgaaagcaattcacaactgaatacattcaagtttcgagaatggaagacttgtgattcctcacgtaaaaatacaatttgaaagcaattcacaacaaaacctattcattgattatattggtgaagcttgtgattcctcacgtaaaaatacaatttgaaagcaattcacaacaaaaagaaagaaactttgtttgaattgttccttgtgattcctcacgtaaaaatacaatttgaaagcaattcacaacattgcatacgttatgtcaagtaatggagagcttgtgattcctcacgtaaaaatacaatttgaaagcaattcacaacagtaaaaaggaaaaagcattgtttaaaatacttgtgattcctcacgtaaaaatacaatttgaaagcaattcacaacctgagtatttagacttattacgggaagaaacttgtgattcctcacgtaaaaatacaatttgaaagcaattcacaacgtaggcttaagtattctgtatctaatttcgcttgtgattcctcacgtaaaaatacaatttgaaagcaattcacaactatgaacaatcaagagaaccttccagaattcttgtgattcctcacgtaaaaatacaatttgaaagcaattcacaactaataaagtaaaatactattattaatcccccttgtgattcctcacgtaaaaatacaatttgaaagcaattcacaactagcttaacacctttatatccttccttcatcttgtgattcctcacgtaaaaatacaatttgaaagcaattcacaacttgaaatattaactgaattaaaatacaaagcttgtgattcctcacgtaaaaatacaatttgaaagcaattcacaacaataggatcagcgcccaaaagtaaggactgcttgtgattcctcacgtaaaaatacaatttgaaagcaattcacaactaggttaacgagtgcgcctatataatccagcttgtgattcctcacgtaaaaatacaatttgaaagcaattcacaactcgggggtgagaacccctctttctccgcacttgtgactgcttagttataccgaagtgtaaaagagatataacttaaattgtatggtattagaaaaagactaaatcactatcttttcctttatatattgtgtaatatgtatatttgttttctccctcataccatctgtatctcgattgtgtaaatctaaacattttcaaagtttcctgtacttctttttgaaaaagttgtttgtttttatttgtggtaaatatacttcccgtgaagtttatatagttttttcttcttcctgatgcagaaacttcaatatcattttcccacattttcgcatttatgattttactatattcttttctaagtagcggaaattctttaatttgtatctttgaaatcttggcttttaattttgcggttaatttttgtgtaactaaatcttttgattgttcaccttcttctacaatttttgcccaaccaccaaatagaactaactcaaattgtaactgatctactgtttttctgtaacctgagaaatcaataccttcatctatagacgctatttctcttttgatctgttcttttaaattttcttctttttcttgctcaatcttttgattttctaattctcttacttttttctttttttctaaagctaaattatgcaagctatctgcatgattaataagctttaaagcttctgtatatagagaatcttctttattaatagtttctaattcagtaatagcgatttgataattatctttttctatgcttcttttcgcagattcgattatagataaagaattattggttttatcggtgataaaacttccaataattccaataactaaaaatatcactaatataataacacacccttttcctttatttttatttgacatagtagaattttataattaatttttatttgagtttgacgattcttttatacaaatatgttcttcaaacatatatttagaaagcggttttaatgaattccctgtttcggggtgaagtcctaatgatgtaaaatattgcagttcttttttatgatttttaccataccaaatttttatagttccctcgggggttttatattcagtttgacaatcaacttcaatttttttgaagttttttattctttcctctttgtataattttagttgccccaattcatatttttctaaatcaaattgtacctcttcataatgtgttaaattccaaaccatccatcgttgtttattcagttttataattataaaaactgtaaccaaagccaataaagtaattataataaaccatttacttttcctagcaaactttaaaaaactgactcttgttggagtatctttttgatctaattgagttacaaaatcttcatagctattatagcctatatattcggcaagtttatcaagtaacccagtacttggattcataatttttccagtttttccttccatgaattgttcataatatcttgaaaaagtcactttgcttgtttggaaattgagtttcattgcaaatacattttctaaatgtgatgagactccgtttttactggttttaccgctctgttgtttcgcttttttgaacgcttgttgaaatagaatttctttcataaaagtcaatgtttagtatttatcataagtcctacatgagttcctcatgctgtcttcatcaatgtgtatacatatctgtttgattattgagtaattcgtgttgactgttttgtttcattttgtttgttcatttgcttcagagtttaaaagatgatctcacccgtaatgaggtttacggattaaactccataagaagttgaaaacttaagttgtttctaaaaagggaagtcaagacttcttcggttttcacttctacttcccaaaacaatggagagacgtctccaatttttaacgtgtggctagtatgcaatatatatctgaaaaacaacttcggacagccacactattgtcaaatttttaattaaacaaaatgaagaaaatatatttagttatacttgtggttttccacatattagggtttcaatcgtgtactccagaagtattagatgaaacagatgaaatagaagcttgttgtggtgatgaaggtgaattacctccaccacctccgccaccgccaccaggaaatggattaggagattaatgttataatttagtattttagaggaatgaaaaataatacaaattcattcctcttttttttaattattattttcttcatgggaagccaaagcttactcggacaaagaaaaaatgatagtattccttattatgtaaaaaagtctcaaaattttaataatgcttctgatttaattgaggcgaaaactttttttgaaacagaacttaatagcatagagaaagacgatccatatattctttattttaaatataaccttgctagtattgaaaaaaatatgagcaattatgaagaagcggaaaatctgctagtatctatacttgaagaaattgatttatttactgatccagaatataaagctcaatatcaaaaatcagcttttaacttattaggcaatatttacagagaacaaaaaaataaagaaaaagcaattgagttgtttaatagagctatacaaagatcaggttcagcattagacagtgctgtaatttataacaatatatctaatatttacagagaatttaatgaagttgaaaatgcaaaaaatgaactagtaaatgcatacaatctttttccaagatttaaagacactcttgaaaaggctagaatattagataacttagggtatatatatactaaactagatagtacttttttaggtttaaaactaattaaaagaggattaaggctccgtgaagaagttgggattaatactgaaatgtttgcgagttatcataagttgactaagtattatcatgatcaaggaaatgacacaatttcaaggttttatgcgaataaggtttatgaactaagtcaaaaaataaaaactccaaattttgaagaagatgcactagggttacagatggaattgcattctgatccaagagtaaggagatataaaaagctcaatgatagtctatcaaaaattaagtttaacaacaataattatgcaatatataaatatgatatttctgaactagaaagacaagtatttcaagaaaaatctaataaagaacaacaaaaaagtaaaactcttttatttgcgtttttaggtggactaatactaataatagcggttttcttaatcatacttcagcgcaatcgaaacaaacgacatacactaactcaaattcataaaacagaacgcaatctttccaaaaaagtacatgacgaattaggaaatgatattttttacctaatgaatcaaatacaaacaaatcctgcttctttgttggaaaaagaagggttacaagttttaaatggattgaatgatatttatgtcaaagcgagagatatttctaaaacatatacaactatagataccaataaagggtatcacgatgaattgctatccttgttaaattcttttggaaatgattcgactaaaattgtaacaaatgaaatcgctatagatttttggtattccgtatctaaattaaaaaaggaacaagtttacagagtgctacaagaactgcttaccaatatgaaaaaacatagtgaagcttccttagtcggtattacgtttacaaaaataaaaaagaatataattatcaagtatgtagataatggtaaaggtaccaccaaagcgaatactttattaaaaaatggtctggcaaatgtggaaaaccgcatcgccgaaatcaatggaactattacttttgagacgagtcctgaaaatggatttaaaaccgaaatacgatttattcaatagccttatgaagttcaaaaaagttttagtcgcagaagataccgatagtagtaatattggtttagtatttaagttgaaagaaataggaatagagatagttgaatcatcccaatcatgtgatggtgcaattttgaagattaagaaaggacttcattacaaacaaccttttgatttattaatcagtgatttatcttttgtaacgaatactcaaaaccctaaaattactacaggagaagtacttattgcagaagtgaaaaagttacaacaaacaataaaagttattgcattttccgttaacaatcaacaaacagtaattaatcatttaaccaatgaaataggcattgatggttatgtatgtaaggggttaaacggtacaaaagaacttctcaaagcaattgaagctgttcaagatgataaaaagtacttatgtccaatttctagtgccacgttacatcaaaaaaatgtttttcaattagatgattacgaaaaacaactacttcaattagttgcccgtggtttaaagcaagatgaaattgcagattacttcaaatcaaaaggtatcaatccaaatagcagacgttccgttgaagatcgtttaagcagacttcgcgataattttaatgcaaatactacttcacaactcatttaccttgctcaaagcttagaccttatttaatatttcaacactactttatttttttgctatcgtggatttccacaagtgattgatatttaatcgttttagatttgtatcagtataaacttaaaaagatacaatcatggcgagaaaatcaaatacaaaccgaataggtggtagttggtcagatatacaaaagttaagtatttggagaaaagcaaacagaattaacggtaaatcttctcttacatggagaaaagataaatgtggaaaagtaattaaatggtctgaatttggaaatagaaattcaacttacggttgggaaattgaccatatcgttgcagtagcaaacggaggaagtgattacctcagtaacttacaaccattacactggagaaataatacaactaaagcagataaacgttattggaggtgtccttaattaaacttatacctttaatatttattcaaacaaaaaacactaataagatcatgagaaatattctagtaataattattttattgatatgcaatttagcatttgctcaaccaccaaaagtcaaggagtctaaaatgttagactttgtttcaaaaaaaggagtgattatgaaatttgaagattttaatttacccaaaataaaatcagcttatggtaattgcgaagttaaaattaggaaaattgtatctggagagatagcaaaatactttcttcagatttcaaaaaaaggtaaatacaatacagtaacttcttctattgcttatgaagatatcattgaaatagaaaaagctttaacagctttaaaaattcaagcaaccaaagatatatctacaagagctgactacttagagaataaatttattagtgatgatgaattcctgctaggttattatgttagcaaaaacaaaattacttggtatatgaaacttgatacaggaaacgatgggactgtttttttgaaatctgatgaagtaatagcaaatgctttaaaaacgggaagagaaaaaataacattattaaaacaagaataattctgatactataattctttaaccataataaagatgaaacacttatgctatattatttatacgattatattcctagtctcttctgatcttgtttcacaaactgtgtacactacaaaatcaggaaaaaaatatcataaatcgagttgtagatatcttaaaaagtcacataaagagttaaccataaataaagcgaaaagtttaggttatataccttgtaaagtttgtaagctgactacaaaaaacacttctagcaagctgagtaaaaataaagaatctgttgaaccacccgaaaagattaaaaggaaaacaacttcacaatgtagaggaaaaaagaaatcaggtgaacgttgtcaaaatcaaactaaaaatgcagataaaagatgttacctacatcagaaata

SEQ ID NO: 2218 - DNA, 24176 bp, synthetic construct
  variation 8155..9011: note = n is a, c, g, or t
  source 1..24176: mol_type = other DNA
  misc_feature 1..24176: note = Synthetic
ttttcctatttcaaagaagaaaattacaatgattaaagctaaatattaaaaaaaacacgtcgtgaacaataactttttttatatccttacttgcactttaccgaatacgagtgtaataattcaagacgtgttttatgtaggatttaaggcaaatcctgctgtttagggcaaagcggttctttcaattggttagttagtccgctttgctacctaaacaaaaataactaaaaattatatctatgaaaaaaattgatcgtttcggttggttcgttgcgggtttttgttccgcagtaatcatcgaagtagtattttttttaatagcctattatttttatttaaagtaacagaataatttacctaaaatccctctatattatcgtaaaactaaaattattctgaaagtgaaaacctcaattgtaatgattgaggttttctgttttgttgcagttttgttgcaaactgttgcgggatttacattgattcttgttgcaagttgttgcgagtttttattggtgttgtcctaaaatgaatccacagtaaaaagtagatttatgggtaacaaaaagagaagaattcgaaagaacaaaaaaagataaatcattcttttctaatagatgtaagctttcggtaaaacccgtattgcgagatcaaaaatgattttgtattcgtgtattttaacatataagatattatgttaaaatagatcctaataaatctacatcaaatatgggatacggggtgtagaatgcttacaatagaccaccgtatgagttatattttagtataattgtttttcttatttttaattagtaatttacccccttaaattatactgcatgcaatcaaaattacatcacttatttgttttttttttctttctaaatttttcgacagtacaagctcaattaacactaaccgaacatattgttattgacgaaactaactctggaaaacccaataaagtcaaatttgctgatattgatggagacggagatttagatttgatttctactaataaaaaccctctagaattggtttggtttgaaaatttggatggtactggcaattattccgaaaaacattttgtaggggctgttggttttaattcatcggtttatcctggcgatatagataatgacggagatattgatctcgttactgcgtcaaatatttcttctcctgttaaaattcaagcttttataaatctagatggattgggtacgtttagtgcgccaattttgattcaagatatcagttcagatccttcaagagatgtttatttagctgatatagatggagataatgatttagatgtaattactgcttatggaagtggcggtatcgcatggattgaaaatctgggtaataatacattttcttcaggtttaaatcaattttctttgggtttttatggggtagataagatcgtcgctgctgatatagataatgatggtgatatggacattattggctctagagaaacagataatagaattgcttggtttgaaaattatgatggtcaagggagttttggatataacaatccgcaatacattcatactggaccaggctcgtcacaaaataaagcagatttttgtgttattgatgtagatggagatacgtataaagatctagtgattagttcttccactcaaaataaaatttcatggtataaaaatttggatggtcaaggaaatttcggcaatgaaattgtcattaattctacacttctaggaatttcatctttttattgtggagatattgataatgatggagatattgatattgctggaataagaagagtgtataacgacgtattttggattcgcaatctagatggattaggtaatttttcagatacgaacgaagttcacacacaaactttataccctaaacaacctttactggcagatcttaatatggataattcgctagatatcgtttttatatctgatgcatcaaaccagattgtatggatgaagaatcaaaacagcacaggaaattttgtaacacctacgaacctttattatagtattgacgaacctgaatatgccaacgctcatgatctggatggggataatgatttagatattttggtgtgctcgtatgatgacggaaagatttcttggtttgaaaacttggacggaactgggaatttcggagctcaaaaaatcattacttccattgctgagaatttaacatatctggctgtaggcgatttagattctgatggtgatttagacattgtttctatcactacatttactggtagtcgcgtttcttggtatgaaaatttagatggtcttggaaatttcggagaagaaaatattatttcaaccagtattgttaatggctcagctgtattagtggctgatttggataatgacaatgacttagatgtgatttctgcatctaatgatgatgataaaatcgcatggtatgaaaatttagatggcttaggaaattttggaactcagaatataattacaaattttgcaggtggggttacttctatttctttaggagattttgataatgacggtcttattgatattgcctcttgtgaagcacaagataaagatataatgtggtataagaataataacaacgctaccacttggaatgcatttggaatatatttaagtaatagtagtggtagtgcaattggcagttttattcatacagaagacatgaataatgacggctatgatgatgtcttaactgcgagtaatttgcttggtgctaatctttttgctaacaatcaaaatcaagtgtttttaggaagctatctgaattttccaattgatgaaaataatactatttgtgcaaccgatctagatagtgatggagatcaggatattttaacactagacacatatggtactttgaatgaagttgtttggtatgaaaacctaaatccttcatcactgacttttggaaacaaacaaattatatcgcaaaatttagatagaccaaaaattgtaaatagtgcagatattaatggagatggaattgatgatattattgctacttctagatttcacaaaattgtttggtatgaaaacactacaaatttatcagttaataaatttaataaagatagttttgccttatatcctaatccagcaaaaaacttattaaatatcaaaagtaaatcttctataaatgatattactgtttttgatataaatggtagagttataagttctaaaaaactttcaaactttactaaagaattccaactaaatataaaagaattgactgaaggaatttactttgtaaaaattcaaacttcttttggtactcagactcaaaaacttattaaaggctaaaaaaacacatttttttcagtactaattaaaaagctattggttctagaagcttatacttgaggttcgtgcgaaattggttcttcgtaatatttgggtgaagatcagtcagtttggtaagtgcaccatcttgaacttatatgaaatttcagattccagatggttttgttatcaaaatgccattttcttaacacttttcagtgctattatttttccagttttgtggcagtaatcgtgtagtttattggctttgtgttcaggaagtcttttaaaaacatcatgcaaccactcatacggatttacatcattaattttacgggttgcaaagaaagaatacatcatggttgcattttggtaatctttcggtaaaactcgtattgcgagatcaaaaatgattttgtattcgtgtattttacataaagatggttatgaaaatttgtaatctactgacaagaagaaacctagaactttatagttcttggatagttgtctgattttaatgtattctttgtgtttggaaggttttattaagaaaaaggtatttttttaacaatttaatctactgctggatttttccaattttgtggcagtaattcttctaatttattagctttatgctctggtaatctctcaaagacatcatgtagccacttatacggatttacatcgttgattttacaagtagcaaagaaagaatacatcatagctgcattttgtgctgctttatgagagcctgcgaagaggtaattcttgcgcccaagtgccaagggtctaattgcattttctattaggttgttattaatcagatactttccatcttgtgtgtaagcgcttagcttatcccacaagtttaaactatacgcaaaagcttttccaatggcacttttaggcagtactttaggatactcttgttgcatccaaacatgtagtttttttaaaattggctttgcatataattctctgtaacgctttatggtctgcgtgtttagagaacgctcttttatttttcgctctatggcatatagttgttggatttgctccatagcatagctggctcttgatttatcattatcaagtgctttttcaaaatagcgtctagcatgtgccatacaggctaagagttttatgggatgtttggtacttagattttggtacgctttatagccatctgtttgtaatgttccgctaaattgttgtaaaaaatcttttggaactttagcagacctactagaatcatacttaaataataccaacccatctacaggtgcatggaatacccaatgatatcctgtatgcaaacttccttttttatgattgtcttgaactttaatgggactttcatctgcttgcagatactgactctgtagtattaatttttgaagcacttcatatagaactcccaactgtattactcctttagaaaaccagcctgtcatcgaagacattgctacaacaacgccttctcgttttaaaatttgtatttgtcgataaaaaggagtgtgatccacgaacttactgacacaaatatgggctaataatccagctccaacattggattttggtaaaatcagacttggaagtgcggcaatagcaattcctgcttggtttggtaacgcatattttggacgaataattctacgaacatatacttttgatggcttgtattctaatatttctgtaatttcttcgcctattttaatactaccatctacaatattttttggttcaataatttcttcaactcttggtaaatgcgaagctaatggtaagcgtactgggtgttttttagtttttgatcgatgataactaatctgtgtttgttcagactcattagtaactttagacgcttctgtgaataatcctaattgaagtgcatctgtgttaggaacaaaccgttcacttttactaccaaagataagccgctttaactctgctaactctcgctttaactgttcatattgcgagcgtttcacataaagatattctgtagaagattccttggttattggcatacttaaaaataagtatttatcttctaactaacaatattttttacacattatatcgctaattcatatcgttttttacggtctatatttgtaatggcgataccatctattaacaacaccaattgggaataactcaaagacaggctttgcacattagcatcatacacaggaagatcaaaacgaccagactctaagcgtttgtaatacaagacaaaacttccgttttgccattgcaatagcttcactttattacgatacctgtttacgaaaatataaacagtaccatttacaggggaactcgctaactcctgtttaatcaatccgcataagccgtcaaaacttttacgcatatctgcgggttgactatacaactcaaaacgatgggaaatgcctagtccaaacatgaaagtatatttattaagtttcgtaattcattagtagcgatagccgaattcaaacgaagagaaaccccattgggatactgaatctcaataggcgaagaaatagaggattctgaaatgacctctaaagagataaaattggatgctttagataaagaatcttccttttttgaagtagcaatagattgatctagcttgtattttgcaagccaatatctataagcaccataattcatctcatgtcttttacaatagctgtagggcttctctccacttgaaagacaagcggtaataaaagcatacatttcttgtttttttaattccttctcaatcatgcaacaaacttaaaaaccttttctgaaatatgaaatacgcagtttgccgaatgcttactaatagatgcggcaaccatgaaaataatctacctagaaatagtgagagcaaccaagagttggaaaaaaccaataaaacaaaggggaatgattatcaatcaattcttgattctttataaagatagaatgcagatgtaggaagaagtagaaagttaagattaagtttggacgaggctattctaatataaaagacttcgtcttaaattcttaattttcctaagtgtcattttatcgacataatgtgcattttatcgatattcacttttgaattaacacttttcattgtaaaaattttttgaagtaatgttactttgttagtaaaagattaaaattatgaaaactatactaccattactcttttttcttattagtctgtattcttttgctcaaactggaccaggaggagtgggaactaatgatggaacttcgagccttgttagttggtatcgtcctgataatggaatttcagtaacaggatctttaattgatagttggacaaattctgcggggatttctgctttagacataagtgaaacaggaacacaaagacctactttaattacaaacgcagttaatgggtatgacgaggttagttttaatggaagtaatagattaaggactgggttaacgttaacaacatctaactttgtaacgaatcaagcatcttcatttatagttaccaaagcagataatacaactcaaacgtcatctgtttatactacagatcctttagtcggtagtactcgtttttctaatcatattccgtgggcaggaactgtttattatgatatagggacatgctgtggtagttcagcaagaatacaagttggtagtttaacaggattaacctcatattccatttggtcttacgatgcacatccaagctcaggaaaacaattgtatagaaatgaaagccttttacaaagtagagcgaatacttctacctatagttctcatgcttctcaacgctttaatttaggagcaaatacttcaggttcaaatggatttgctggtgatgttacggaattaattatttttagaactaaagtaaatactgctcaacgattaattattgataattatttagctgccaaatatggagaaacattatctgtaaatgatttatacacccaagacgattctggaaatggaaatttcgatcacgatgtagcaggaattggtcaggcaatggatggaacaaaccatacagattcacgaggaacaggaattgtacggatgaatacaccttccgcgctatctaatggagattttctattttggggagaagaaactaaagatcctacctatgttttttcaaatgaccctataaattacacagagcaattaagctcaaaatggcgtgtaagtaaagtaaatgatttaggaacggttactgttgcctttgatattacgggaatggatttatcaggaaaacaaagttgtcaaccattacaattggttgttgataatgatagtgattttagttctcctgttgtatatgatttaacaatagttggaacaacagcaatagcaacaggagtttcgtttacagatggagattattttacacttcgttacttagatcagatcgtttggaatggaacttcttttttcaatggctcaggaacagccaatgcgcctgataacacagatgaatgtttgaaatttacagtaaaatcaggagctacaggtacactaacattcgatgcacatgtaagagaagtagaagtagaaagtggaggaactattaccgtttctgatgatatattattagaagtagaaaatcaaatagaagttaatggaactattgatcttttaggagaagctcaattaattcaaaaccatacaagtacaacttctaattcaggaacaggagaattaagaatacgtcagcaaggaactgtaaatctttataattataattattggagtgctcctgtaaacagaagtggaaactggcaaataggtatttagaagatgctaatggagttgtaactttacttcagcttttgatgcaaacccannnnnnnnnnnnnnnnnnnnnnnnnnnnnnnnnnnnnnnnnnnnnnnnnnnnnnnnnnnnnnnnnnnnnnnnnnnnnnnnnnnnnnnnnnnnnnnnnnnnnnnnnnnnnnnnnnnnnnnnnnnnnnnnnnnnnnnnnnnnnnnnnnnnnnnnnnnnnnnnnnnnnnnnnnnnnnnnnnnnnnnnnnnnnnnnnnnnnnnnnnnnnnnnnnnnnnnnnnnnnnnnnnnnnnnnnnnnnnnnnnnnnnnnnnnnnnnnnnnnnnnnnnnnnnnnnnnnnnnnnnnnnnnnnnnnnnnnnnnnnnnnnnnnnnnnnnnnnnnnnnnnnnnnnnnnnnnnnnnnnnnnnnnnnnnnnnnnnnnnnnnnnnnnnnnnnnnnnnnnnnnnnnnnnnnnnnnnnnnnnnnnnnnnnnnnnnnnnnnnnnnnnnnnnnnnnnnnnnnnnnnnnnnnnnnnnnnnnnnnnnnnnnnnnnnnnnnnnnnnnnnnnnnnnnnnnnnnnnnnnnnnnnnnnnnnnnnnnnnnnnnnnnnnnnnnnnnnnnnnnnnnnnnnnnnnnnnnnnnnnnnnnnnnnnnnnnnnnnnnnnnnnnnnnnnnnnnnnnnnnnnnnnnnnnnnnnnnnnnnnnnnnnnnnnnnnnnnnnnnnnnnnnnnnnnnnnnnnnnnnnnnnnnnnnnnnnnnnnnnnnnnnnnnnnnnnnnnnnnnnnnnnnnnnnnnnnnnnnnnnnnnnnnnnnnnnnnnnnnnnnnnnnnnnnnnnnnnnnnnnnnnnnnnnnnnnnnnnnnnnnnnnnnnnnnnnnnnnnnnnnnnnnnnnnnnnnnnnnnnnnnnnnnnnnnnnnnnnnnnnnnnnnnnnnnnnnnnnaaagacattcataatgatatatactacaatttgtcaaactcagatgctacaatttggttagatgctgtagtagaagctacaagatttagtattgtctttcaggaatcaacaacactaggaataaacgaagtgtttttaagtgatgttcatttaatttatgacgacactacaaacatactaaccatcaaaaatcttgaagtaaatgaaatagaaaagctgtccatctataatttaattgggcaagaagtctttaaaaaaacaaaaaatgatgctcgtttaacagtaaacattagtgagttgaaaaatggagtttatgttctaaaaatcgaaactgatagaggtattaaaaactttaaattcatcaagtactaaatatttgatgaattagtcttgggcaatatttagagaggtaattttaactaaagacctctcttttttattaagctaatttcataccttaaaatatctctaagaaagattctacacttacacagtttatgcgacactactggattcttgttgcaaactgttgctgatttcatggttgcttttatgaactatttaaaagtcaagggtaaagaaaaaagcgacatcgatgatgccgctttaaatgttttcacaacggaataatccttattgtgaaatgctttcattttgtattggcaatatacataaaaaaaagtttaaaaaagtatggttttccgtaaggatagtaataacttttacttcatttttataaaataattcttcatgttcagtgaagtagaatcgagaaaaaaattaaagcatttcacaaaatacacttcattcaaatcaatgatgtgtataaaatagccaaacaaacttatttgccagaaattcgctttggacacgaaattcgaaacctcatgcattaggttcttaactattttcaacaaatatatataaattatatatgaagtgtatgagttttttaaattatttttttaaattgttaaaaattatattacatgaaaaaaattctagggttagatttaggaacgaattccattggttgggcgttggtaaacgaagcagaacatgaacatgagcaatcaagtattgtaaaattgggtgttcgagttaatcctttgtcagttgatgaaaaaacaaattttgaaaaaggaaggccattatctataaatgctgatagaacaagtaaaagaagtgcccgtagaaatttacagcgttttaaactcagaagaaaaaatcttataaatttattattgaaacatcatatcatcagtaatgaaacaatattaaccgaagttggtaagaacacaacacaccaaacattaaaattgcgttcaaaagctactcaagaaaaaatatcactagaagaatttgctcgtatactattatctattaataaaaaaagaggctataaaagtagtagaaaagaaaaaaatgaagatgaaggctttacgattgacggaatggctattgcgaaggaattatatgacaatcaattaacacctggacaatatgtatataatatccttcaagatggtaaaaattacattccagacttttatcgatcggatttgcaagcagaatttgatgatgtttggcaatttcaaaagaagttttattcttcaatcttaacggatgagttctacttaaagttaaaaggacaaggaaaagagaatactcgcaaactgtttttagcaattcatcaagtatataccgcagaaaataaaggaaaacgggatgccgtaaaattacaatattataaatggagaagtgaagctgtaaaaaagcagctctctattgaagaagtagcgtatgtattggttgaaattaataacaatatcaacaagtcaagtggatatttaggagcaattagcgatcgtagtaaagccttgtattttaataatgaaacggttggagaatatttatatggtcagttagtaaaaaatcggcataattcactaagaaatcaggtgttttatcgtcaggattatttggatgaatttgaaaaaatttgggaaacacaagctaaattttacgatgaacttaccaacgaattaaagcaagaaattcgagatgttgtgatattttatcaacgtaaattaaaatcacaaaaacacttaatttctgactgtctatttgaaaaacatcacaaagcaattccaaagtcttctccgttatttcaagaattcaaaatatggcaaaaccttaattatttagaatttgtacacacgcaaagcaaagaaaaaatcttttttagtgaattggatgatgaaacaaggcagtttgtttttgcagaattgaatataagaggtacgttaaaaataaaagaaattaaaaaactaattggtctagaaacgccagtatattggaagtctaattttgatgaaattgaaggaaatcgaaccaatcaagtgttgtataatgtataccaaaacattgcagatgatttaggttatggttttgattggtctaaaaaacatgcctttgaaattaatgcggaattacaagcaatttttaaagatgttggtattgatactgctattctaaattttgacgcatcaattgaagaaaatgatttcgataaacaaaaaagctatcaattatggcatttattatactcggcagaagatactgacaaggcaactgaagaagataaattgatatatggaaatatcaatacaaaactaaaaaaacagcttcatcagaaatatggctttgaagccaagtatggtaatttattagctaacatttctctacaacaagattatggaaatcttagtgcgaaagctattaaaaaaatacttccatacttggaaagtggaaatagcttttatgaagcgtgtactattgtaggttataatccttctaattctttgaccaaagagcaacaacaaaacagaaaattgaaagataaattagaactattacctaaaaatagtttacgtaatcctgtagtcgaaaagattttaaatcagaaagtaaatttaattaatcaattgattgatgaatatggcaaacctgatgaggttcgtatagaattggcacgcgaactcaaaaaatcagctaaacaacgtgcagacttatcaaaacatatcaatgatgctacattaaaaaatcaaaacattcggaaaactctccaaaaagattttgggatacaaaatccttctaaaaatgatgtaattcgttataaactatatgacgaactaaaagataatggatacaaaactttgttcacaaataaatatatacctaaagagcaattgttctctaaagatgttgatatagaacatattatacctaaagcaattttatttgacgattctttttctaacaaaactttagcttacagaaatgtaaatttagctaaagcagacgctaccgcttttgactttatctctagtaaacacttggatgatttagataattacaaagcaagagtagaaacattatttcaatcaaagcgaattagtaaagggaaatacaaaaagttactgatgacacggcaaaatttgcctgaagatttcattgaaagagatttaagaaatagtcaatatattgctaaaaaagcaacagcaatgctcaaagaagtatttcgatcagtcgttcctacaagcggaagaatcactgacaaacttcgtgaagactgggacttagttaatgtaatgaaggaattgaatttgcctaaatatagaactctaggattgaccgaattcattgaacgtaaaaatggaaataaaatagagcaaatcattgattggacaaagcgaaacgatcatcgtcatcacgcaatggatgctttaacagtggcttttactacgcataatcacatacaatacttaaataatttgaatgtaactcatggattgaatggagttgataccgatcatgagaaaagcagactatatgctataaaacaagccattactaaagtatatatagtaggaaaaactaagaagcgaaaatttattcctccaatggagaacttcagaagtcatgctaaaaatcatttggaaggaatattaatctctttcaaaaacaaaaataaagtagtaacaaaaaataaaaacagaaccaagacaaaaacgaaaggagtatttaatgaaaaaattcagttgacgccaagaggtcagttacacaaagagactatttatggtcacgcaaagaaagtaattgtgactaaagaaaaagtgtcaagtaagtttacacacgaaaaaatactacaagtaactaaaccagcttatcgagaagctttattaaaaagattagctagttttaaaaacgatccaaaaaaagctttttcaggaaaaaatgcgttgagtaaaaatcctctatattttgatataacaagtggaaaaaaagttcccgacacagttaaattaagttattttgaaaactcatatgtaatacgaaaagaagtaaattctgataattttaagaatgaaaaaagtttacaaaaagttttagatgtaggtattagacgtatactagaaaaaagacttgctgactataatggaaatgctaaagaagccttttcaaacttggaaaaaaatcctatttggaaagataaagaaaaaggagtttgtataaaaaaagttcgcattgaagctctcaaaaatgcagaaccattacatgttaaaaaagatcatttaggaaaaataattttagatgatgaaaataaaagtactccagttgactttataagcacaggaaacaatcatcatgttgctatctatgaagataaagacggaaaactgcacgacaaagtagtgtcattttatgaagttgtttcacgagttaatttaggtttaccaataattgacaaatcatttaattcacatttggattggaaatttttattttcaatgaagcaaaatgaaatgtttgtatttccgtcggaagattttaacccgaaagagattgatataggaaatccaaaaaacaatgagcttatttctaaatacttattcagagttcaaaagttttcaaaagtaacttatggtaactctgctgttagagattatgtttttagacatcatttagagactgaattaatagataaaaaagaattaaaaggaataacttattatcaattaaaaagcataggaatgctcgaaaaattggtaaaagtaagaatcaatcacatcggaaaaattgtacacataggagaatattaaaaaagttaagttatgataaagcgtaccatttacattggttcccccgcttatttaaaactcaaacaaaaacaattagtagtagaaaatcctgaagacaaaagcatcaaaggcacggttcctattgaggatatggcattactgatgctcgaccattatcaaattacactaagtaaccaattagtaataaaacttcaaggaaataatgttgccatcataagttgtgatgcgcatcatttgccatttggcgtaatgcttcctttacatggacatacagaacactcagatcgtgtaaaatatcaattaaaagcttctgaaccgttaaaaaagcaattatggaagcaaacagtggaacaaaaaataaaaaatcaacagacacttttaagattgaatgagaagccatacgaacaaatggatttgtattggcaaaatgtaaaaagtggagatacgaccaattgtgaagggaaagcagcacaacaccattggaagcatctatttgaaaactttactagagagcgttttgggcattcacctaacaatatgctaaattttggatatgctgtattgcgaagcattgtagcgagagcgttggtgtcaagcggattgttacctgtattgggaatttttcatcgtaacaaatacaatccgtattgcttggcagatgatataatggagccgtacagaccttttgtagataaaatggtatacaactatgtcacacagtatggagttcccgaaaaactttcaaaagattgcaaagcgtatttattaaatatagctactcaagatgtatggattgatggtttagaaagaccactgatggtagcagtaaccacgacgacagctagtttatacaaatgttactacggagaattacggcaaataaaatatcctgaacttgattaataacttatgatatgttacttgaagcaaatcgttacaacgcatacagaattatgtgggtattagtattttttgatttaccaacagaaaccaaaaaagagcgacgagctgcatctcaatttcgtaaaaaattgatcgatgacggttttaccatgtttcaattctctatatatcttcgtcattgtcctagtagagaaaacgctaaagttcatacaaaacgagtcaagcagatgctacccaaacaggggaaagtctgtatcttagaaataaccgacaaacaatttgaaaaaatggagttatttcatggtgtaaaagaagttgacatcccacaacccgtgcaacaattagagctattttaggattaaaaaaatcaattagtttttaatgtattcataacaaaaaaggttttttttaaattctaaaaagtaatcccgaagtattggtattactcaataattcgggattgaccttgtgattgctcacgtaaaattacaaaatgaaagcagttcacaacaataatcacttcacaggctgaatggtttttcttgtgattgctcacgtaaaattacaaaatgaaagcagttcacaaccagacgaagaattggaacttctaaataattcttgtgattgctcacgtaaaattacaaaatgaaagcagttcacaactatttttattcctttcgataaaagaaataccttgtgattgctcacgtaaaattacaaaatgaaagcagttcacaacacttaggtagcatcaatatggattatctatcttgtgattgctcacgtaaaattacaaaatgaaagcagttcacaaccaataccaatttccaaacgagaattacaaccttgtgattgctcacgtaaaattacaaaatgaaagcagttcacaactgctcagattggaatcatgtcgatttatcacttgtgattgctcacgtaaaattacaaaatgaaagcagttcacaacaaataaacatgaagtgatttgtgattttgtcttgtgattgctcacgtaaaattacaaaatgaaagcagttcacaacatggagttggataacgagattaaatcggcacttgtgattgctcacgtaaaattacaaaatgaaagcagttcacaacaaaagggatttaataaaaatagctagtgaacttgtgattgctcacgtaaaattacaaaatgaaagcagttcacaacagaaattaaaataatcaattaaaggtctttcttgtgattgctcacgtaaaattacaaaatgaaagcagttcacaaccctcctagtgttactttattcattttctttcttgtgattgctcacgtaaaattacaaaatgaaagcagttcacaactcctgagtactaaccttactataataatttcttgtgattgctcacgtaaaattacaaaatgaaagcagttcacaactcttactgccagttttgcaatagcgttatccttgtgattgctcacgtaaaattacaaaatgaaagcagttcacaacgacggatacaatcgtatttcgtaaggtttccttgtgattgctcacgtaaaattacaaaatacttactcatacaaatcaaattccttattagtttcaatctctataaatctaggaacttcactcacaaagtaattcggaatgcctttgttggtctctatgtaagtataaatttgtggtaatgtgatttcgtcttttatatattgcttaattttatcacgcaccttttcttcattggttttctgttttcttcttgcacctgcttttgttgctctttgttgctttcttgttgctcgtaaatctttatatttttgatactgtttgagccattgaagcgtatacgcaaatccgccttcacttgctttttttcgtgttgggtcaaaataaatacatggatagtgaatacgatatacttttttactgttaaagaaacgttttgcacgatttattcggtagactaaaaagccaaacatgtacaataaggtttcttttcttggaatgcttccgtttggattacgcaagtattcatcatcaatatgaatatatgcattatgccaacttccataatacacattcatgtctttccaaataggtgctgccattttcaaaaatagttgtaacagtaattctctatattcttctcttgacatagctcctttgatcgcttctacttccaagcgtttattcatattggaagctgaaaagctgtaagtatcgtaatgatttgctgttaatgcttgaaacaattcacttctatactgtatttgactccgtaagtactcggataagcagtttttggggaaaatttcgccgcctagtttgcctgcgttttcattggaaaattttatgcgatcatcctttttggggatcttgtgagggttcttgtttttgctactattttcagtagcaaatgaaaatacttccgaattttgggaatggttatcaacattccctactttctttattatttctttagtaaatgttcttgtatcttcacttttatcacgaacttttttcgttaaaaaatccgtaacagtttgattgtcatctgaagtcaaagatttatcatgcatttgaaaaatggcttcattgataaagaaatgaacaggttttttagttccgtgaaaactgtaatcggtaataattcctgcatcacgtaaacgatatatatgattttggactgtacgagaagaatataaaattctacgttctccgtcattggttaaatgtgcaatcgctgtagcggtaattttgacttttggaaagctaactgcaagattggtatctaatgctgttaaatgctttctaagttcacttaactgatttccatataaccataagataacttcaaaagtacgctcatgcatggcttttattttagaatactttcttttaggaagtaataacatatttccgttagtagatgctactaaggaattataatctttaatagaaagccatttcacttttgaattctgttgctgtctattctcaaaattaaattgagcagtaacggcttgttgttttaaattataggttgcaataaattcttgaacgcttttgttgtaaacagaaacttctttgttcagttcttttactgagtcattataagaattcacaaagcttctataacgtttcaacatctgtaaacgatcttcacttaatatataaggacgtaatgttttctttggaattcgatctttaatgataatgaagctactaccattttgaactgttgctgtactattatgagcatgcttcattattaatatcttatgaagcgattaataatgaagcatgctcatttacaaacaggctaatttctcttaaatcttcgatcaaaaagttcgagctttgaaagttcggggtcacaagacaaagccttactagaaatagtaaggctttcttgtttttataagctttatatattaaacggggaactttacttttattttttttaagcataaattatgaatactaccaatgtgcgaatgctttttagaaatttctgaagaatatgttccgtcttctacttgttttccaattttcttgtaggcttctctaaaggaaacaccattcattaccaaattattaatactatctacggtagtaagatacttgtacttttcatcagtaaagtcaatttccttaagttgtacttgcttgatggaatgatttaagatttctaaaacattttttaggtcttcaaaagcagtaatcatatgttcttttaagagctgaaaatctctatgataaccacttggcaagttatttgtaatgagtaatacctctgtatataatgcctgaattttgttgcattttccgcgaattaattcaaaaacatcaggattttttttatgtggcataatgctacttccagttgtcaatgcatcagggaaagcaatgaaatcaaaattttgactcatatacaggcaaacatccatagcaaatcgagctaaagtatttgctaaacttcctaaagccattgccacagttcgttcactttttcctctgctcatttgtgcggcaacaacattatattttaaagtgtgaaaacccaatacttctgtggtaaaatttcgatcaatcggaaatgaacttccataacctgccgctgaacctaacggattttggtctacagttttcaaagctgcatctaacaaatatacatcatcaattaataattctgcatacgcagaaaaccacaatccaaatgaagaaggcatagcaacttgtaaatgtgtgtaacctggcaagagagcttctttatatgcgtctgccaattgtagcaaagtatcaaataatgtgtgggttttatttttaatactatttaaattgtctttgtaaaacaaatgtaacgccaccaaaacctgatcatttctagaacgtgccgtatgaatcttttttccaacatcgccgtatttttgaatcagctcatattcaatcttagaatgtacatcttcaaaatgtgaatcgattacaaaagttccatcgtttatttgtgcaagtaaaacctccaacccttcaagaagttgttgtaattcttctgatgaaataatttcaatcttttctaacattttggcatgtgctattgaagccaatatatcatatttggcaatgtatatatcaatctctctgtcgtttcccaccgtaaatgcttctatcgttttatcgatatcaattcctttatcccaaagtttcatatttttttgattttaatagttggtattgaatattgagaaatgttcttttgaaaaatctcaatattaatagctcacagctcaacactacttttatacaatttctttcaatattttaatatatagctcaatgccttcctcaatttccttcaaataaataaattcatctgcagtgtgcgatcgcgtactatcgcctggacctaattttaaagacggacaagttaatacagcttgatctgacagcgtaggagaaccatatgtttctctgcctaattttattcctgcttgcaccaacggatgtttctctggaatggaagaagaattcaatcgtaaacttctcggaataatttcagaacaaggcgattttttcttcaatatatccacaacttcttgatttgtatacgcatcatttacacgaacatctacaaccaattttacatttgcaggaactgcattgtgttgttttcctgcattaatttgcgttatggtcatttttacatcgcccaaaaccgaagaagatttctcaaaagtgaattcttgaaaccatttcaaaacgtctatggtattataaatggcattatctgtatttggatgtgcagcgtgacttggtgttccttttacaacagcatcaaaaacaaccaaccctttttcagcaattgcaaactgcatcaatgtaggttcgccaacaattgctacatcaattttaggaatgatagataacatactatttaaaccattttctccactactttcttcttctgcggaagcgacaatcacaagattgtattgcaaatccgatttcgcataaaaataagtgaatgtagcgataagagaaaccaaacagccgccagcatcattacttcccaaaccatagagttttccgttttcaacaatggctttaaacggattttttgtgtatccattgtttggttttacggtgtcgtgatgtgaatttaatagcaacgttggtttgttttcgtcaaaatgtaaattagttgcccaaatattattattctttcttttaaaaggaatttcatgctgttgaaaccaattttcaatatgcttcgccgtaccttcttcttcagaagaaaaagaaggtgtttcgataagcttttttagcaatacaattgcctcgtttgttagtgttatagagttcatttttgaattgttgtgtgttttgtatttgtatgtaaaagcattgccgattttccaatgtggacttttttaacttgatgcgctattgcatgaaaacaattggtgagtttagggagcattccttcagaaatattattgccttcaagtaaggtttgataggttttagaatcaattatttcaatcacagaattatccttattgacatcttctaagacaccatttttttcaaaacaataatacaattctgttgcataggcattcgcgaaagcaatcgccaactcagaagctactgtatctgcattggtatttaataattgaccatttttatcatgtgtaatcgcgcaaaaaacaggtgtgattccgtgatttaaaagtagttttagagttttaatgtgtactttttgaatatcgcctacaaaaccatagtcaatcgtttctacaggacgttttatagctgtaatactattgccatctgcgccagaaaatccaatagcattggtgtttctagcttgcaattttgcgacaattgttttattaatttttcctgcatataccattgtaataatatctaatgtttcagcatttgtaatgcgtcttccattcattatttgtacttcaatattcatttgttgtgtaagagttgatgcagactttccgccaccatgtactaaaattttaggtgtatttaatttagaaaaatcatccaagaaagcattcaaagcagtttcatcattaataatatgtccgccaatttttacaatttttaatcgttccataattacaagttttccaagatttttttcaatacaatttgtgcagaaaatactctgttagctgattgttgaatgacaacagaattttcaccatctaacacagcatcttctacaataatatttcttctcacaggcaagcaatgcataaattttgctgtctttagtttttcctttgtaagcatccaatcggagtcttgatgcaatacttttccatacgattcataactgctccagttttttgcgtatacgaaatcagcatcttttaaggcttctttctgattgtaataaataggagtgttcttagtaatttttgaattgagttcataaccttttggatgtgtgatactaaaattggtttctaacgactgcatcattttcacaaacgaatttgcaactgcttgtggcaaggcttttgggtgcggcgcccaagataaaactactttgggtttttggattattttcaactcttcaatagtaatagcatctgctaaggcttgtaacggatgcattgtggcgctttccatgtttataattggaactgttgcgtactttagaaagctatttaaaatccattcggaagtatctttttctttatcggttaaacttggaaaagctctaacagcaataatatctgcatattgcgaaatcacttgtgcagcttcaattacatgttctgatttgtttaaattcatgacagtgccttcttcaaattctaaattccaagtgtcgtttacatttaaaatcatcacattcattcctagattttttgccgctttttctgtacttaatcgcgttcgtaaacttgcattaaaaaaaagcattaacaatgttttatcgactcctaaatttttgtgtgagaatggattttctttcaactgaatggcttcctgaatagtttcgggaatgtttgccacatcgtgaatgtttgtatatttattcatgtatttccttttttaatgcttcaaaaagttgcttaatgtgttgtttcgtaatcgtcaacggaggaagtattctcaatacatttggattggcggcacttcctgtaaaaatatgatgtttatagattagttttttgcgtaattctgccacaggaaagtcaaattctaatcctaacatcagacctcttcctttggtatttttaagtttgggtagtttttttgcttccgctagaaagtactcagaaattttagtcacatgctgcattaattgttccttttctataatatttagcactgccaaagaagcactacatgctaagtgatttcctccaaatgtagttcctaacaaaccataagaagctttaatttttgggtggattaaaataccaccaataggaaaaccatttcccataccttttgccattgagatgatatctggcgtaatgagatgtttttgaaatgaaaagaaatcgcccgttcgtccaaaaccagcttgaacttcatctgcaatcaataaagagttgtatttcttacaaagaatttccaatccttgataaaataaggtagtactttcgtccaaaccgccaacaccttgaatacattctataattacggcgcaagtgttgccttgtttcaggatattctctgcggcttctaaatcgcctaattcaataaaatttactttttgctgtgcgtttattggtgctataattttagcattatctgttgcagcaacagctgctgaggttcttccgtggaaactatttttaaaggctaaaacaccttttttctgtgtatgaaaagaagctagttttagagcattttcgtttgcttctgctccagaattacatagaaataattcatagtttttacaattagaaagttgtattagtttttgggctaacttttcttgtaacggattttgaacagaattgctataaaagcctattttttgcagttgattcgtaatagaagaaatgtatgttggatgtgaatgtccaatagaaattaccgcatgaccaccatacaaatcaagatatttagtgttgtttttatcatacacaaaaacatcttttgcgaaaataggagtgatgtcaaataagggatatacgttaaataaactcatgatttttgttgttaaaaaaagttggctttcagttgtaatccttctgtttcttcaaagtcaaaaagtaaattcatattctgaattgcctgaccagaagcaccttttaaaagattgtcaatggtacttgtgattaataatttattttcgtgtttgtgaagatgtactaagcatttattggtgtttaccacttgttttaaatgtacttgctttgaactaacatgcgtaaatacagcatctttatagaaattggtatatagtttttgggctttttccaagcttccttcaaatttggtgtacgctgtggcgaaaatacctctgctaaaattacctctatttggcatgaaattaattgcagcatcaaaaccagtttgtaattgttgtatggtttgatggatttctcctaaatgtt

SEQ ID NO: 2219 - DNA, 24176 bp, synthetic construct
  source 1..24176: mol_type = other DNA
  misc_feature 1..24176: note = Synthetic
atggacagcagagttattatttagttttttctcagcaatatttaatcatcaaaaatctctattttccttggtattttaaggcatacagaatacaagatattcaagaagttatttttgaacggggcgcgcccaacaatgtaaacaaccaaatcggaatagttttaaaagattttagctatacgcatttttatacttactacaaccgaaaaagtttcgaaaaaattagaactgaactcgcacaacgcaacattacactgcgaggtgaaatttatgaaaaaacttaatctttttcacaaaacatattaaataattcctatatttggtatacaaaatttaattaaatatgagaacaaaattatttcgtagttttgcattgctattattgataatcagcggattgtcacaagcacagcaaaaaaatcaaattcgattttcgtataattttaatattgtagatttatctcaatttccacctgtgtctggtggatcatcttactcagttaagccaaaaacaaatgtagaaattcaatatttaagaaaaattgcaaataatttccatatagctacaggcgttaattatattggaaatgaaatggttacagagtacgatgagattccaggtattaccgagccgtccccgaacaagacagaaaattttcatcttttaagcattccagtctttgttcattataattttttaaactatttctttgtgagtggcggacctttatttgatgttcaactcaataaaacaaaaaaagctaataaacaatcaggcatagggcttggcgcttcggcgggattagaatatccatattcgaattttattttcagtttaagtccagcacttaaattccataatttaacgaaagacgaaggcttattggatttttctattcaagcgggcgtaggctataaattttaaaaaaacttaataatatttcttatctttaaggcggatttatgcgagatataaatccgctctttttgcaatttataatctttagaaatggaaaatattagtgtttttgatatgctcaaaatcggtgtgggaccatcaagttcgcacactctgggaccatggcgcgcggctcagcaattcttggaagaattaaaaaatcgcaacatttttgatttagtcaatgggattcaaatcgatttgtatggctcgctttcgcttacgggcaaaggccacgctacagatttggcaattcttttgggcttgagcggcaccgaccccgtgacgattcctgtggaaagcattgatagcatcattgggcatattcgcacgcatcataacttgcttttagacaatcaaaaaacgatatatttcgattttgaacagattaaattcaacaaggagtttttaccctatcatgccaacgggatgaagattaccgcttttcttgataatggcgaaaattacgattctaccttctactctatcggcggtggattcatcaccaaagaagaaaccgaagaaatggtggatttatctgacaaccaatcttttccataccctacttataaggctaaagatttactaaactattgtaatgagctcaatatgaacatttctgatgtcgtgttgcaaaacgaattaagtgtgcgcaccgaagaagaaatcaatcaccaattaaaagccatttggaaagtgatgcttgagtcgatttatgttggctgccacaccgaaggtttcctgcctggcggacttatggtgcgccgcagagcttatgatatgtaccaaaaattaaaagatccgagatttccttatacccaccccaataattggctcaaaagcatccgaaaaacgcgcatgttttatcgagaaatttttaaatgggtttccacttttgccattgctgtaaacgaagtaaacgcttcgcttgggcgtgtggttacggctcctaccaatggttctgcaggggtaatccctgccgtattgatgttttatttaagcgtagaaaaccacaaagctggctttgaagaaattaaacgatttttgctcactgcgggcgtgattggtagcatttttaaacgcaacgcaacgatttcggccgctatgggtggatgccaagcagaaatcggcgtatcgtcggccatggctgcaggggctctctgcgaattgcgtggtggaacgcctgctcaatgtatgaatgctgcagaaatcgccatggaacatcatttaggacttacttgcgacccgattgaaggtttagtgcaaattccttgtattgagcgaaattctatgggcgccatcaaagccatcaatgcatcggaattggcactcgatgccgagcacccaaaagtgtcgctagaccatgtgattcacaccatgtggcaaacggctaaagacatgaattccaaatacaaagaaacctctgagggcggattagccgtaagtgtaaaattggtagattgctaaattattaaaggaatgaattggaaaaaaatgtgtttttcatttattttttgattggatttttgtgctttgcacaaatagatgaaaattggaaaattcaagctgattcttacgaaaattatcacggtgtggcacttgccaatggttttctaggcatgcaaagtagcgaaaaacctttcaaagtagagcatattgtgctgaataatgtatttgacgaagacccgaatttgcatgtaagccaaatcgttaaaggcatgaattttatagatttagacctttggattgacggagaattaatttcgcttgagaatatttccaactggcgacaaactttagatttaaaacaagccaaactcacaacttcctttaattataaaaataaggctaaaatcagttatgatatttttgcccttcgttcgtataaaaattcggcaatgataaatgtgaaaatttcagcatttaaaccaattgaaattaaagtacaaggaaacatcataagccctgaaaactacacgattaaacaacaaaaattcattcagcatagagatttagaaactaatctttatttattaaattcagttgcagaaagtcctacaaaaaagacaactttggccaccacttgttcgtttttgtggaaaaatattgcttttaccgaagcacataaaattccaaaattgaaacaaaaagtcgatggctcaaaaaatagcttgagctttagccaaaaattaaaaaaaggagaaaattatgaattttcatggctaggagtacaatgtagcaaccaagagagcgaatatccaagcacaaaatctgagcgaatttgtatttataatattttacaaggttacgaccaattgtgggcgcaacatcaaaaattatgggaagatttatggcaatcggacattgtgattgaaggggatgctgtagcacaaaaagatgttcgtttagcattatttcaattgtactcgtcggtgcgagcaggagaagctttaagcattccaccgttgggaatttcacaacaatcgccttataatgggcatatattttgggatgccgaactctggatgtacccgcctattttacttttaaacaaagatttagctcactcaatgcttgcctaccgaaaaaaacatttagctcaagccattgccaaagcaaaaacttataattaccatggtgctatgttcccatgggaaagcgataacaaaggcgaagaatctacgcctacttttgcactcacaggaccatttgaacaccatatcacgggtgatgtgggtgtagctttttggcaatattatttattgactcaggataaaaattggcttaaaaacaatttttcggtgttggaaaatgtggcagatttttgggtgagccgagcaacgcaaaatccggatggatcttattctattttaaattgcatcggcgcgaatgaatttgcacacaatgtagacgacaatgcgtttaccaatgccgtagcgttaaaatcactacaatacgccacccaatcggcaaaaattctaggcaaagaagcgcccaagacttggcaaaaaattgcaaatggactcgttttccatcagtttgaaaatggaataactaaagaacacaagaactacgggggagagatcatcaaacaagtagatgtgaatttattggcgtatccgcttggcgtaatccaagataaaaatcaaattttgaaggatttaaaatattatgaatctaaaatttcgcctgatggtcctgcgatgagccatgcaattttgtctatcctttatgctaaattaggcaacaaaaaagaagctgaacgactttttcacgaaagttacgccccctacaaaagaccaccttttggtgcccttgccgaaacacgaaactccaacaccacttattttaccacagccgcaggcggattgctccaagcagtgctttttggatttggcggtttagaatttactcccgaaggaattcaacaaaaaaatccaatactcccccaaaattggaaatcattggaaattaaaaatgtaggcaaaaaaggcaaaaattacaaaatcatcgctcattaagatatggcttaatcaattttgcccaatgcacataggctttgcccaaaagatgcaaaccatcgttggtgaagtctggatttaattgatgggtgtttgggattacaaaatctttgtacaaatcaatgtaagtaatcccaactttgggagcccacgcctttaattctgcattgatgagtggaatatcatgaatgcgtgcgtaatgacctttaaatttggtaaaagaatcatttacaggcaaaatactttgtaaataaattttagtttttggagatttttgttgaattgtttttacgatagttttaatcccactcaccacagaatcattgctcactttgtgtgccaaatcattggttccgatgagtagaaaaactttgtttggctttccagaaacaatcggctccaatcggtctaaaacaccttgacacacatctccactgattcctctatttttaatagaaacatctggaaaaagctcttgccactcagcaccatcggtaatgctgttgcccaaaaacactacatcattgggcgtaatgggtaattcttcaaacaaacttacacgctgataatagtaaggcgaatattgattttgtccaaaaacacaaagacttaaaaaacttaaaacaatagcgattttcttcatttcaatatattttaaaaaatttcttagcaataaagatacaagagattttttaaacaatacaaaatttgaaatatgataaaatattcattttaattcaataaatttgtaaaaaaactaaacaattatgtcagatactacacacaatgttattataataggttcgggaccagcaggatacactgcagctatctatgccgccagagctgaaatgcaccctatcgtgattacaggcatgcagccaggtggacaactcactacaactacagatgttgagaatttccctggctatcccgatgggatcatgggaccagaattaatgactgatttgcaaaaacaagcagaaagattcggtactaaagtaatttttgattttgtaaaagaagtaaaattaagccaagaaaaaggtggtattcatcaagtaattaccaataacggagatgtttataataccaaaaccgttattatctcaacgggtgcgtcggcaaaatatttaggcttagacgacgagaaaaaatatgcaggaagcggagtttcagcttgcgccacttgcgacggattcttctatagaggcaaagatgtagctgtaattggtggcggtgatactgctgcggaagaagctacttacttggcaaagctttgcaacaaagtgtatcttttagtgagaaaagacgaaatgcgtgcttctaaagtaatgcaagaccgagtattaagcacaccaaacattgaggttttatttaatcatgaactggaaggtcttagcggagaaatggtagtagaaaaagctcatatttttaacaatcaaacacaagaaaaacgcgatttggttgtagatggagttttcatagccattgggcacaaaccaaatacagagcttttccaaggtgtggtggataccgatgaaactggttatatcattacacaaggcaaaggaactcacactaatattcctggtgtttttgcggcaggagatgtgcaagatcacacttatcgccaagcgatttcggcagcgggctctgggtgtaaagccgctcttgacgctgaaagatatattgcagaattataattcatctttaattatttttattgtttacaacaatcctcaatttattggggattgtttttttatttaaaagttttaagctaaaaaaagcataaaatccctattttttattacctttatgaattcaaccattaaatccaaactatgatacattttaaaataggcgataaagtaaaagtaatcgatgataatctcaacggcactgtaaccaaagtgaacgaaaacgaaatcaccattgaaaccgattttggttttgagatgctctacgaacctaaagagcttctgcccgatgtaggaatggaagaagaaattgaattttctgctccaaaaactaccccaaaaaaagaggctaaaaaattaacgcctaaaaagaaaaaggtagaaaaagtttttgaccctcgtgcaaaaatgccagaaatcaaaactggaaaggagaaggtggctaaaaaaacaaagaaaatcagaaaaccacctctggaaattgatttgcattatgcccaattagaaaactacgaccgattattggcaaaaaacttgattttagcccgccaaatgaactctctaaagaaaagagtggaaagagctagagagcatggctacgatcgtgtcgtgatcatccacggaaaaggagaaggtatcctagaaactgaagtgaaaaaatggctaaacgaaatgggctatcatttttacgatgccgatttccaacgatacaaattaggggcaacagaagtggaattgcctaaattctaattttcataagaaaaatcaaagcataaaaaaacggatggttctataaagaatcatccgtttttaaattttttattaaataaaattattctggtacaatgtcgaaagaaatttcagtttgtacacttctgtgaggtttcacaatagcagtgtaagaacctaatctcttaatgtttctacctaagatagatacatgtttacgttcaacattcacacctttttggttcaacaagtcagttaaatctgcgttatttacagaaccgaaaagtttatccccctctcccactttagcagcgattactagttcaagacctttaacagcctcgataattttatttgcttctgcgataagagcttcttcgtgtgcttttctatcttctaaaaccttatttaattcctcgatgtttttaggagtagctaatttagccaaaccttgagggattaagaagtttcttccgtaacccggttttactgaaactacttcaaactcaaaacctaagttttctacgtcttttgttaaaattacttgcattttagtttcttattttgggttattttaataaatctgtttcaaatggtaataaagctaaatggcgagctcttttgatagcttgagccacttttctttggtatttcaaagaagtaccagtgtatcttcttggtaagattttaccttgctcgttcacaaattgtagtaagaaatctggatctttgtaatctacatatttgattccgaattttttaaatctacagaacatttcagtagattgagtttcaatatcgattggagttaaataacggatttctgattcaccgccttgctctacttgttttgctaattcatcaattgccatagttgtattttttatttgttagacgatgctttttgttttcttctgtcttctgcccactcaattccgtgtttgtctaatttcacggttaagtaacgcaatacacgctcgtcgcgtttaaacatcaactctagatctgctaccacatttccttctcctttccattcgattaggtgatagaatccgtttcttttcaattgaattgggtaagctaatttgcgtagtccccagttttcttggtgtacaatctctgtacctctttcctttaggaagttttcaacttttttaactgcttcctccacctgagaatcagacagaacgggagttaaaatgaaaacagtttcgtaatgattcattttgtatgatttttaaattgggtggcaaagatagaaattatttttggttttgccttattttgactaaaaattttcaattaaacgcttgaaaatcattttttgccgtgatttttaaagcactaaacgccaaaaatacaaaaaaccgatttcattcagcaaaaatatctacctttgttttttattaaaaaatctgacttaaaaaatgggcattgttgcacggcaaagtattaaatattcccttgtaggctacctaggttttgccctgggaacacttgccgtaatctttatatttcccaatgatttagacttttacgggaaattacgctatgtgctctctacggcagaaatgtttttgccttgcgtggtgcttggcgtgtcgttttctaatgtaaaattcttttacgacgcacaaaaagtgggcaaacaccagaattttttatgggtgagccttctgagcatgatttttagtttttcgctatttacaattttatttttcgcagcgaattggctttttcctagcatcaaagaatcggcggtgcgggaaatgaaatctctgattttgcctttgattttgattttagcattaaatgctattttcaataaatatatttctaattttaagcgaattgcaattcctaacatttttgaaaatttatttcctaaaattgcgaatatcggtgctttttcgttgtttttctattttggtttaaaagaaaaaatagcgtattcgttttttatcggaatgtttgctttttcgcttttgtgctatgtttggtatgcgcaccgattagaaaaactgcaacctgattttagtcttaattatttaaaaaccaatcaactctggaaaaaagttgtaaattatagtttatacggatttctgggcaatattgggcattatgtggcgttgcgcgtggacaattttatgattggagagctcatcgggtttgagtccaacggggtgtatagcattattctggcgattttatcgtttatgatgattccgcaaatggggatcaacagtatttctgcaccaatcatcaatcaacatttagaagaaaaaaattattctgaacttaaccaattttatagagacagttcgtttcaattattctttcaaggtttagtgattttttcctgtattttagttggatttccctacctcacagaactgatcaaaaatggcgacaagctgcttgaagcctctcctattctgtgggttttgggtggtgctatgctctttgatctgacgacgggctttaatgggcacattatttcgctttccaaatactaccgaatcaatattgtgattatgctgcttttggcagcgctcacgattagtttgaatttaatttttattaaagtttttgatttaaggcttttaggcgttgcgatggcgacggcgatatcgctcaccatgtttaatttgattaaaatcactttcaactgggtgaagtttggcgtgttccctttgagtcgaaaaatgctaagttcgctcgttttaataggttcggctttttctatcgcctacctcctacccgagagccattatttctggatcaatttaatttacaaaccactgtttttaatcattttaacgcttatcggaaatcagattttcggtatttttcctttggttgaatatatcaacaaactacgaactaagaaactttaggataaaaaaattgccccgaagatagtcgaggcactaaatgttttcacaacggaataatccttattgtgatttgctttataagttcttgttgcaaatataaaactttttttttaaatcacaaaaatatttttttgacaaaattaaaattattttcataaatttatagctcaaaacaatagagttaaagattttatgaaaaagattttaggtctagaccttggaaccaacagtattggctgggctcttgtgagagaagctgaaaacgaaaacgaacaatctgaaataatcaaattaggtgtaagagtaaatccattaacagtagatgaaaagacgaactttgaaaaaggacgaccactctctaccaatgccgatcgcacattaaaacgaagcgcaaggagaaaccttcaaagatttaaacttagaagagaaaatctaatcaagatcttaattcaaaataaacttataaaggaatgctcaccacttactgaaattggagaaaactcaacatatcaaacgcttgaaatacgagcaaaagccgccagagaaagaatcgaactagaggaattggctagagtatttttagccattaataagaaaagaggatacaaaagtagccgcaaagtaaaaagcgaagacgaaggtgtggctatagacggaatgaaagtcgcaaaacacctttatgacaacaaccttaccccaggagaatatgtttattctttgctaaaaaacggcaaaaaatatattccagatttttatcgttcggatttaaaaaatgagtttgataaagtatggaattttcaaaaacaattctatccagagattttagatgatgagctttataccgcactcgatggacaaggacagcagaatagccgaaaaagatttttggcaataaaaggaatttacaccgctgaaaataaaggcaaaagagacgaagtaaaattacaacattataaatggagagtagaagctatttctcaaaaattatctattgaggaagtggcttatgtcttggtagaaatcaacaataatcttaatcaatctagtggctatcttggagcgatttccgaccgaagcaaagaattgtatttcaataaagaaactgtaggcgaatacttatggaaaagcattcaagagaatagacacaagccattaaaaaatcaagttttctaccgtcaagactatttagatgagtttgaacaaatttgggaaactcaagctaaattccacccagaacttactgatgaattaaaagaagaaataagagatgtcattattttctaccaaagaaaattgaaatctcagaaatctattttaagtttttgccaatttgaaagcaaagaagtggaagctaaggacaaagacggaaatgtaattatcaacaaaacaaccaaaaagcctaaaatgcagactattggtcgtcgtgtaattgctaaatcttccccactctttcaagaatttaaaatatggcagaatttaaataatttagaattttctaaaatcagaaaaacagatgacaatgaggagtttgaattagatttagataccaaaaaagaactttttaaggaattaaatcttagaggtaacctcacacaaaaagaggttttaaagtttttgggactaagcgacaaaatttggaaaactaattttgcaaatggtctggaaggtaaccgtaccaatgaaatgcttttcaatgtctacagacaaattgctgaatatgaaggatacgggcacgactgggaaaagaaaacaaattctgaaattgttgaagaattagaggctgttttcaaagaaattggcatcaaaccagaaatcttacattttgacgccacaaaaaaagaaggatttgacaagcaaccctcctttcaactttggcacctgctctactctgccgaagaagatggaaataaaataaacgaagaagataaactgatttatggaaactcttcgataaaattaaaaaagaaattggtagaaaaatttggttttaaacccgagcataccaaatggctcgcaagccttactctaccccaagattacggaaacttatctagcaaagcaattaggaaaattataccccatttaatagaaggtaataactattctgacgcttgtaaactcgctggttacaatcattcccatagtgtaactaaagaagaaaacgaaaatagagaattagacgacaaacttgatattttacccaaaaatagtttgagaaatcctgttgtggagaaaatcttaaaccaaatggtaaatgttatcaatgaaatcatcgacacctatggaaagcccgacgaagtgagaatcgaattggctcgtgaactcaaaaaaaatgctaaagaaagaaaagaactaagcgaaacaatcaataaaaacaccaaagaaaacgaagaaatacgaaaaacgattattaaagaatttggcataccaaaccctactaaaaacgatattatccgttatcgtttatttttagagttagattctaacgcagaacaggacatttttactaataccaaaattccaagagaaagattattttcaaaagatattgaaatagaacacattataccaaaagcattattatttgatgattctttctcaaacaaaactttggcttttagctcaaccaataagcaaaaagacaatcgtactgctatgaatttcatcacagaagattttaaatccaaagttgaagaatacaaacagcgtgttgaaatgctttatgaaaaaggctccatctcaaagactaagagaaacaaactgcttatgcttgaagaagatttgccaaaggatttcattgaaagagatttaagaaatagccaatacatcgctagagaagctaaaaaaatgctctttaaagtattccgagaagtaacagctacttcgggtgccataacagaccgacttagaagtgattgggatttagtaaatgtgatgaaggagctcaatttcccaaaatacaaagcactaggactcacagaaatagagcaacgatttgatactggaagagaagagctaaaagaagtagaagttatcaccaactggacaaaaagaaatgaccacagacaccacgctatggatgccctcacagtagcttttaccacacacaatcacattcaatacatcaataatttgaatgcaagaaaagatgaggctaaagacaatcatatcattatatgtaatattgaagataaaatcactcgcgttgagaatagaaaaagaaaattcattccaccgatgccacatttaagaagtgaggcaaaaaaacatatagaatcaattttaatttcaataaaagctaaaaataaagtagttacaaaaaacctaaactacaccaagggggggaattcaacaccacaagttacacttacaccaagagggcaactgcacaaggagacagtttatggaaaaatcaaactaccaatggataaagctaccaagctaaataaaaatataagcttggaacagatagaacaaatagtgaatccaacacacaaacaaatcgtcttggatcacattgctaaatttgacaacaatccgagcaaagcctttgattcaaaaaatcttaaaaaaacaccaattttgtataaaaacgagccattgactgatgtgatttgttttgaagaaatttatactataagaaaagacatttctccagatttaaaaatagaaaaagtcatagacccaaaaatcagagaaatacttaaaaataggaaaaaagaatttggtggcgacgcaaaaaaagctttttcagatttagatacaaatcctatttggctaaataaagaaaaaggcatctgtattaagcgagtaacaattacgggagtgaacaatgtggaaaccctgcaccacaaaaaagaccatctaggaaaaacaatcacaaataaaaatggtaaaaaactagaaagtgactttgtaagcacaggaaacaatcaccatatagccatttatcgtgacaaaaaaggaaatttacaagaaaaagtaactcctttctttgaagcggtggaacgagtaaatcaaggtttgccaattattgataaaacattcaatcaagacttaggttgggaatttttattcaccatgaaacagaacgaaatgtttgttttcccgaatgatgatttcgacattaatgaaatagatttactaaatgaagataattatcagctcattagtaaacatctctatcgtgtacaaaagatagccactaaagattacacatttagacatcatttagaaacaaatgttgaaagcaatattgcattgaataatatagcctataaaagaataagaaacctaggctcaatcaaggacattttgaaagtaagaattaatcatattggcaaaatagtatctgtgggagaatattaaattatttacaacatgctcaaaagaacacttttcttcggtaatccagcttatctttccacacggaatgagcaactcgtcgttcggtttccagagaaggaaaaacctgaacgcactttgcctattgaagatctcggcgtcattgttcttgagcatcctcaaatcaccatcacatgtagattattgagcaaacttagtttaaacaaagtcctcgtcgttcaatgtgatgcccagcatatgcccgctagcgtatttcaaccgcttagcgggcatacgcttttttctgagcgactgaaaaatcagcttgacatgagcctaccgcttaagaaaaatttatggcaacagacggtgcaagccaaaatcaccaaccaagcaatgcatttagagaaaaataatattgatgctcgaaaattacgaagatggatccaagaagtgaaaagtggtgatggagaaaatcatgaggcttatgcagcagcctattattttcaaaacattttcccgattgaggatttttctcgcaaccaaaaaggcattccgcccaatcattggctaaattatggatacgccatattaagagccgtcacagcacgagccattacggcaagtggactgcttcccgctttgggcatttttcataaaaataaatacaatgcattttgcctcgcagatgatcttatggaaccttatcgcccctttgttgatcaattaatcaaccaaatgcttgctaactttgagttaaccgaagaactgacaacaactcacaaagcggaattactaaaaattcctagcctagatgttattatagatggcaaaaaaagccctctcatggttgctatgagccacacaacaagtagtttctatgaatgtatagaaagctctagaagaaaaatcgcttatcctgaattttgctaaataatggaagaacttttcactcgcttaaaccaatatcgctctatgtggattcttgtatcatttgacctgcctacggaaaccaagctcgaccgtaaaagagctagcaaatttagaaaacaattgctagacgatggattctctatgtttcaattttcaatctatatgcgattttgctcaagccgagaaaacacagaagtgcatataaagcgagtaaaagacattttacccaaacatgggcgtgtagccatttttagaatcaccgacaaacagttcggtatgacagaaatattccatagtaccaaagaggtggaaaaaccacctatgtaccagcaattggaacttttctagaattaaaaaaatcatcaaaaatttatttcaaataaaaaaaggttgcagatttctacaatcctagcaaccttttcaactttttgatttacaagcaaaaacaagaagtatcttgtgattactcacacaaaaataagaacttgaaagcaaatcacaaccacgccctcacgccaaaaaagaaagcaacccttgtgattactcacacaaaaataagaacttgaaagcaaatcacaaccccgaagttccatcaacctcaattaatggcttgtgattactcacacaaaaataagaacttgaaagcaaatcacaacagctaattctttatagtctgtatttgagcccttgtgattactcacacaaaaataagaacttgaaagcaaatcacaacttgtatgatgattgtaataaacttaaacacttgtgattactcacacaaaaataagaacttgaaagcaaatcacaacggaaatgtttgcttttcaattaaaggtacacttgtgattactcacacaaaaataagaacttgaaagcaaatcacaacaggtgcaaatcgacgaccacaagagtgggcttgtgattactcacacaaaaataagaacttgaaagcaaatcacaacgtaacgcctttaaatttcagtatgttttctcttgtgattactcacacaaaaataagaacttgaaagcaaatcacaacggtatgctcaccgatgaattgtgctaaaagcttgtgattactcacacaaaaataagaacttgaaagcaaatcacaacaatgcttatgattgggatgactttcagcgacttgtgattactcacacaaaaataagaacttgaaagcaaatcacaacatgtcaggtatttccgataaaattttttcgcttgtgattactcacacaaaaataagaacttgaaagcaaatcacaacgttgtaaatatatggttattcaatggagatcttgtgattactcacacaaaaataagaacttgaaagcaaatcacaactaagatgtgaaatatgaaaaaagaagaagcttgtgattactcacacaaaaataagaacttgaaagcaaatcacaacacttctattgaggtcgctaagcaattaaacttgtgattactcacacaaaaataagaacttgaaagcaaatcacaacgcagtttgtacctttttcatttcatttcgccttgtgattactcacacaaaaataagaacttgaaagcaaatcacaacgatagtgtttctgtaaaaaacaaaaaacgagcggattctgaattacacgaaagttttaagaagtttgacaaattagaatttgtcattttaattgccaatgataagatttggagagtagacagaattacaatgctaatgctgaaaacaaatgatttacaccttaaacttcatgaattatttactcctaaaaaagaccagagcgagtaaaaactcgctcctatccgtgcgcagcttggtgttacccgcgctgacttattgagcaaatatacaaaaactaaacaaatgaatagaaatttagagcaggtgatgcgtgccatagaacaaagaacgcatcaatttttagatgatttgccaatcataatagcaaacgaggctttgcttttcgccaaagaaaattttgaccagcaaagttggcaaggaagcagcgtaaagccttgggctccgagaaaagacaaagaaaatgaaaggagtttgcttgtcaataccagtaatttacgacgaagtattgataaggaaaacgacaatacttgtgattactcaccccctcactttagcaaaacattcctaaaaaaataaaataaaaaagcccttgccatattctctaccctagcgcccaattatcttgcaagcagagaaaacaaaggcttaatagcatagaaaagcaaaacgcctacctaccgctatttcttaagttttcttaagtctacagtaacatcgcactcatctgccaatttcaacacgccttccaaacggattacatgatctttgattttggtcactctccctttatattttctcatttctttttcttgcaacgcaaaaagcgaatcttgacttataggcttcatatctacttgcccaaacatggagtagctactttccgttcctggtaactctgggatgtcaaattctctaatttcaaaagaatatagtcgtttccattgcttgtttttataagtcattatcacccactcgttgttcgatgttgagtctgcataattcacaacgaaagacacttcatctccaccatcaccatccaaatctccttcatttttcacatacatcaatcctgcttgctgcttattatctgaaacaggaagtgattgcattgcaggattgctcgatgtcataaaacaatacggctttttattcaccaccacagttataaaatcataatactttaagcccttatagaatttgttggtttctttgtttgtttttccagaaaaataatgctctgtcaatttttctttttggccatctccatcaaaatcaccttcaatgctaaatctataccccttaataggctcaacaccaggcgcagatagcagcttcgccacatacgcatctaaatctttgattttccccgtttccggatcgattaaatcttcatccattgactcagtatttgtatcatcatcaggaactcccgagatggaatctgtcgctgtagaatcttttacgacttccgattccgatgggctaagatttgtaatcgtttccgcagtatttttacacgcaacgagcatagaactcgcaagcaaaatattgataattcgtaatttcattgactttgtctatttccacaaatttaaatacaaaaaccacaaaaatcattaattttaactataattaacttaaacaaaatacaatattctaattatcatcgtatccaattgccaaatctcccatctaatgaaaaattacaaaattgtgatgaaaaatattttgagtaaaaactcaatacaaataaaaaatacaaaaaaaggaagtttttattttcttccattattaaataaggcttagaagtaaaagctataaactcaattaagatttatcatattttcattgattaaggtaagatacaccaaatttatatttttaattatattttaacattttaattgtaacaatccgatattttttccgtatatataaacccgagctttcgccaaaaccttaaaagtttgaaggcttatttcattgaaaattaaatactaaaactaaaaacaccatatgcgccaactaaagattacaaaacaggtaaccaaccgtgaaactgcgtcgctagacaagtatctacaagagattgggaaagtagatttgattactgccgaagaagaggtagaactcgctcaaaggattaaagctggtgacaaaattgcgctagaaaaattaactaaagccaatttaagattcgtggtttcggtggcaaaacaataccaaaatcaaggacttagcctcccagatttgatcaacgaaggaaacctaggacttatcaaagccgctcaaagattcgacgagacgcgtggtttcaaattcatttcttatgccgtatggtggattcgccaatctatcttacaagccttggcagagcaatctcgtatcgtgagattaccactgaacaaaatcggttctatcaacaaaatcaacaaagcctatgctgcccttgagcaagagcacgagcgagccccttcagccgaagagatttcggatcagctagacatgaccgaggaagatgtaaaagaatccatcaaaaactctggacgccatgtctctatggacgctccactcgtggaaggagaagattcaaacttatacgatgtactccgctcgggcgaatctccaaacccagatcgcgaattattgaacgaatcgttacgcatcgagattgagcgagccttgcaaacgcttactcctagagaggcagatttaattcgtttgtattttggcttaaacggacaacaccctatgacgttggaagaaatcggtgaaacttttgatttaacgcgcgaacgtgtaagacaaattaaagaaaaagccattagaagacttaaacacacctcaagaagcaaaattttaaaaacttatctcgcaagataattctcgaaaaagcataaatgcaaaatcgctgaattctttagaactcagcgatttttttgttgcaataattaatcaataaaaaattatgaaaaaagaaaaaaaaagccttcaagctacgcttaaagactcgtagagcgggagacgggactcgaacccgcaacattcagcttggaaggctgaagctctaccaattgagctactcccgcaattggactgcaaatataaaacggatttttaaattaccaaacttttcaagcaaattttattgaaaaaatttttacatttttatttatttaattgtaaaccaaacacttatttgaaaacatttcttggttcaaaatctggctcttgatagaaaaagtccacaatcttatccaaaaaacgattcaaaatcggatttttggctttggcaaacacaaaaacttcctctggcgtcgccccaaccgagcttttaatctctaaagcggtgcgagaaaatatgattttggcatattttgaagcaattcccgccgaaaccatttcatacaacatgcgcagatacaaagcatgcgattgcaaataccgagcatcataacccaaaaatccagattctagctcatttctgtttttaattaaagtgtaaaaacatactagcttcttatctagaaaacctgcaataagctcaaaatcgtcttttagctcttttttaagcgtgtaaaaataatttggtggcaagacataggattttacctcagcattttcaaaaacgcactgatattgcttgtaaatctcatttttatactgctcaatttcgttgagcgtgagcgtgcaaaattgtaaatcattggatttcttaaacgcacgcttggctcgagtgcgatatttggtgcgcatcgcttgcagatagtccgaaaattctctccaatttttgcgaaaactcatcaccatattgggctgaactttaatacttgaaaactgaggcaaaaatgcctgaatttgcttttttttcttgaagattaaaatctttgattaaagtgatatttcgcttaattcctgcatgtttttctattaaatcagcaatttgatccagatgcttgtaaaaataatgctccgccactgtgttggcaaacaccgctgcatgacttcccgtgagcatcatattcccaaaactaaatgccgtgaatttaattttttgcataaaacttttggaaatccattttttttcgctcacttgcgaaagatcaaaacttaacacttgacaaacggattttgcctgaattttaccttcatcccacaaaacgacatagaatgtttggtaattctcaggcatacttttctccttagctctcaagtatttagcactcaaaaaaacatcattagccaactcaccccattcgggaggcacctcctctattttgctaaatatttttatctccactattgaatcaaatctaaaaattgattttctgtaataatttttatactatctatagcttgagcttttttcaattttgaacctgctttttcgcccaccaccaaataatttaagtttttagacaccgaagaaacgatttttccaccgtttttctctaccatttctttggcttgatcacgggtaaaggccgttaatttccctgtaaacaagaaacttaacccttccaatttttgagaaagcatttcttgttgctctgcctgcatctgtagtccaaaagactttaaatcctcaattaactgctgatgctctggcttggcaaaatattctttcacgctctcggcaatgcgagttccaatggtatccaccgcttccaattcatcaaccgatgcttgcatcaattcatctatgctcggaaaagctttgactaattttttagccaccgtttcgcccacatagcgaatacctattccgtataaaaccttggcaaacggcattttcttagattcttccaatgcgtgaatgatgttgtcggcagatttttcggccatgcgttccaatggcaaaatatcttcttttttcaatcggtataaatccgcaatgttgttcacaagattttgctgatacaaaagagcaatggtttctgctcctatactctcaatatccattgcacgacgactcacaaaatgcaccaatctccctttgatttgcggtgcgcaaccgtcctcgtttgggcaataatatgctgcttctccctcgtttcttttgagtggcgttccgcactcgggacattctgcaataaacttcgtaggctccgttcctgctggtctttgactcaaatctacgcccacaattttcgggataatttctccgcctttttctacaatcacggtatcaccaattcttacatctaatttctcgatgatgtcggcattgtgcagagaagcccttttcactgtggttcccgccaaaagcacagggtttagattcgccacaggcgttacagcacccgttctacctacttgataatcaatagagtttaattttgtatacgcttgttcggctttgaatttgtaagcaatagcccatcttggcgatttggctgtaaacccaagttcatcttgctgaatcatagaatttactttcaccaccactccatcggtttcgtagggcaattcatggcgcttttgatcccaataatgcacaaattctaaaatttcttgaatgttattgcatttttttcctgcatttgggactttaaaaccccatttccgagcagtttcgagcatggtttcttgcgaatcaaatggtaaattttcgcccgccacattatacattaaagcttctaagcctcgcttagccacctcgcttgaatcttgcaatttgagtgttccgctggcagtgttacgcggattcataaatggctctaaacctaattcttctcgctcgtcgttcaacgcattaaaagcttttaagggcataatgatttctccacgcatataaaatacgggcggacaatctccatggattttcaacggaatgctacggattgtgcgaacattggtcgtaatctcatcgcccatgatgccatcgccgcgcgttacggcgtgcgtgagatttccgttttcataggttaagctaatggaagctccatcatatttaagctcacaaaagtatgtcacatcgcctaaatctttctccacacgctgtgtccactcaagcaaatcatcttctgaataagagttccctaaagaatacatacgataagcgtgctgaacggtcgggaaatttttggtcacactacctcctaccctttgtgtaggcgaattgggatcaaaaaactcaggattttgctcctctaaatcttgcaattcctttagtttcatatcgaaatcaaaatcagagatttccgattgatctaaaacataatattggtaattataatgattgatttcttggcgtaattgctggattttttcttcaatactcatagtgaaaacttaaggcgtaaaaatataaaatttatgcgtttttcggaacgatttaggcataaaaaaagccacttgctgggcaaatggctttaatttttattcaaaaaaactgaattattttacagcgtcttctactttctcagcagcatctttcactgcatcagttttttcttctacttgatctttaacgttatctaaaacttgaccagcgttgtcagcagcaccgtttacagtttgtaaagtttcagcagctttagcttggatctcgtttaatttttcttgcaattcagcaactttttcttctgcaactttagtagctgcatcgtcacctttagctttagcttcttctaaagcttgttgagcgtcgttcaatgctttttgagcttcagctacttcagagttaacatcttcttgtgcatctgcaacgttttctccttgtacgttttctacttcagttgcaactggagttgcttcgttgtttttcttttcgcatgaagtgaaagtgaatgctacaacagcaactaatggtaataatacttttttcattttactatttaattttaatatttagtttgtttacttatgagtgtgcaaatttataacaaagcaaaattctcaacaaatattttaacatttttttattgagaaattttaaattaagccattttttaaattgcgttatcttcttctaaaacctgctctatattctctgcctcgctgatttcctttactttacggcgatatggacgaataatgaggcgcacccccttgttgtattgaaaatattgaatcacccagtttacgagtgctactactttatttctaaagcccacaagcgaaattaaatgcacaaacatccaaatcatccatgcaaaaaatccagtaaatttgaattttccgatgtctgccacagctttatttcgcccaatggtagccatggatcctttatcgttatacttaaaggctttcatttctttgcctacgctcaaggcgttgaggttgcgagccaaaagctttccttgctgaatggcaggttgtgccaccatcgggtgcccatgcggatagtcctcggactgcatacaagcgatgtctccaatggcataaatgtcctgggttcccaatactttattaaataaatctactttgtatcgtccgcgctccacagattcttctggcatgccgtcgatagtgctaccttgcactcctgctgcccaaatcaaggttgaggtt

SEQ ID NO: 2220 - DNA, 24173 bp, synthetic construct
  source 1..24173: mol_type = other DNA
  misc_feature 1..24173: note = Synthetic
gacccgtctatcgacaacgattacatatatagaaaaggctatgtcgcgatgctgtcggcaagctactccaaacgtggtatgagcctgttggtgcaggccaagcgcagcgacaacatgtcgttccgcagcaggcgcacgctgccttcggcggcggagaactcatcgttcctgaaccaccttccggcattcaccatggaacacacatacgcattggccgcgcactacccgtatgcaaccaatcctgacggagaatgggcatatcaggctgaattaggctatacattcaaaaaaaatacggcactgggcggaaagtatggcacgaaagtgaaactgaacttctcgcacgtacactctatcgagcagtcgccacgcacgctcaacggcatggtagagggaagcgacggctatgcgtcgagattctggaaatggggagacagcaaatactatcaggacatcaacgtgcagattgagaaaaaggtgagcagagatttcaaactgaacctcatgtacatgaaccagtactataatcaggcagcgatagaaggtcacggagacatgattcacagcaatatcttcgtggcggaaggcaaatacaggattaacaacaagctcacgctcagaggcgaggcacaatatctcaccacgggagaagacgagggcgactgggctttcggactcctcgagctgtcagtcctgccgcactggatgttcactgtgtcagacgaatataatgttggcaagaccgacctgcactattacaacgcatacgtcacatggacccggggcgcccatcgcctgcaactcggctacgtaagaaaccgctccggattcaactgctcgggcggagtgtgccgctggattcccgcaagcaagggtgtcacgctttcatacaactataacttctgataataacaacaggcattcatgaaaataaagacattattatatacaaccgcggcaggattgctgacactcgcctcatgcgacacggttagcgagaacgaccgctatatatacgtggaagaggccgaagtgcaacgctgcgtactgcttgaagacttcacgggacagcaatgtccaaactgtccgaatgcggcagtggaaaccaacaaactgcaagagagctatccgaacagcgtcattgccgtggcgatacatggcggaccgctgtctccaaacactcccgtcagtcttaaatcgcacgtcggagacctgtattacagtgcggccggacagcccaaactgccggccggacaaatcgacaggctcggcggaacgagcgtacccgagcagtggatgggtaacgtgcacacggccatacagcggaaagcggccgtggcactaagcatagagaacgattacgacgcagacggcaacaaggccgcaatcaagataaaggcttacggcatgaacgcggcaagcggcaaattgcaggtatggctcgtggaagacagcataaaagcgatacaggccatgcccgacggaagctccaacagagagtacattcacaatcatgtgctccgtgcggcggtaaacggtacgtggggagaagacatctcgattgcgaaaggttcggaaaagactgtcacatacacggccgacctgaatcccaagacatacatgccgaacacgagacagacatggaatgtcgcaaacatgcatgtagtggcattcgtatataacgacaacggagtacagggtgtcaccaaagcggcattgatatcaaatgccgaaaacagtcattgaaagagacacagacaacgaacaatcagaataaagaagagtatatggaaagaatcaaaagcctattggtttccgccctgctggccatggtatcggcaaacgtatccgcacaagcagacggcacatttcagtttatagacaaagatggcaacaccgttgccgacggaagtacatgcacctttaatgcccactacgatgaagactggggaatggtaatggcccacatagacctgtcaaccaagaacacgacatccgaggaagcattcgtctcggctcaggttgtgacagaaaaacttccgaacggcacatttcaattctgctttccgaatacatgccctcccaatgttccggcaaattacataacggatacaggttcgatgggagccggagaagttaaaaacctgctatccgaatggatgcccgacgaaggcaaatacggcacggcgacattcaccatacagctacgcaccatggcaggaaacaccaataccgtgaaggcttacggcccgaagattaccgtcaactgcgtatatgccgacccgacaggcatcgacggagtacttaccgacaacggcgacaccaccatcaacgtgtatgacgcatcgggaaagacggtgatgacgaatcgccctgcaagcgctttgatgtcactgggcaaaggtctgtacatctgtgagaccatgaaagacggcaaacgggtagctgtcagaaagattgtcaaataacaatggcagcatcatcaccaataaccgataatagcgaacggctgtattaaaaccaaccgggaatgccccgaaagtcggacaaaggaaacaataatattcataataataaaatcaagcgcatgaaaagatttttacttccgttgatagccttgatgctgtccgtaagcatcacaaacgcccaaagcggtgtcaagctcaacactaagaaagccccaataggcacattgcagaaaaacggcaacgccatgcctgccgttccgggcacgaacaaacagaaagcggccacggctccggcaaaaatccaactggcggaaaaccagaaaataatgggtccatacaccaccgacgagttgggacaatatggcatgggactgacgaacaaacccggcaatcttccgatagccgcaattttagatgccagcaacatcaaaaaattcaatggtggcaaagttaccgccatacgcttcggactctgctatgctaccaaagtaaacaaggttttcattaaagctgttaaaaacggaaaattcgaagacctttttgagcaggaatttacaggcaacactgtcgttggctggaacacggtgactatcgagaatccatacaccctcgacctcaacggagtagacgccctgctgcttggctttgagtatgtgcaggcaagacaaggcaatgccgccgcattcccattgtctttcgcaagtaaggagacagctacagcggcatacacggattttggcgaaggtttagactggtataccatcggcggtgcgggaggcagcctctctgtacaggcaatagtcgaaaaagaatatcccgccgccgacatagtggtaaacgatgtatactccatggaattcgttaaatccggcgacaagatacaatacggtttctcttattacaatgacggaacagctcccatatcggtttactcgttcggtatcgcaatcgacggaaatgaagttgccgtcatagaagcgccgacaaaagacctcaccactaccgcaaagaattatagcggtatgcttgaagcccagaacctgcccgtaggctaccacacactatcggtatatgtgaaacagatgaataacgagactcccgctgacgccagcaacagcgataccaaactcggcgtgtacacagagagcctgcaacgccagaagcatctgctcgaacacttcacgtcacagtattgcgcatactgcccggccggaatcaatctgttggagtatctcaacaaacaacgtgacgacctcgcatgggtatcgcttcacggcaacatgaacggcggtgtcgacatgttcacgatacccgaaggtacggatataatgggccttatgaccggtggtttcccctcagcggcattcgacagattcccgttgggagacggagacatagccataggaataggcgttcaagacgcatacatacctacttacgcaaatgaaataagcagaacactcgaccaaatcggccagcaatatccggtattcgccaccgtagacatcacggcaaaggtcaacgagacgacaggcaacctcgacatcaaagtatcgggagagacgacaaaagagtttgccgcactgatgggcaacgaggctgccatcacggtatatgtcacggaagacagcatagtggcacgccagctcaacaacggtatctggaaaagcaagtatacacacaacagcgtgctccgcaaagtcgtgacagacgcttacggcaccaagctgaatgtagaggggaacaaatacgagaacaactataacgtaacattacctgacggttggaacaagaaaaacctcaacgcagtggcattcatcggcaacgccataacggatgagaaccttgcaaacggaaacatctgggtgacaaatgccaactgtgtgaaagcagactactccaccacaggaatatccactccgaccgcttcggccgagaaccgccctgtagagtattacactcttgacggaatacgcatcgagactcccgccaaaggccttaacatcgtcaaactgagcaacggtgaggtacgcaaggtaatgataaagtgacaagacagccgtaaggcagaataacaccaaaagttccgctatccgatgatagcggaacttttttatttaccatcctccggcaccacagaatacatgatatgcccacaccgcccacgaaagaatgcttttcattcccgatgtgttcagacatatcttcatgacaagcggccggtaatatatgtacagagttccatttactcacattacgcaccgcaagcctcccaaaacaccaaatacaatactgcacaaacgcacaaaaaaatgcgggacaccgttcaatatgaaccgcatcccgcagtgttttatcttatctataagattagtcgagcacagccaacttgttgtccgagccgagcacatctgtaatcttgtgcttgtacatctcctccataaggtcgcgtgccggaccgcaatacttgcgggggtcgaactcacccggtttctctgccagagtcttgcgaacggcagccgtgaaagcgagacgtgaatcagagtcgatattaatcttgcataccgcacttgccgatgccttgcgcaactgctcctccggtataccaaccgcatcgggcaacttgccgccatactgatttatcatatcaacatactcctgaggcactgacgaagaaccgtggagcacgattgggaatccggggagcttcttcattatctcatcgagaatatcgaaagcgagtggcggcggcacgagcttaccggtcttcgggtcgcgtgtgcactgctcgggagtgaacttgtaagcaccgtgggaagtaccgattgagatggccagagagtctactccagtctttgtgacaaagtcgataacctcctcgggctttgtataatgagactcagcggcaaccacctcgtcctcaacaccggccaaaacgccaagctcaccttctaccgtcacatcgtgtgcatgagcatactccacaaccttcttcgtcaaagcgacgttatcatcgtaagaaagtgccgagccatcaatcatcacggaagagaagcccatgtcaacacagttcttgcacagttcgaaactgtcgccgtgatcaagatgaagcacaacctctggagccttgcagcccagttccttggcatactctacagcaccctgtgccatgtactgcaagagtgtctggttggcgtagttgcgcgcgccttttgacacttgaagtataaccggagacttcaactctgatgaagcctttattattgcctgcaactgctccatgttgttgaagttgaacgcaggaacggcataaccgccgtcgatggctcttttgaacatttctttggtgttcacgagaccaagtgatttgtaacttgccataattctgtatgtttttattaagtaagaatttacatctaaacgctcacaaagttagcattttaaatcggcaacacaaagtattgaagtctattttaaaaccctttaaagcccattttatagccatatcggcccatggcaccggcataaagatacgttttgcgaaacaggcattgcaatttccgagcattgaagagaggggtgccgtgaactaaacggccgtccccacccggtcatacaccctctccggtcaactgttacgtatcatattccgcaacagccacgtggcattctgattacgggccacgccgggcgttatcttatacgtataggtcacgttgtcggacagttctatctcaaagcacaggttgtgaaaacgtccggacagactgccggccattttcgacagttcgagatcgtgcgtggcaattattcccgtgacgggcagttcggatatggcatcaagaaacatccgcgagccgttcaacttatcgagcgagtttgtacctttcagtatctcgtcgagtattatcagcgtgcgcggggagcggcggcatgcctccatgagctgcccgagcctcaacagctcggcattgaaatagcttattccccgcgacaggttatcactcgtgcgcatactcgaaaaaagcgagaaaagcgataccctaaggccggccgcaaacacaggcatgccgtttaccgccaacagataattgaccccgagcgaccgcaggaacgtgctcttgcccgccatgttggctcccgtgactatataataatgattgtcctctatgcgtaaatcgttcggcacggccgaagcgccgagaaacggatgataaattccacgtgcgtcatagacaacaccgtcggtatccgcaatttccgcacggccggccgacggctcattatatctgaacgtagccatagacacaagggcgtcgagcacgctcacactgtctatccaccgctccatgtcagcggcatgcatcccctgccatcggcagaagcggcgcacgaggaaaaagtcgctaagcaagaaggtgtcgaaaacgatcaggccgagcacgtttccacggcggtcgagcccgtcgagaatacgcctcagttcatcgaaagatgtcagggcataggctgctgcctcacccccggatgacattccgagacacggatcgtcgactgtacacagctccgtcgtggcagccagcctcaccagctccgtgtatgccttcatctgtctgcacagactgttcactgccttgctcatctgccgcaaagggcccgagcacagcatcagcacaccgaaaaacatgagcgtgccccacatcaccggcactcccgaaggcatgtccgtaaacacggcaagcgctatcagcaacgcgaacactacgataagcgctaccgctaccgcacgggcaacagtcgaagaggcaaacgacggcaagggcagactgccggcagtgccgagcgcggtttttactgcccgagtatctatcgggccatatcggcgcatagccatgaacccggcacgcaaaccctccatctccgccagacgctccaccgcatcggcacggcggtcgataagcgccttgccgctttccggaccgaacgctttcatttcgagacagcgggcaagaatatccgccccaccctgtgtcacggtgcggtttatccgctgatagagcgacgagcggccgaaaatatccatatcgaaagtaaactcatggcaaggatcaacatacctttcgcctgcgtcgaaacggtcgaaacgaccgtcgagatagtcaagctcgccttcatatacgctccgcagggccgtgagcctctccaccctttcggcattgctcacgtcgacacgccggaatgccacatagccaatcagcatggctgccgttccgacaagccaaaaatacgagccatgaaccgtatatgccgccacaaaacctatggctgcggcaaaggcaaccaactcggaagccaccaggatgcgcccggcacgctttaatccggatatgccgcccgacaactccttcacccggccggaatagtactctctcaattctttaacgtctttcattcccggttctcccaatatcatttgcgctgcgtggcaatcctaagcgtctcgctctccgccgtcaacatgcggccttcatgctccacacctgccattatcacgatgtctccgtctttcagtttgcgccctccgagcaccgtagccgtatatcgcacccccattcccggggcaatgctttccacaagtatgcccggtgatatggatatgtgtttgtttgcggtagtgtccgtcactaccggccgtatgttcgttattgtctcgggcgagttgttcattatctcaaaaaccaccttacctctctctccggcacgcaacaccccgtcgccgtcggcatcagcaaattccaccttgcgcacctctatggccggacggaaccccatactgccatgcgcggcattacgtcccgcaccacttgccatacgctccagttgcctgagcgacacctcgccgccggcattggcacccgtcgcggacgcttcatcggccgaatagccgccctgtattcctccatcaggctcgaacactatacggtcatcgccgctgtttgtcgggtcaaacccgctctcgtcccgcccaacagtttcttgtgccccgccatcataccgctcccgctgtgtgtcataccgccgtgtgtcatcttcacagccgccggtctcattaccgccggtatgccgtgtgcgctcggcacgccccctgcggtgcgcctcatatttcgcacggccggccttctcattggcagagcctatggccgctccggccaccgcaccgccggccatgcccacaaccgtcccgatatcactgccccgccagccacctccgattccgccgatggccgaaccgagaatggcgccgaactgggcgcccacgtatgcaccgtcgcccgtggtcttgcaaccaccggcgagcaatgcgccgcacaataagtatatcaaaccttttttcatgattataattggttttgcgtttacgactgaatatatcccgagcgtatacttcaacgctcaaataaccgccatgagacacgtcaggatctgaacgtgacgacactcatccccccatgccggaacattcttgccacgaactgtaatatcagtattccaccacaccacccggaacagattttcgacatataagtgcctcgtttctgcaaagatacggatttatatggaatataacaatatgaatatccataattgttgatagggatatcaataatatataatacccgccacaaaaaaaagaaacaggataaaatgtccaacctgcctaaaatgacaacaccaaaagaacgagcggcaatcactacatacacactgacagaaacagacaccactccgcgacggaaaactatatgcgaaagcacaataaaaaaacagacttatgtaataataatgtcacgaaaaaacgcttgtgttttttagcgaaccagctcggaaaaaaccatttaaatagccttaatataacgtcgcgcacctgtctgtaaatcatttttgacatttcactccgcaataaggcactcgttggaagccgtttggccgcatatcaccttccaacggaatacccgtcgcaatgcgacgggacgctaaacgcagcccaataagccgcccgttgcagacaaaaaaaatcccgacttttcacaaatccgtatattatactgtctgtcaacaagttagcgaaaacgcccataacccgcgtatttgcggccacaagatcttaattttaaaataatcgaaatataagaggcgttttgtcataatatttcacgccttagcactgcttagcacctacggaacaatcatagcacggtcaccgttttttttgataacatgtcacaatatgtattccgttaagccgaatacatacaagccggtattagaaaaacaaaaagcccaccgtcaaggtcgatgggcgaacctaatgttttcacaacggaataatccttattgtgatttgcttaaaattcattgcaaatatacaaaaaaaatacgacacacataatattttcttattattttaccgtatatttgcgaaaacaacataattaagaacataattaccttataataataaactaccgattatgaaaaagattttaggactcgacctgggaacaaacagcataggatgggcactggtgaacgaaaaagagcatgatggtgaacagtcttccattatcaaactcggagtaagggtaaatccgctgactgtcgacgaacaaaacaattttgaaaagggcaaacctatcaccacaaacgccgacaggacactgaaacgctgtatgcgacgcaacctgcaacgatacaaacaacgccgcgagcacctgataacgatattgaaagagaatggactcatcacagaaaacaccatactggccgaacaaggcaacagatccacctttgagacttacaggctgagagcctgtgccgccacagaaccgatatcactggaacagtttgccagggtactgctaatgataaacaaaaaacgcggatataaaagcagtagaaagataagcgccgatgaaaacggaaagataatagacagcatggatatggcaaagcttctctatgaagagggcctcactcccggacaattcatgctaagacacatagatagcggcaaacgctatactccggacttctaccgttcagatctgattgatgagttcaaccgaatatgggaacgtcaaaaggttttctacccggaaatcctcaccgacccattgcggcaggaactgaaaaacaaaaacgaaaagcagacatgggctatatgctccaaaccgtttggcatagtaggacagaaacgcactacaaaaggagatgcccagaaacgcgagaactatgaatggagaagtaaaagcctcaacgaacaggtcgatcttgaaacactggctgtggtcctgcaaaaaataaacgggcagataagcggttcaagcggttatctcggtgagataagtgacaggagcaaagaactgtacttcaaaaagcagaccgtgggccagtacttgatggagagactcgataaaaatccgaattacagccttaaaaacaaggtcttctaccggcaagactatctggatgagtttgaaacattatgggagatacaggcacaaagccacagtgaactgacgacagacttgaagaatgagatacgcgatgtgattatcttctaccaacgtccgttaaagtcgcaaaaggataaagtcagtttctgtgagtttgagaacaaacaggtcgaaacagaatccgacggaaagaagaaatcaatgacaataggcctgcatgtatgcccaaagtcatcgccgctgtttcaggagttcaagatatggcagatactaaacaatctgcaagtatcaggaaaggttatgacaaaatcggcaacagacctgttcggttattccatacataccgagaagggccggcgattccttgaacaggaagaaaaggaaaggctctttcatgaactgagcatcaaggagaaaatgtcgaaagcggaagtcttgaaactattattcaaaaaccataaggagctggaccttaactatagtgaagtggaaggtaaccgcacgcaggccgcactgttcaacgcctatcagaccatcattgacatgagcggacacggaagccatgacttttccaaaatgagagccgatgaggtatatggcattgtagaatcggttttcaacagactgggcttcaatacggacatcctacactttgactcctcactaaacgggaaggaattggaacgccagccatcatacagactgtggcatatcctctattctttcaccggcgacgactccaaatcgggaactgacaggctcgtcgacaaaatctccgggtcatacggattcgaccgtgaatatgccgcaataatcgcaggaatcagcttcatgcctgactatgggagccttagcgccaaggcaatacgcaagattttgccgcacatgcgtgacggactaaaatacagcgatgcttgcaaatatgcaggttaccgccattcaaaaaactcactgaccaaagaagagattgacaacaaagtgctttgcgacaagctgacgcttcttccacgtaacagtttgcgcaatccggtggtagagaaaatcctcaaccaaatgattaatgtcgtaaactctgtggcagataaatacggcaaaccggacgaaatacatatagaaatggcacgcgagctgaaatccagtgccaaggaacgtgaggagaccaccaaagccatcagtaatgtcacagccgaacacgcgcgttaccgtgagacactgcaaaaggaatttggaatagcaaacgtcagccggaatgacattatcagatataagttgtatatggaactgaaagacaatgggttcaaaactttatactcaaacacgtatattccccaggaaaaacttttcagcaaggagtttgacatagagcatatcattccgcaagcgaaactttttgacgactctttctcaaacaaaacaatcgaggtgcgcagcataaatatagagaaaagtaacgctacggcctacgacttcgtatgcaacaaatacgatgccaagcaagtcaaagactacgaagcgagagtggaagatttgttcaacaaaaaaataatcagcaagaccaagcgagacaaactcatgatgcgtgaggccgacataccgtcaggattcgttgaccgcgatttacgcgactcgcaatatatagcccgaaaggcacgcgagatattggagaacatggtaaaagtagttgtcccgacaacaggcagtattacatcacggttacgcgaagactggcaacttgtggatgtgatgaaggaacttaactgggacaagtacgacagcctcggtctgactgaaactatttacgacaaagacggacgcaggatacgccacatcaaagactggacgaaacgcaacgaccaccgtcatcacgcaatggacgctcttaccattgccttcaccaagtacagccatatccagttcttaaacaacatgaatgccagaagtgacaaggccggcagcatctatgcaatagaaaagaaagaactttaccgtgacaatggcaaactaaaattcttaccgccaatgcctcttgatgttttcaggaccgaagccatgcgtcatctcagtgaaatacttgtgtcgataaagacaaagaataaagtggtgacaagaaatgtaaatacctataaagtcaaaggcggaaaaaagagtagaatacaacttactccacgcggacagctgcataacgagaccatatatggctgtatcaagcaatacacagtaaaagaggagaaagtaaacggggcgtttgacgaacagaaaatctccacagtggccgacaagcgataccgtatggcactaagcgaaaggttgaaacaatatgggagcaacgccaaaaaagctttcacaggaagcaacagtctgcaaaagcatccattgttcatagacgagacgcacacattaaccgtgccagaaaaggtcaagacagtgaaattcgaaaatgtatataccatacgaaaagaagtgtcgccagacttgaaaatcgataaagtggtagatgcccatatacgcaagatattggaaacacgtctgaaacaatacggcaacgaccccaaaaaagcatttaccaatcttgaagaaaatccaatctggctcaatgaagaaaaaggaatttccataaaacgtgtgacaataaccggtgtaagcaacgtcgtggcactacacgacaaacatgaccataacggcatgcctatattggataagaacggcaataaacagcctgctgactttgtctgtacaggcaataatcatcatgtggcaatttatcgggatgcagacgggaacttgcaggatgaaattgtttctttttacaaggcaaccatacttgcaaatcaagggttaccgataatcgacaagaataaaaacgacggccggcaattcttatttacaatgaaacaaaatgaatattttgtattccctaatgagaagacaggatttaatccaaaagaaattgatttgctggatcctaagaattataatgagattagcaaaaacctgtttagggtgcagaagttatctaagggcacaagcagagattattttttcagacatcatctggaaacaacggttgacgataaaaaagaacttcaagaaataacttggaagcgaataagctctcttgataaattaaagaatattgtcaaagtccgcattaatcatatcggacaaatcgtatcggtgggagaatactaaaaaacagtatgccatgataaagaaaacactgtatttcggtaatccggcttatctgtctctccgacaaggacaaatggttatcaagctaccggaaatagaacgcaacgataccataccggaacgaatgaaaaggcaaaacgaagtgacaaagccgatagaagatataggagtaatggtacttgacaaccgccagattacaatcacccaagggttgcttgaagcgttattggaaaacaactgtgccgtaatcacctgcgacaaccgcggcatgccggtcggcttgatgttaccactctgtggaaacactgtgcagagtgagcggtttcagtaccagactgacgcatcactaccattgaaaaagcaattgtggcagcagacgataaaagccaaaataagaaatcaggcgaccgtacttgctgcatgtacgggaaaagaagtaaagaacatgcgacggtgggaagaagacgtgaaaagcggagatacggataatctcgaaggacgggcggcagcgtattattggaagacaatattcgccgagttcccggtaaccggcgattttacacgcagccgtgacggcttgccaccaaacaacctgctgaactacggctacgccattttgcgtgccgtagtggcccgtgcactggtatcgagcggtatgctaccaaccttcggcatccaccaccataacagatataatgcctattgtctggcagacgacatcatggaaccatacaggccgtatatagacgagcttgtattcacgttgattgcagaagcagacggtcatatacctgaactgacaagagagaccaaagccagattactatctatacccacaacggaagttatcattggcaacaagcgcagtcctctgatggtggcagtcagccaaaccacggcatcgctctataaatgtttctgcggagagatacgccgtatatcatatcccgagagataatagaaactgattatgaaccgattcagtgaatatcgcattatgtgggtactcgtattttttgatttgcctaccgagacaaagaaagacaaaaaagaatatgcgctttttcgcaagaatctgcaacgtgatggctttacaatgtttcaaatgtcaatatatgtacgccactgcgcaagcatggaaaatgcagaagtacatataaaacgtgtcaaagcatttcttccccaatatggccaggtcgcgattatgtgtatcacagacaaacaatttggcaatattaaagttttttacggacacaagcccatcacgacatcagcaccgggacaacaactagagcttttttaaggatataattacggcttatatccccatattattgatatataaacgggatttcacttaatagtgaaatcccgtttatgtaaccacaccctttttctcaatcctaacaaactccatatattactgtattacagataattatacatattgtggtgtttgttatcttgcaaagatacgaattttaaagcaaatcacaaccgtggaaacgattaacggtgaggacgaaatggtgtttgttatcttgcaaagatacgaattttaaagcaaatcacaacgcactcgcgccccgtgccatttcccggcttggtgtttgttatcttgcaaagatacgaattttaaagcaaatcacaaccattcatttgacgaatatcaaaacgtgcaaggtgtttgttatcttgcaaagatacgaattttaaagcaaatcacaacaggtataggtcgctcgagcttgcatcattgggtgtttgttatcttgcaaagatacgaattttaaagcaaatcacaacaggacggggcgttggtttgctcaataaagaggtgtttgttatcttgcaaagatacgaattttaaagcaaatcacaacacaactccgggtattcgtcgaatgtatccgggtgtttgttatcttgcaaagatacgaattttaaagcaaatcacaacatcggttacgttgttcgtatagtgcaaaacggtgtttgttatcttgcaaagatacgaattttaaagcaaatcacaacacaagttgatataattatggacagtattgtggtgtttgttatcttgcaaagatacgaattttaaagcaaatcacaacgttggcgcaagcaatcgacaaaatcaaggggtgtttgttatcttgcaaagatacgaattttaaagcaaatcacaactatgggctgtaaacacattgttttcgagtaggtgtttgttatcttgcaaagatacgaattttaaagcaaatcacaacgaccccggcgtcgataagcaacattttgttggtgtttgttatcttgcaaagatacgaattttaaagcaaatcacaactattcaccgacagcaatgtaacggatttttggtgtttgttatcttgcaaagatacgaattttaaagcaaatcacaacctattactaagcgttacccaaatcggaaaaggtgtttgttatcttgcaaagatacgaattttaaagcaaatcacaacttatggatacgccggatatgaaagccaaccggtgtttgttatcttgcaaagatacgaattttaaagcaaatcacaacgacgctcgttttaatcttcttttctattaggtgtttgttatcttgcaaagatacgaattttaaagcaaatcacaacggtaacttcataatgcacgtccaatccgcggtgtttgttatcttgcaaagatacgaattttaaagcaaatcacaacaccgggcgtatgatttggacggactgaaagggtgtttgttatcttgcaaagatacgaattttaaagcaaatcacaactaaagtcgcacgattgttcgtaaccggaatggtgtttgttatcttgcaaagatacgaattttaaagcaaatcacaactgtactgaagttcttgaacctctccgtgtggtgtttgttatcttgcaaagatacgaattttaaagcaaatcacaacgtaatggcgctgcaggtgctacaggctctaggtgtttgttatcttgcaaagatacgaattttaaagcaaatcacaactgagaactttgagtatggtgttcagtcacgggtgtttgttatcttgcaaagatacgaattttaaagcaaatcacaactgtttttgtactcataattactaatttttggtgtttgttatcttgcaaagatacgaattttaaagcaaatcacaacaagagggctgtatctcccgtatcgctcgtggtgtttgttatcttgcaaagatacgaattttaaagcaaatcacaactgatttcgatttctgcaatagatctgagaggtgtttgttatcttgcaaagatacgaattttaaagcaaatcacaacatgcgtctcagggcgatgctacggttacccggtgtttgttatcttgcaaagatacgaattttaaagcaaatcacaacatcagattgaaacgaaaatcacatttgacgggtgtttgttatcttgcaaagatacgaattttaaagcaaatcacaacgtctgtggggcgctccgacggcacaagccggtgtttgttatcttgcaaagatacgaattttaaagcaaatcacaacatagtctgcatgccaccgcagcacggaaaaggtgtttgttatcttgcaaagatacgaattttaaagcaaatcacaactatacgggcgacgatacaaaacaaacatcgggtgtttgttatcttgcaaagatacgaattttaaagcaaatcacaactctatcgccgcagagctgacgcacacgccaggtgtttgttatcttgcaaagatacgaattttaaagcaaatcacaactatagaagttcaggtaattcagcccattatggtgtttgttatcttgcaaagatacgaattttaaagcaaatcacaacatttttgctccgtataattaaaaaaggaggggtgtttgttatcttgcaaagatacgaattttaaagcaaatcacaactaatgtgtttgtaaaggagaactggtttagggtgtttgttatcttgcaaagatacgaattttaaagcaaatcacaacacggaaagtatgaaggcactcgaggagaaaggtgtttgttatcttgcaaagatacgaattttaaagcaaatcacaactcgttataagataaataatacaccttctgtggtgtttgttatcttgcaaagatacgaattttaaagcaaatcacaactcgtctacagcgctctgagttcattggtggggtgtttgttatcttgcaaagatacgaattttaaagcaaatcacaactcatccatttagagttctgccatctagagggtgtttgttatcttgcaaagatacgaattttaaagcaaatcacaactcatattggatgggtgaaaaaagtaattcaggtgtttgttatcttgcaaagatacgaattttaaagcaaatcacaactcatattggatgggtgaaaaaagtaattcaggtgtttgttatcttgcaaagatacgaattttaaagcaaatcacaactaaaggctaagagcacgcgaattttcaagaggtgtttgttatcttgcaaagatacgaattttaaagcaaatcacaaccaatgaacacggctgcgagtgttttatgcggtgtttgttatcttgcaaagatacgaattttaaagcaaatcacaaccggagataaaatttgacccagttgaaagaggtgtttgttatcttgcaaagatacgaattttaaagcaaatcacaactataaggctgatgactttcatcggctacaaggtgtttgttatcttgcaaagatacgaattttaaagcaaatcacaacacacgactaaatttcttcggcgtaccttgaggtgtttgttatcttgcaaagatacgaattttaaagcaaatcacaacgtggatttatttattaatttatttatataggtgtttgttatcttgcaaagatacgaattttaaagcaaatcacaactgcttgcccaagtaaaccttgacttagattggtgtttgttatcttgcaaagatacgaattttaaagcaaatcacaacctatataatgcaaatataaacttaatgatgaacaagtgtaaaacaaaagggcagacgaattaaattcatctgcccttaaatataaagtctgtttattcacacagcttattcagccttgggagcttcttccgctgcaggagcctctgttactgtctcctctgcaacgggagtttcagcctctgcctttgttgccttgcgagaacggcgtgttgccttcttctttgttgtggtcttagccatattctcgtcgaagtctacaagctctatgaagcaaatctgtgctgcgtcaccctggcgtgttccgagcttgatgatacgtgtgtatccaccgggacggtcaccaacctttgcggcgacctctccaaagagttcttttagagcgaacttgttctgaagataacggaataccacacggcgtgagtttgtagagtcgtcctttgagcgtgttatcagcggctcaacgaacttcttcaaggcctttgccttggctacggtcgtagtgattcttttgtgcattatcagcgagatggccatgtttgcgagcatcgcctcacgatgagatgcagtacgacctaaatggttgaatttcttattgtgtctcatttttttgttattctttatctaatttgtatttagaaatgtcggttccaaacgacagattcagactctcgagcaaatcatcaagctcggtgagcgatttcttaccgaagttacggaacttaaggaggtctgtcttgttgtactgaaccagatccccaagattatccacatcagcagccttaaggcaattgagggcacgaacactgaggttcatgtctacaagacgtgttttgagcaactggcgcatgtgcaatacttcctcatcaaactcttggttgccgtctacatctgcattttcgagagttatcttctcgtcagagaacagcatgaagtggtagatgagaattttcgcagcctctttaagtgcgtctttcgggtgaatggaaccatccgtggtaacttccaatatgagcttgtcatagtcggtcttctgctcaacacgatatggctcaacagcatattttacgttacggatcggagtgtaaatagaatcgattggaattacattaacatcggtacagaactcgcgattctcatcagcggggacatatccgcgacctttattaatggtaagatcaatctgcattgaagcttttgagtctaaatgacaaatcaccaaatcagggtttaacacttcaaatccagtcagatacttgcctatatcaccagccttaaactctgtagaattttcgactgtgatacttactttttcattctcgaattcttctactacttgcttgaatctcacttgtttgagattcaagataatgttagtcacgtcttcttttacaccggatactgacgagaactcatgctctacccccgcaatgcgaatggtattgatagcataaccctcgagtgatgaaagaagaatgcggcgcagggaattaccgattgtaacaccgaagccaggctctaacggacgaaactcgaacttgccgaatttgtcactagcctctaacattacgactttatcaggtttttgaaatgctaatatcgccattaatttaatgatttatttagagtacaactcaacgattaactgttcctttatattctccgggatatcggcacgctccggcttgtgaagaagcttaccgctcttggtggtatcatcccactctatccaaggatatttgctatggttaaaacctgccaatgcagcctcaataacttcaagagactttgacttctcacgaacagctatcacctgaccgggcttaaccgaatatgaaggtatattcactacattaccgtcaaccgtaatgtgcttgtgtcctacaagctgacgagcagccgcacgagtaggagcgattccgagacggaataccacattgtcaagacggcactcgagattctgaagaagaacctcaccggtcataccgtctgcctttgcagctttctcaaacatgttacggaactgacgctcaagtactccgtatgtatacttggctttctgcttctctgccaacatgacaccgtactcagatgtctttctgcgacggttgttgccatgctgtccgggagggaagtttctccgggacaaaactttgtctgcgccgaaaatgggctcaccaaaacgacgcgcgatttttgatttcggtccaatatatcttgccataattcttttatgcttttaaaacttgttatatcaacaactaagtacctgattatactcttcttctcttcggaggacggcaaccgttgtgcggcagcggagtaacgtcaataatctctgttacctcaatacctgcaccatgaacggcacggatagctgactcacgaccgttacccggacccttaacataagcctttaccttacgtaaaccaaggtcaaaagcaaccttggcgcaatcttccgctgccatctgagctgcataaggagtattcttctttgaaccacggaatcccatcttaccggctgaagaccaagaaataacctggccctctccattggccaaagatactataatgttattgaatgagctatgaacatgcaactgtcccatagcgtcaacctttacatttcttttctttgaagtgactgttttctttgccataattctaaattcttaatgagttaattatttagtggctttcttcttgttagcaacagtcttcttcttacccttacgtgtacgagcattgttctttgtgctctgaccgcgaacgggaagaccgttacgatgacgaactccacgatagcaaccaatatccatcagtcgcttgatattcaactggatctcagaacggagatctccttcaaccttgaattcagcgccgataatttcacggattttagctgcctgatcgtcagtccattcactgaccttcaggtcgcggctcacgccggccttatccaatatctttgctgaactacttcgacctataccatagatataagtcaatgcgatttcgccacgcttctcttggggcaaatctactccaacaattcttattgccattgtaatgattaaataaaaaaatgattaataattaaccctgacgcatcttgtacttagggttcttcttgttgataacgaacagacgtcctttacgacgtacaatcttgcagtcggcattacgtcttttcaatgatgctcttgtcttcatatatttctctattgtttatttgtatctaaatacaattctaccctttgtcagatcataaggactcatctctacctttaccttgtctcctggaagaatcttgatatagtgcattctcatcttacctgatatatgagcaatgatttgtacaccgttttcaagttctactcggaacatcgcatttgagagagattccactattgttccatcctgttctatcgcagactgttttgccatactttattaatttacttctaaacgttccaatccttcaaacgaagataaaatttctgcctttcctttacgcactgataccgtatgctcaaaatgagccgcaggcctaccgtcaagtgtacgtattgtccatctatccggcatcagccatatattacgcaatcccattgttatcatcggctctattgcaagacacataccggacttcagcagcataccactacccgacttaccgtaattaaaaacttgcgggtcttcatgcatctttcgtccgatcccatggcctgtcaactcacgaacaaccccatagccatgtctttcacaataattctgaacagcatttcctatatcaccaagattgtttcctgccactgctttctctatacctaaataaagagacttctttgtcacgacgagcaaattccttatatcctccgaaacttcacctacactaaacgtataacacgaatctccattgaaaccattaagaaatactccacaatcgatagaaatgatatcaccgtctcttagaattgttttcccatcgggaattccatgaaccactatatcatttacagaagtacagatactggcaggaaacgactctccaaacggattaggaaatcctttaaatacaggaacagcatggttgtcttttataaactcttctgctatcctatccaattggagagtcgtcactccaggttttatatgttttgccaattctccaagcgtcttgctcacaagtcggcttgcttggcgcatcaactcaatttcatcctctgtcttcagaaatacactcatccctgaagcaaaaatcaatatgcggacactccaccacggccatgaatacggccagagttaagcaacccgtcataatgacgcatgagcaaatgactctctatctgttggagagtatcaagtacaactcctatgagaatcaacaatgaagttccaccaaagaactgtgagaaagcatcctgcacttgaagcaatcccgcaagagccggcattattgcgataaaagcgataaacaacgaaccagggaaagttatacgagacattaccgtatcaatataatccgctgtgtccttacccggctttataccgggaataaagccattattacgcttcatatcttctgccatctgtgtcggattcaaagttattgcagtatagaaatatgtaaatgcgattatcaacaaagcaaatatcacattatacagccaactatgatgatccaacattgagcgtacgacccaatttgcattctcttgagatgaatactgcacaatagccaatggtataaacatcaatgcctgtgcaaagattatcggcattacattggcagcgaacaacttcaaaggtatgtactggcgtgcaccgccatattgcttattgccaacaagacgctttgcatattgtacagggattttacgagttccctgtactaagacaatagccgcacaaacaacacagaaaaggatgattatctctgctatgaacataacaagtccgccacctgtcg

SEQ ID NO: 2221 - DNA, 24170 bp, synthetic construct
  source 1..24170: mol_type = other DNA
  misc_feature 1..24170: note = Synthetic
cttcatgatttcataaccttcattaccacaatgctctcaccctcaatactgcaagtgggctttggtcacgaaataagacttgcattagcctattgcgcactgatgatgctggttgaatggcttacgcgtgaacgacggtttggactcgactttggcgactcgccaagtggcatactacgataccggtgggtgcgatggatgatttatgtcacgttgtatgcttacatagtcataatgtcggggttacactctaattttatctatttccagttctaagcaatgaagcgatttctcaagaaaatattgatttactctattatagtgatggctattttcattgcttatgaggtggcattgctctttgttccaaatgagtattcctacaagaaaaactatatagaggaccacaagcatcaactgaaggtgctagtgcttggaaactcgcatcttgccgactgcatcgaccccagcttgctgggtgatgacatttttaatgcggcgcaaccaggacgctcggtgtattacgaccttcaattattaaaggaatatattgggcaaatgcctcaacttgagtgcgtcatccttccactaagcgtagattattactactggggacatcgatttgaaaaagtgcacgagccaaaattcaccacttatcgatgcatgtaccataaatacatgggctacacctacgaagacaacgagtggtggcactggtcagagattttgagctcgttctacaaccaccccgcacgcttagttgacgctctatataaaccgctcactgacctcaccatgtgcgactcgttgggagtagaaattgatgccagcatcgacactcgcaaagacgactggtacaaccagcaactacccagcgacacgccattgaacgattccaccaagctacatctctactacgtcaacaatctgcgcatctatagcgagatagtgatgcttgcacgggcacacaagactcgtctcattttccttgctatgcccatctacaaaacggcacgacagcgcatcaacagctatcagcttcatgagctagacctgtttgttcaacgtatcaaacgttttaatcctaacattgagttctataattttattgacgcccctggctacaccgagcaagactactacaattccatccaccttaacaacacacatggggcacgcaagtttgcacctaccttaaagcgaattctaaataaccggcagtgctcaaagcgttgacagcaggcgatagaaatcgcccgttgggatggcgagaaactctggctcaatgcggtgtcccagctgcgatgactcgtggaaacggtcgcccacaagagctcgatacttgccgcgcatgtcgccgagcaattcgtcatggtcgctaccaatgatgtgtgtcactggggtgatgaatggttcaatgccacgaaactcatctaggtcgctaggctggcaagtgaaagtttgcactccatcttcacgctgattataatactccactgtgtgccctatctcgggcatgtattgcatgctattttcagggttgagcgccggattgacagcaatcttgggaatttcgaccttcgcacacaacgtgtaataaccacccagcgacgagcccgccaggatatcgatgccatgaagcgccacatagtcctcaattttcttaatcgactcaacgggatgatgtgtcacgtcgaatgcatgaatttcatagtcattataaacctgcttaagggtaatgattgtgctactccgtgccgagctacggaaaccgtgaatgtataatagtttcttcttcatagtcatttccttaggaaaaaagatgtgggcagacaactttattacacccacccacatcacatttagtcatttaattttatctctatttcttaggcgtcttcttggctgatgtttttttcccggtagctttcttggttgtagccttcttctcgggcttttcttctaccgtttcctcaacatttggaacaaagtcgcctgtggtatccttaacaatgttgttgcgcatcatctccacctcgcgattgagttcttctatctccttctcctgattgcggatagtaaggagcaaggcgttaagctcctcgttttcgatctcctcagggaactgctcgcgcaccctaatcatgaagtcgctcagcacgttcatgtagttggtgaaagcggcgtagggcgagtcgtaggggctatagtgcgagtgaactgagccgtcgctactgtgcttggtactcatgtagtagaagtggtcgctcgcttgcaaatagttccagtcctgacgtatgcgcttgtcctctatcaagcgtatgcgctcgctcaagcagtaaagcttgttaacggcctcttcctgcaagatatttcccatccatgcgctagtgtcgcgagcctcgtcggcccaggagatgggatgcataacgctgagctcacccactggtttgagcttgctcaccacctcgctaggagtcatgaaagtgatacccctttgctcggcaaatcgaggtaaagctttcataaactcaaatattccactctcgcgtggctgcaactctccaaatgtttcatagttcatgaacaggttcaccagcatctcctcatcgggcaaagtagcaatccagtcgatatacttgtcggcagtgagaggataagccgcccactcaggattactaaagcggaaagctatatcatcgctcagcttaaagttctttaacaagagcttgagcttgggaacaggagccgccttatacaaatagttgggcgacttccagcccaatatgtgcttggcgccatcggttatcgcgcccttgaaacccattgaggcaaccatggcggcaatgtcatcgtcgtagataagctcggtattgcggaacaccttgggtcgctggccaaagagctgataaatcttctcgtcgtgagcctttacttgagccataaactcctcggggtcgacgagcgacgagagcgagtgagcataggtctcgctaaggaactcaacacaaccagtatcggcaaggtctttcatcgagtcgataaactcaggaacatattgctctaactgctccagtgctgtaccacttatcgagaatgccaccttgaatttcttgccattctctttaatcatgtcgagcaacatctggttagcgggcatgtaagaacgctgtgctatgcgtgtgattatgtcatcgttggcaaagtcgtcatagtagtaatggtcgttaccaatgtcgaagaatcgataagtcttcaggcgaaacggctgatgtatctgaaaatagaaacagattgatttcatgttgatagtgtgtgttatagtagtggataattatctattaataagtcgcttgtaaatatcaataaccttggcgccagcgcggtcccacgttatcttattaacctcttcaagtccctgctcacgcaactgcttgtacatggccgggtacttgataatggaatagatagcatcggcaatggcattggtatcccagtagtcgaccttgataacattgttcaaaatctcggcacaaccactctgcttagaaattattgacggtactcccatctgcatcgcttccagtggcgagataccaaatggctcactcaccgaaggcatgatatagacatcgctcgccttgagcatctcatacacttgcttgcctttcaagaagccagtgaagtggaaacgaccggcgatgtgacgacgtgcagccaggcgaatcatcttctccatcatgtcgccgctaccagccattacaaactgcacgttatttaccttttgcagcacttgccatgcggcatccacaaagtattcgggtcccttctgcatggtaatgcgccccaggaaagtcaccaccttctcatgcttgggtggcacttccaagttgagcagttcctggctcagtggttccacggcgttgtgcacggtagtcaccttgtcgggactgatgccatatttttctataaccgtcttgcgagtgaggttgctcacggtgataatgtggtcggcattattcatgccatctttctcaatgccgaacaccgtggggttcacctttccacgactgcgatcgaaatcggtggcatgaacatgaatcaccagtggcttgcctgtcacttgcttggcatgaatgccggcaggataagtgagccagtcgtgcgagtgaatcacgtcgcaatcgatggtgcgggctataacacctgccacgatggagtaattatttatttcctcgagcaggttgtcggggtagcgacccgagaattctatacaccccaggtcgttagtgttcatatagttaaaatcgctatagatgtggtcgcgcaagtcaaaataagtgcgtgggtccagcactttccctattcgcccttccacatagtcccagttcacatcgcgccatgccacgggagtggtgttggcaccaatgatgcgagcaaagtccttgggctcatcgccccagggcttgggaatgacaaaagtgatgtccatgtcgccacattgtgccatgcccttggtaagaccaaaacttgctgttccaagcccccccaggatgtgaggaggaaattcccagccaaacattaaagccttcataagtaattatcttagtgttttaagagtttataaaaccaatattcttgaacaagcgcaacacacgcagcacgccgcccacattaggagcataactcaccgcgccacgaccaatgaatggcgggttgccgtcatatagctccgacagagtgccaatgcctccctgcgacatttcgtcctcaaaacctatcatcatgcgctcgatgaacgacgcacgattgagaccaaacacctttatataagcatcggtatagaagcccatgagccatggacgcgccgagccggcatagtaggcaacccagcgttcctcgggattgcccaggtaccacggcttgtagccccagctcttggggctgagggtgcgaagtcccttgggggtaagcaactcacgagtcaccacatcgagcacactcttgcgctgacgacggtcgagcggtgagtaatcgagtccggcggctattaccatgttagggcgcacgctggggtcggcataggcgccgtctacatagtcgtagaggtagccatagtcgttaaggaacatgtcgacaaatgcaggcttggccttgtcgctgatttccttgagtgaggcaatatattctttttcttgctccacctcggcaaacatctcctgagcaaacatcagcgcattgtaccacagtgcgttaaactcaacgagatagccagtgcgcggtatcattggggagccatcggcgtgggtgctatccatccacgacatgggcctcttggtgccgtcggtggttactaagccattgggctgcaagaataagttggggtgatacttgtcaataatctgtcgcaacaatgccttaacaagttcgccatagcgctctcgagcgacagccatgccagcatctttagcgtactcctgaagtgaccatattgcccacaacgggacatcggggaggtcgatacctttcaagtgcttgtcgagagagccatctttcacaaatctcatcagggcctcgctggcggtgtccattattttctcaaagtcgggacgatggtggttagagatagtgcaacccggcaaagcgatgaactcgtcgcgggcacgaatcttgaaccatgggtatcccgcaaggatgtagttaccgtcggcattggtaagatagaactgcttggcgctgttcttcaagcagttatagaagctagtgcgtggtgtacgggagtttacttcatcctcgtgcatgcggctcaggttgcgagtgttcacctcctgagtgccagccgagaacaccagtgtctcgcctttcttgatgtcgatctcaaaatagcctgggacatacaggtcctcgctataagggatgccacgctccatgtccttgatatattcaatgcctttgtaccagtgggggtcaaaaacaaaccgtggcttgtgattgaactgcatgtagagtgtgggataaccctcatacatgcaggtggcaataccattttgcacctcacgatattcctgactggcaaccgagttctcaacacacaggtcgttagcattgcggaatgccaagaatgggcggaactgcagcgtggtcttagagtgcgcctccactagggtgtagcggatgaggatgcggttttcgttagtaatgaagattttctcgcgcttcatgataacaccgcccacacggaaggtgtgagtgggaacgcgctcgcaatcatactcacgaatgtacttgtgaccattggggctataaacattgcccttgtagcggtgcaatcccaggttgaaggcggcgccatgctggattaccgtctcatcgagcgatgagagcaacacatggttgttgtcgtcaatctcgggaataggaatcaccagcaagccgtgctgcttgcgtgtgttacaccccacaatagtggtgcaatgataagcccccgactgattggtcctgagaatctccttagtgagagactgctcaagatttatcatcaggtttttatcaaattttaaatagctcattaagttttaaagtatctaatattgttaatattttccaggttattatggcattaaatcattccatacacattactcattgtaatcgtgacgaatttacaactttttactaacatggacaaactattttcaatctttttatcaacagatttataatttgtactatctttgcacttagttcaacaagtattcaacactttatatcatgacatcaagaagccacatcgctgctctcaaaaaacaaaccggcgagtgcaactgcgcacaagccgtgacttccacctatgccgacatcgccggcattgaccacgacacagccatgaatgcctgcaacgcctttgccgcaggcatgggcaacatggagggcacttgcggggcgctggtgggagcaggcattgtgctggggcttgtcaagcgcgacaagatgcggtcgatgaaactcatgcgtgagataatgacacgtttccagcttgaggctggagccactcagtgccgccagctcaagggtgtggacagcggcaaaccactactcccctgcccccagtgtgtagccaccgcatgtaagctacttgaagagtacctataaacacttgtcaaaattactaaaacttaaatcatatttctatcaaaaatgaaacttcacaggtttttatctctctttgctctggctgtggtggcggtgactaccatggctcagaagcaagctatctctatcaacgacaccaagcatgctcaaaccatcagcgtggaagccatcgacgacgacatcgtcaaggtgcaggtcacaccccaagcatggaacgggaagccactgcagtcgctagtgagcgacaaggcgctcagagaggcccaagccaccgtccagcttaacgataatggcagcgacatggcagtgatgaccacccaaagcggactgcgtgtggtgctcgacaagcagctgggcagcgtgcaagtgagctgtggcgacacattcttcactaccgacttgtgcgaccgcaagacccaaggggtggtgcgactgttgcacaccggcaaggagtcgttctacggagccggcgagcgaggttactcactcaaccttgctggcgacacgctcatcaactacaacaagcaaaactatggctacgtggcaggcgagaagcgcattagccaaatgggcatcaccatgccgtttgtgatatcgtcaaagggctacggcatcttctttgacgacttctgccgctcgtcgctatatttgggagaagatgggattgagtataaatcaacctcgccccagcctctcacctattatataattaatggcaacggacgcgtggagaacgtggtcaagaacttcaccgcgcttgtgggtcgccaggacttgccaccactgtggaccctgggttatatcacctcaaaatatggctatcacgaccagcgagagagcgagggcgtggtcgacacgctcaagcgtgcgggctatcctctcgacggcatcgtgtttgacctctactggtatggcaaggagcaagacatgggtcgcctggaatgggaccgcgaccagtggcccgaccaccgtggcatgctcaagagatttaaggacctgggcgtgcatgctgtaaccatctcgcaaccctatgtgcttaccaacggacgagctatcaacaactatcgcgagctcgaccccaaggggatgttctgcaagactagtggcagcgacaccacacagacggtcaccatttgggtgggcaagggaggcatgtttgacgtgtcgaaccccgccacccgccagtggctcagaaaccgttaccgcacgctcactaatgagggcgtgaccggctggtggggcgacctgggcgagcccgaggtgcatcctgaggcaatacgccaccacaacggtctcacagccgagcagtatcacaacgtgtatggcaacgagtggagtcgcatcatctacgacctctttaaggaagaatatcccgacgttcgccccatgataatgatgcgcgccggcacggcgggcttgcaacgctactcggtgttcccgtggtcgaccgacgtgtcgcgctcgtggggaggtttccagccacaagtcaccatcatgctcaacgcgggcatgagcggactgggttacatgtcgcacgacgtgggcggctttgccatcgacccggcatgcccacgcgacagcgagctctacattcgctggctacagctaggcttgttctcgccagtgctgcgcacccactcacaacagcttgccgagccctatcactacaccgagtatggcgacttgccactgcgcatcatccgtgagcgttatcgctggctgccctacaactacacccttgcctgggagaacgccagccagggccttcccatggtgcgtccgctgggcttctacgagagcgataacctcatgagtcgctacgacggcatcaccgaccagtacctgtggggccacgacatcatggtcgcaccagtgatgaagcagggagccacaagtcgcgaggtcaccttccccgagggcacctgggtcgacatcaacaaccccgctaagcgctaccacgggcacagcaccatcacctactcagctccactcgaagtgttgccactcttcgcacgagcaggcgcatttatcccgcaggctaattacaagatggagaacgtgggcgactaccgcccctccaagctcgacatcacctactatcaaggcgatgagccatcgagctacaccctcttcgacgacgacctcaccagtacaggcaccctagcccagggcaagcatcgcctcatcaccttcagcgcctcccccactgccagcggttgcacattcaccatcaagggcgagggcgcagggacacagcccactaaggactaccgcctcataatcccagcatgcaaagcgcagcccaagaaaataaccgtcaatggaaagaaggccaaagcctccttcaaccgcaccaccgcagcactaaccattccactcacaatcaaggacataaacataaccaccacagtgaaagtggaatattagttttgagagctaaaccactattgagtaatacaccttatcactcaatagtgaagaagaataaaagaccttttttagaataacaaactgttccaaagcaccaactttgggacagtttttattattatattatagaacaagcagaattttacactttttccagccatttaatttctttttattttgatgtgcccgattttggcactatcaatgcttatatttgcaccagaaaaaaaagaacgaggctcgaaagtcccgctcttgatgttttcacaacggaataaatccttattgtgaattgcttcaaatttgtcctgcaaaattagacaaaataatacagtcaaacaaatattattataaaaaaaacaactttttcttatatttttgctatatttgcaaaaataaggaataaaatacttaaaacatgaaaaaaattctgggattagatttaggcaccagtagcataggctgggcagttgtcaatcaggcagagaatgacaatgagaaaagcaatattgttaagcttggtgtaagagtgaatcctctcactgttgacgaaaaaggaaactttgagaaagggaaaagtatcacaactacagctgaaagaactataaagcgtggaatgcgacgcaatctacagcgctataagcaacgtcgcaacaatcttgtgacagtgctacgtgataataacattataggtttagaaagcaaattgaccgaggacggaacaggtagcacttttgaaaccctagaacttagagcaaaagctgtgaaagaagaagtttctcttgaagaatttgctcggatactaatctccatcaacaagaaacgtggctacaagagtaatcgcaaggcaaacaatgaagatgaaggagaactggttgacggaatggctgtggcccgtgagctatacaacagaggcattactccaggagaatatgtttatgaactcctgaagaagcaaaaacgctataagccaccgttttatcgctcagatttagtggcagagctagacgcagtgtgggaaaaacaatcatcctattatcccacagtacttaatgaggaaaccaagcaaataatatcaggtaaaaataaaaccgaaacacgcaagtatttctatgcggcacacaagattgaagctgccgaagagaaagacagcaaattgcgtcaagtaacctattataaatggcgtgctgatgcagttaaaacacgcttggaattagggcaacttgtcacggtgctatgcgagataaatggtgacatcacggcatcaagtggctatcttggagcaattggcgatcatagcaaagagctagaacttaaacaccaaactgtgggcgaatacttgtggggcctaataaagcaaaatcctcatcaaagccttaaaaacattgttttctatcgcaatgactacttgcatgagtttaacaccatttgggaaactcaagcaaagtttcatcctgagctcacagctgagctcaaggacaaggtaggtcaacatttaattttttatcaacgtagacttaagtcgcagaaaggcttaatctcatattgcgaacttgaaggaaaggaaatcacacttgccaatggcaagaaagtgatgacaggtcctcgcgtatgccctaagagttcacctttgttccaagagttcaagatttggcaagacctcaataatcttgttctagaacgcaaagaggtcaaacgctcaataaagaagaaaatagatggtatgagctcgttgtttggcgatgaattttgcgaagaaagattcgttactttgagcaaagaacaaaaagacactctttataaggaactttattgcacaaaagaactatcggcaaaagaaatgctgaaaatacttggccttagtgacaaggagtattctctcaactacaaaaaagtgcaaggaaatatcacccaggtaacactgatgaatgcctataagaacattgttgagatgactgggcatgatgtagataaattcgataaaatggatgccgggaacaagatgcacttggtagaagttgtgcttgaaaccttgggagcaagcacaagtttcttgaacttcaacgctggcaatagccatgaagaaatgcagaaaaatcccatgttccagttgtggcacttactctattcctatgaagatgacaacacggctactggtaatggaaaacttgttgagcacatttcaaagttaaccaatttgccagaggaatatgcctcaataatagcaagaactacctttgttcaagactttggttcactgagttcaaaagccatcagaaaaatcttgccattcatgaagaatgatggcaaggtctactacgaagcatgtgagctagcaggttatcgacattcaaaacagtcattgacaaaagaagagattgaaaagcgcgaacttcatgaccatcttgaaattctgcctaagaacagccttcgcaatcctgtggttgagaagattattaaccagatgattcatgttgtgaatggttgcattgatgaatttggcacatttgatgaaattcacattgagatggcaaggagcctaaagcagagccaaaaacagcgcgaagatgcaactacacgtttgaacaaaaaaaccaaagaagttgaaaacattaagaaactactcaaagagtctcctttcaatatttccaaccccacacgcaacgatgtgctaaggtatcaactctatgaagaacttgctcctaatggatataagacactatactcaaacacctatatcagcaaggagaaacttttcagtcgagattttgaaattgagcacattatccctcaagccaaggtgtttgacgactcttattccaacaagaccatagaatcacactcggctaataatgaaaaagataacatgaccgcaatcgactatgtggcaatgaaaggcggtgaggctggagttgaggaatacaagaaacgcattgaattccttaataaacctgcaacagggaagaaatacaagaacctgacaactgttgaaaaagacattgaaaatggtttcttgaaccgtgacttgagcgattcgcagtatatagctaaaaaagcaaaagaattgctactgcaggtatcaaggattgtagttcccacaacaggttcgattaccgcacgcttgcgtgaagactggcagcttgtcgatgtgatgaaagaacttaactgggataagtatgacaaactgggattaacaacagctgagcgcaatcgtgatggccatgaggtgcgtcgcattactgactggacaaaacgcaatgaccaccgccatcatgccatggatgcattggcaatcgcattcactaggcattctcacattcaatatctcaacaacctcaatgccaaggatgaagatgagagcaaagattccaacatctatggtattgagaaaaaagagctattgaaaaacaggaaatttgttccgcccatgccacttgatgagttgcgtgcccaagcaatgaaacacctcagcaagatactagtttcaattaaggcaaaaaacaaggttacaactcagaacatcaacaaagtgaaaggtgcaaaaccacaattgacccttacaccacgaggacagttgcacaatgaaactgtctatggcaagcgtcagcgttatgcaactcgcgaagaaaaagttggagctgcgtttgataaactgaagattagcaccgtttgccgcaaggattatcgtgaagctcttgccagtaggcttgccgataatggtggtgaccccaagaaagctttcacaggtaagaattctcttgctaaagttcccctattcattgatgctaatcacaccgtcaaagttccagaaaaggtaaaaacagttgtccttgagacctattacaccattaggaaacccatttccaaggacattaagctagagaaggttgtagatgagggggttcgccgaattcttgaacagcgactcgcccactatgacaacgatcaagcaaaagcattctctaatcttgaagaaaacccaatttggttaaacaaagataaaggtatatccataaaacgtgtaaccatcaagggcgtgaatgttgcaactccacttcatgtgaagaaagacaaggatggaaatgtggttcttgacaatcaaggtaaagaaatacccgttgactatgttagcacctcaaacaaccatcacatagcaatctttgaagatgctgaaggcaacttgcaagagcacgttgtttcgctctatgaggcaacagctagaaaatgccaagacctacctgtagttgatcgtgaatacaacaaagacaagggctggaaattcatgttcacaatgaaacaaaatgaatattttgtattccccgatgctgaaagtggatttaatcctgccgatattgacttggaaaatcccatgaacaacagcattattagcccacatctgtttagggtgcagaaattgacgactggagattatttttttagacaccatcttgaaactaatgtggaagaaaataagatgcttagaaatactacatggattaggctacgaacaacaaattatttgagaggcataataaaagttcgcattaaccaccttggcgaaatagttaaagtgggtgaatacttatgattaaacgcactttatactttggtaacaccgcctatctgagcatgaaaaatgctcagatggtgcttcgcatgcctggcaaggatgatgagcaagatgtggtacgtacctttcccattgaggacctaggcgtggtaattcttgatcataagcaaataaccatcacgcaaggactaatggaacgattgatggaaaacaactgtgcggtcattacttgcgacagcactcacatgccctcgggattgctactgcctcttgacggccactcaaggcagagcgagcgattcaaggcgcaacttgcttgcagcaagccattgaagaaaaacttatggcaacagactgttcaagccaagatcgccaatcaggcttcggcactagatcaatgtgtgcctgagtgcaagactggcaatatgcgtgcatgggttgatgaggttagaagtgatgacaacatgaatcttgaggggcgtgccgctgtgtactactggagcaacttttttcctgaggttcccgatttcaagcgctctcgtgaaggtttctttccaaacaatttgctaaactatggttacgcaatattgaggggcgttatcgcaagaaatctggttggctcggggctgttacccacaatgggtattcatcatcgcaacaattataacacttattgccttgccgacgacgttatggaaccttaccggccattcgttgatgttcttgtcaagaaagtaatgaaagaatgtgacgatccctgggacttgtctactactgtaaagcgcgaattgcttaccattcccacaattgacgtgaaaattaatggaaaacggcgaccactgatgatagcagccgaaatcacaacagcatcacttgccaggtgcttcactggagagttacgtaagatttcatacccttatttttaagaaagtttaactaaggatgtcgtcctgtgagcgatttagtgagtatagaataatgtgggtgcttgtattctttgacttgccaacagactctcgcaagcgtcgaaaggcatacgccacatttcgcaagtgcttgttgcaagatggctttgctatgattcagttatccatatacgcaaggcattgtgccagtgcacaaaacgctcaggtacatgttcaaagagtgaagaacatgctaccgcaagaggggaatgtttgcatcatgactattactgacaaacagtttggaaacatggaaattttcaatgggagaagtcctgatacgccaaaatgtggcggtcaacaactggaattgttctagaaataataaatccacctcgtaggggtggatttattattgtcgtaatacaacttttttaaattctaatcaacactacaactctttgttattgaacaagttgcacacattgagttgtattatctgatacaaagatacaaatttgaaagcaattcacaacatacctaatagaaacaccctcgtatgatgagttgtattatctgatacaaagatacaaatttgaaagcaattcacaactgacactctgcactacctactagagagctagttgtattatctgatacaaagatacaaatttgaaagcaattcacaaccaacttgcgtgccatgtcgtcggcatctatgttgtattatctgatacaaagatacaaatttgaaagcaattcacaacgccggttgccctcaatgcgtcatacattggttgtattatctgatacaaagatacaaatttgaaagcaattcacaacgcttggcagggcgtgaccgctaccccctgcgttgtattatctgatacaaagatacaaatttgaaagcaattcacaaccattgcatcggcatttagcgcactagatggttgtattatctgatacaaagatacaaatttgaaagcaattcacaacggcaaagtggacttcgtgcaaagccttcttgttgtattatctgatacaaagatacaaatttgaaagcaattcacaacggcgcttgccagccttgaactcgttggcaggttgtattatctgatacaaagatacaaatttgaaagcaattcacaaccggcaactatgtgtggaaacgactctacacgttgtattatctgatacaaagatacaaatttgaaagcaattcacaacagtagggcagatgctctgcacaaggcgagtgttgtattatctgatacaaagatacaaatttgaaagcaattcacaactgctccattatccctttcaacgaagatgtagttgtattatctgatacaaagatacaaatttgaaagcaattcacaacgtgtgagtgctgcgttaaaaagtgtttgtgttgtattatctgatacaaagatacaaatttgaaagcaattcacaactcaccagcttaagactgtaggcactaactcggttgtattatctgatacaaagatacaaatttgaaagcaattcacaacttgttgatgttgatgccacagccctcaacgttgtattatctgatacaaagatacaaatttgaaagcaattcacaactgggattgtcgattggtacgcacagcgcatggttgtattatctgatacaaagatacaaatttgaaagcaattcacaactgaggtgctaatcgctcaagctgtagccatgttgtattatctgatacaaagatacaaatttgaaagcaattcacaacgtgtaaggaggatgcgcttcaaaccttgcagttgtattatctgatacaaagatacaaatttgaaagcaattcacaacccctacatgtgattttgacgatacatcacggttgtattatctgatacaaagatacaaatttgaaagcaattcacaacttatgtgaaacggttatgacggtacataagttgtattatctgatacaaagatacaaatttgaaagcaattcacaacgcccccatgcgattagccatgttgagggctgttgtattatctgatacaaagatacaaatttgaaagcaattcacaacatagctgcaacaattatccgcaaagggtctgttgtattatctgatacaaagatacaaatttgaaagcaattcacaacagtatctgctttgctgagttcatgcgtaccgttgtattatctgatacaaagatacaaatttgaaagcaattcacaactgtcaccagtttgtcgttgatcttcacgcgttgtattatctgatacaaagatacaaatttgaaagcaattcacaacggcaatgggtgtgattgtagtggtgcgtgtgttgtattatctgatacaaagatacaaatttgaaagcaaatacacaacactattcatctgttatccaatcgtgtcttgattgggaggtgtttccattaaaaagtgaagtgcatctggatgcggattccgctgcggttgatgcctgggatgtcgcggtagttgatgcgccacacgtagtcgatacgtaggaaagtgagaatgttgtcgagtcccactcccacttccatgtagggtcgcttgcccatcttcatgcaaagggcgctagtggggaactgtagtagttcggcattttgggcggggtcgttcttgcttgtcagtgagccccacaatccacggaaggagatcacttctcgcatcttgaggcgcttgagcaatggaatgcgattgaggatagctccgttaatccagtaggtgacgtcccacgacaggtactggtcgttgacaaactccatggcgttcatgagcgcaaacgactcgggctgaatggtataggataggttggcgttgggcagcaacagttcgggataaggcaccttgctccaaactttaccggcgcgcaggatgatatcggtgtagccgaatgccgagaaccagaatcgtttttggattcctgcctcggtcttgttaatggtgtagtcgcttcccaggaagcctcgtggcatgaaagtgtgagagagtgtgaacaccggcgcatcctggttgatggggatgcggaaggagcgtgtttggtaaaatttctcacctggcgcatagcgcaaggtgatgttgaatccagctgtggtgtaatgacctagtgcggttttaaagccgtcgacaaatggcaggaatcgcgatgcctcgtggcgcaagtgctggagtgacgctgtgattgagaatcccgcctgggtctcgagcttgtattcgaggatcgtctctcgcagataaatcatcttgtcgtccttctggcgcttgagggcgagaaacacgttgtcggcattagtgtagaggtagtgctgccccagcttgtcgacgtcgtagcggtgtatgagtcgcaacgagttgacgggaaactcattggggtgccgtttcttgttgacgaaggagtattccagctgtcccatgtacttgaagcgctcgtcgcgcgtgccgtaggctacatagaacttagcaaaccaacgcttgctgaggcttgcggtggtcatgccacccagcctgaagcgtgcgccctcgagggagttgccgcttatcagggtgttcatgggtccgatgtcgaacttgctgtcgtgagcattgcgactagtgttgatgtatccgctcacgagtgtagtcaccactttttcgcaccagtagaagagcctggactggcgcaagcgtgcgagcatgtccttgacggtgtgctcgttcttgacggctaccacgggcctgtgtgccacccagtagttctcgtcttgcttcttgagctcggcgttaatcacctcaccattgtggtcaaagatgctcatgtccttgggtcgcttgaaggagtgaccgtcgtagaaagtttgtcgccgcgcataaatctcgggagtcttgggagctatctggaactccaccatgaggtcgtcgcgcaccttgagcctactgccgtcgggggctttgatgtagtcttgctccaggtagacctgattcacatagttgaggttaatcttgtgtggcacattcatctttatctttgagatgaacatggtggtgtcgctagccggcacatagagtcgccccaggaagccgaaggtctgagtgttgaacggtgtgaacgtgagctcatagcattccacgccatctacctcgagagtgtcgagatagtacttatagaagtcggtgccaatgcttgagagcgggctcacaaagcggttttgcatgaatgtgatgtcgttgctgtagatgtccatctcgcggaacacgtcgtcgatgaatcgcttgaggctctcggtgtcgtgctggtcgtcgatgccagcatggttagtcgccttaaccacctcgcggtgagtgctaggcgacttgcgatagtactcctcgctcactttctcctgtatggatagcggcaaaatcatcttgccggtaatatcgctcgtgtcgacatattccttgaggaacttaaagttttgagcgatgaggttgcgcgaactctcgctattgaaattgttcaagccaaaggatattttctcatacttgttgtagctgtaaaactcgtggtcgcgagggttgtacatgttgcgacgagcccgcagtttctcgacaaacgccactgcggggtttcccttcttgacatacttggcagtcttgcgcactatcacctcgttgagcatgacggtagtgggcacgagttttatttccaggtcggtgtgacgtcccagtggcacctcaatctcttgagtttgataccccacgtagttcactttcactttatcaaaaatcacacctgtgattattgtaaagccccccttgtcgttagttagcgcaccagtttgcgtgccagtgaggaagatttgcgcgtagggtaagccctcgcccgtgatagagtcgatcaccacccctttgatagaggtgtagccctcaggcgcttgcccacgccccaccagggctgtgagcatcaccatcatcaccaaaatatatctcttgcagtccaagtgggtgacagttgttggttgttttcgactttccttgtagacgttattttttaattagcaaagccacattttcgacatggtgggtgtgggggaacatgtcgactggctgaatggcctcgacacggtatttcttgtcgagctgcgcgatgtcgcgtgcttgtgtggcagggttgcaactcacatagactatgcgccgtggctcagcgtcaagaataacacgcaccacatcctcgtgcatgccggcacgtggcgggtcagctatcatcacatcggggatgccatgctgtgccacaaattcgcctgtgagcacgtctttcatgtcgccggcatagaacttggtgttctcaatgccgttaatgctcgagttaagttttgcgtcctcaatggcctcagggacatattcaataccaattacctcgcgcgcctggcgagccacaaagttggcaatcgtgccggtgccggtgtagaggtcatagactagctctttacccgtcagccccgcgaaactgcgcgccactttatataattcataggcttgctcgctattggtctggtagaacgacttgggccccacacggaacttcaagccctccatctcctcctcgatgtagtcgcgaccgctgtaaagaatgaattcctggtcggtgagcgagtcattgaccttgagatttaccacatacatcaatgaggtgatttgcgggaattgctctttcacagcccccatcacatcggcaatagctgcctcgttgtcctcgccaaataccacaaccagcatcaactcgccagtgctggcggtgcgaatcatgatggtgcgcatgaggcccacattgttgcgaatgtcgtagaaggtgtagccacgctgctgggcatagtcgcgcaggaaaagtcgcaacctgttgctgatgtcgtcctgcaaccagcatttctcgatgttgagcaccttgtcaaagccacccggaatgtggaaccccacggcattgcgattggggaactcctcgccactgcgcatctgctcgggcgtgagccagcacttgttgctgaaggtgaactccagcttgttgcggtagtgtgtggtcttttttgagcccaagatggggctgattgccggcagtggcaccttagcgatgcgctcgagagcgtcgaccacctgctgctgcttgcatcgcaactggtagtcataaggcagatgctgccacttgcagccaccacatgtgccaaagtgctgacacatgggctccacacgtagctcactgggcttgacaaggctgtcgattaccccctcggcaaagctgtgcttcttgcgggttatcttcacacgtgccacatcgcccggcgctccatagggaatgaacaccaccatgtcgttccatcgccccaggctcttgccctcggcagccactccggttatctcaaagtcctcaagcagaggcaaattcttcttttttcccacaggctatattatttatttaaatgaatcgagatgcaaagttagcgagtttttttcaataagatactctcagagtgattttttcattcccttcggtcttttaaggtgcttttttttcaacttgcatcttaaaaaacaccaaaacaaaaccattttggaaaaaaagattaactttgcaaaaataaatgtaacatttaatcttttctttattatgaaaaattctttattgatttccttaattgtgtttgcattgggcattaacacacatgctcaagaattaaagacctacgagaacaaagcgtttaagattgattatcctgccgactgggaagtaacatgggacggtgaatctttcgtaaacatagctaacgaagatggcgacatcaaatttgatgttagtttcaaccagcaaggtcccaccaaagcccaattgcaaaacgctgtcgacaactgggtttacatgaaagagagtcatggcaataaggtagaccaaaagttggtaaaggatgattatgccctagtgcgttctatcataaccgatgaagatgatggcaaaaaaactgtggaggtgtggttcatcatgatttctcttgagcccgaaggattctccggtacgatgacctgccccattgagcatgccaacgaggcactcgatattcttgtgaaaatgcttgccacgcttagccccagataaggagagccactcacaatgcgccttagcggtgggcagattaaatcatgcccccaaataactactagcggtcactaattattaattctcaaacatcatgactgccactagaaattatttataaaacattggagttcagaagttaaatcagtcatgaattgaccgcaacgacgctagataaaagaaaaactggttgagaaacctcaaccagtttaaacgttttgcggaaagagagggattcactgcgtgcatcccttgcgctcccgcgggggatgctaaagcattaaggctggcactttgtgcttatcagttttttttagttctcattcaagtgaacttgatgcgacccaaaataaaaaactggttgagaaaactcaaccagccttaatgctttgcggaaagagagggattcgaacccccggtgcctctcagcacgccggttttcaagaccggtgtaatcgaccactctaccatctttccgaaaagagcttttcacgcttgaaaagctagccaaaaaccacatgttccgatttttgacgggtgcaaagttacaaacaatctttaaatcctgcaagtaaaacccactttttttgaaaaaatcttttcttcaccatttctcattgacctgtcgactcattcaacaagcgcgagcttgttaataactttgagagacatttttcacattattaatattataatttaaaataaattattaactttgtaggttaataatacacatatagaaaataataataactactaataataaagacaaatgaaattcaacatccaaagtaaactgttattcactcacttgcaggcagtgagcaaagtggttaactccaagaacaccatctctatcctcgacaatttcctgttcaacctgagcggaaacatgctggtgatcacagctagtgaccaggagacaactctcaccacccaagtggaggtagccaatgccgagggcagtggaaagtttgccgctggcgtgaaagaacttctcgacatgctcaaggagctccccgaccagggtcttgccgtggaaatcaacgaccagaaccttgccattaacatcaactacctcaatggtgagtttaacttcattggcattaacggcaatgagttccccaccaaggcacagagcgaggaagaagtgaaaaccttcaccctgccagccgagaaagtggcgcgtggcatccagcagacggtatttgccgttggcaccgagtcgttgcgtcccatgatgatgggtatctactgggacatcaagcccgaggagattgcctttgtttcgaccgacacccacaagctggtgcgcttccgtgagctgggcctgagcaccggccttgaggcttcgttcattcttcccaccaagccagccacaatccttgccagcatcctcgacaagcaggtgggcgacgtgaaaatcacgatcgactctaagagcgcgacctttcgacaagcaggagggcgacgtgaaaatcacgatcgactctaagagcgcgacctttgagagcgccgactacaccatgtcgtgccgctttgtcaatggtcgttaccccaactacaactcggtaattccccaagacaaccagtacactctcactatcgaccgcatgacaatgctcacagccatcaagcgcgtgtcggtaacagctagccctggcggtcttgtgaagtttgacctcaaggagaaccaaattcacctctccacccaagatatcgacttctcgaagtcgagcgaggaagttatcgcttgcgactattcaggtgccgagatgctcattggtttcaacgatgacaacatcatagacgtgctcaacaacattggtcacgacatggtaaccctcgagctcatggacccctcgcgcgcaggtatctttaaacccgccgagcaacgtgagaacgaagacctgctcatcctgctcatgccaatgatggtgatgggataagagaacctcagtttaggaaattcaaaacagtttaacttaaacaat

SEQ ID NO: 2222 - DNA, 24170 bp, synthetic construct
  misc_feature 1..24170: note = Synthetic
  source 1..24170: mol_type = other DNA
gtctatcgcaagaccctcgagcccgcccgcgaccacttcctcgagaaaggcctccgcgagctccccatggtagaaaagacttggcaagacctcaacgcccaggacaccaagcgagccgcccagtacctcaacgactacacccaggacatgctaggcgccgccgcctaccgctggcaacaactcgcccacaccttctggctccaatcctggaaaggcttctaaaaaaacaccacctcctcctcatcctccctggccacctctaaccttagaggtggccagggcccattattattcccccaataatccccccaagagcagcccctctcccatagccccctatagaatcccatcatcccctatcatctcctatcatctcctatcatctcctatcatctcctatcatctcctatcatctcccatcatctcctattaaatcccaccactatacctgcgatatccccccttcctcagctttttgccatggtgctgctctgtgccatgtgttacctttgtgctgtgagacctgaaaaatgcttttaatcttcgttaacaaacccgcccgcccctttcataattacaacaaaaataaaagttgctgtaaaacagcaacttaataaattcagtcaaagataagcccttttgctttttgacgtatcggccgactctacttatacctatcgctgatgttgtagatagccttgtagatgtcgcggtcaatgtcggtcaagggaatgttgcgacgagccatgacgcgttgggcgatagtgtagaaggtctccagcgggacgttcttgaatccggcagcagcgcttccttcctggaaggaggcaacaaagttgcgcgggaaacctgctccgtggatgttcacgccgacgccaagcactgtggcggtattgatcataccgttgacgccgatcttgctgtggtcgcccataaagaggccgcagaactgcaatccggtgcgctcaaagcgtttgctggcgtagttccacaacttgatttcgccatagtcattcttcaggttgctggctgtggttccgccgccgatattgcaccactcgccgatgacggcatcacccaggaaaccgtcatgcgccttgttgctgtagccgataaagacagtattctcgacctcaccgccgatcttgacatgcggtccgagcgtagtcgctccatagaccttggcaccaatgcgaaccttggcatcatggcaagcagcgaagccgccacggatgcaggcgccttccatcacctcgacatcgcggccgatgtagatgggaccaccattggtgttaagcatagcgccctcgatataggcaccctgctcaacgaagatgcgagatggatcgccgatgacggtattggtcgctgataacggctgcgactctcgcccagcagtaatgcgggcaaagtcctgttccagcaccacgccgttgaactcaaagatgtcatataagtgacggataatgagcgggatatccttagcgaagtgcacgcgtgtatagtgacgggcatcatagtcatgagccgtgccgttaaaggcgatgagctcttcgcccaccatcaaggcctcgccttcctgtagggacagtacctgctgcgcgagttcgggcgtaggaatgacgtgccctgcaatcatcagattggtggagcggcgtacgtgcaacgggaacttcttcttgaggtaaggtactgtgagatagctgtatgtggcctcgccaagcatcgcctgccatttctcgctgatggtggtgatgcccaagcgcaacatggcagtgggacgagtataggtaaacggcatcaggtgcttgcgaacctcgttgtcgtcaaagaggatgacattgcgtgcggtcttcttcatagcttttttcgcttcttgttgttaacgggcagcaaaagtacgtgtttttcttgaataatgttgcatcggcagtcaaaaatggttaactttgccccatatttcatcaaatcaactactggaaatgacttttattgaacaggatatcaagggcgtatgggtgatagaacccaaacggttcggtgacaagcggggatacttcagcgaggtgttcaagcaagctgagtttgatgctcacgttggacatgtcgattttgtgcaggacaacgagtccttctccaccaagggcgtgttgcgaggactgcatttccaacgtggcgagtggagccaagcaaagttggtgcgcgtctctcaaggctgtgtccttgacgtggcagtggacctgcgacacggcagccccacttggggcaagcatgttgccattgaactcagcgctgatacaggtcgccaattgtttattccccgtggctttgcccacggttttgtggtgctcagcgatgtcgcccagttccagtataaggtagataatatctacgccccacaaagtgaggcgaccctgcgcttcaatgattccgctcttggcattgattggcgcatcactcccgatgaaatgatcctgagtgataaggatttaaaaggacgccctcttgacgagatgacccccgatttcctgggattttaaaggaatctgacccatttcgcggcacaaaagaatccatatatcataacaacgtgggcaacagcatgatcgctgttgcccacgttagtgaatgataattgtccgtttagttcttgaagatgagctgatcgtcttgggcgtcaatgatgataggacgttcacggttgaccttcatagcgatgatatccttgctcaactggttaagtaccaggttctggatagctcgcttaacagggcgtgcaccgaactcgggatcatatccggccttgcctaacagcctgatggcttcatcggtagcctcaagggtaatgccgttcttgtccaacatcttcttgacacccttgagctgcatcttgacaatctggcggatctgctcctcgtcgagcggcgtgaacatgatgatctcgtcgatacggttgaggaattcaggacggattgtctgcttcaacatgcccataacgtcatcacgggtcttgccgatgatttcgtcacgattggcgtttgtcagatgctcgaagcgttcgcgaatcaggctggagcccaggttgctcgtcatgatgatgatggtgttcttgaagttcacggtgcgacctttgttatcggtcaaacgtccgtcatcaagcacttgcagcaagatgttgaacacgtcaggattggctttctcgatctcgtcaaacaagacgactgaatacggcttacgccttacggcttcggtcaactgaccaccctcatcgtaacccacgtagccaggaggagaaccgatgagcctggtcacagagaatttctcctgatactcgctcatgtcaatgcgggtcatcatgttctcatcattgaacatgtaatctgcaagggccttagccaactcagtcttgccgacacctgtagtgcccaggaagatgaatgagccgatggggcgtctaggatcgttaagtccggcacggctgcgacgtacggcatcgctgatggccttaatggcatcgtcctgacctacgacacgcttgtggagttcctcttcaagatgaaggagtttctccttctcgctctgcagcatcttggttacaggaatacccgtccagcgggatacgatatcggcaatgtcgtcgctgtcgacttcctctttgatgagcgccttgtcgccctgcatgtcacgcaagcgttcctggttctggcggttctcgtcttccttctgcttgatgagcgagtagcgtatctcggctactcgaccgtagtcgccgttgcgttcggcgcgttcagcctcaaagttgagttgctcgatgtcaatcttattctgttgtatcctgttgatcaactccttttcactcttccatttggcattataatcgctctcacggtccttaagttcagcaatctgcttatccaaatcggcaatacgaacctcatctccgtcacgtttgatggcggcacgctcgatttcaagctgcgaaatcttgcgggaaatctcatcaagtccctggggcacactgtccatctcaatgcgcagcttggctgcggcttcatcgatcaggtcaatggctttatcgggcagaaaacggtcgctgatgtaacgctgactcagctgtacggcagcaatgatagcgtcatccttgatacgcaccttgtggtggttctcatacttctctttcagaccacgcaggatggcgatactgctttcttcgtcaggttcatcgaccataacaatctggaaacggcgttccagggctttatccttctcaaagtacttctgatactcatcaagggtggtggctccgatactgcgcaggtcgccacgggccaaagcgggcttcaggatgttagcggcatccatggcaccgctgctcttgccagcaccgacgagggtgtgaatctcatcgatgaagaggatgatctcaccattagcctgagtgatctcattaatgaccgatttgaggcgttcctcaaattcgccttgatacttagcgccagcaatcaaagcgcccatatcgagagagaaaacttgtttcatcttcaggttctcgggcacatctccacgcacgatacgttgggctaatccttcgacgatagccgtctttcccgtaccaggctctccaatcaggatggggttgtttttggtacggcggctcagaatctgcaacacgcgacggatctcgtcgtcacgtccaataacagggtcgagcttgccttggcgtgctcgctcattgaggttgacggcatacttgctcagggcattatactgctcttcggcactctgtgaagttgcattcttgcccttgcgaagttcgtcaatggcggctttgagatcatcacgggtcattccggcatccttaaggatggtcgatgcagttgacttgatctcaaataaagccattaacatggcctcaacggtaacatactggtcgccgttcttgctggcaatgtcgttggctttgtcaagaacttggcttgcgccattgctcaggtagggctctccaccgctcacatgcggcagtttttgcaatgcggcttccaatggtcgctcaacattcatgaggttgatgtccagcttctggaagatgaagcgcactacggtatcaccctcagcaataatggccttgagcaagtgctcaggctcaatagcttgatgaccattggtgcgagtcagttgaactgccttctggacaacctcttgtgctttgatagtaaaattgttgaaattcatattattgtgtctcctttcattctctgtttgaaatgctttttacacataacatgacatcaacacttgtgccaaagataagaaaactgacaaaatgtcagcaacgaaaaacggctcatcttttggatgaaccgttatctcttgtcaactgtagtggtaggctatttctttgccagcacagtgataaatgtaatgagcgacatggctgtacccatcatgctgataccaaatgagaacagtggaccggcactccaaatgctgcgtttcttgtatttgttaggctcaacgtagagaatgtcgttctgttgcaactggaactcttgagagcccaagaatctggcatcattcaagttgaagcgttttacggttcgctggccattattgtcagttctaattaacaacacgttgtcatgaaggccgctggctgcaacatcaccgctcatggcaatcgcttctatcagattaagacgtccgttttcggcatgaactactcctgcatgaccgaaatcaccgatgcagaatactctgaaattctgaatacggcattccacattgggcttttcggtgaggtatttgggatatatcaggttagcgagatagtcctccaactcgagtttggtcatgccaatgatgtgaattgtgccaattacaggaaaatcgatattgccattgtcatcaacaagatagaaaacagtagaacggtcacccatattatagcttgcgctaccgagagtgctgatatattgaaccttgttgaacggtttcacggcgtcctcgttggatcctgacacattaatgtgcaacatgtcaccaggtctaatggtgaagtcaccggccttaaccttggcggcagcaagttccgctgaaggaatctcatcgatgttggtcatgtaggcaatgtcctcgctgggattgcacgctgcaagaacgagcgagatgattgcaagtagaaatagattacggatattcatattctttatatttttgattttgtattctaaactgcaaagttagtaaaaaatgcaatattgggtacttttttcaggaaaaacatctttctattatcattttttcgctatttttgctgacatgaacaatcatcaaccacacattgaacggcatccgtggcccccctatatccccaacggtgcaagatacctttttctgggcacgttcccgccgaaggaggaacgctggtccatgccttttttctaccctaacaagatcaatgacttctggcgggtaatgggtcttatttttcatcaggataaggactatttttggaataatgatgcccgatgttttgacctctcggccatcaaggcgatgcttgaccgcgaaggtatcgccctgtgggatacggcaatggctgttcgtcggctcaaggataacgccagcgacaagttccttgagattgtcgagcccattgacttagaggcgcttctggatcaacacccgtcgatcatgactgtgatcactaccggcgaaaaagcgtctggagtcattgccacccaggctggtattgaggttccggcgattggcgttcctgtagcggttcaagtcggttgtcatcacatcactttctggcggatgccctctacctctcgggcctatccgttgccgcttgagaagaaggctgcagcctatagcaagcttttcggcaaatagcccttacggcttttgttaataacttttttggcgatttttaaggtcaaatattttgccgtggagttgaaactgtgtacttttgtatgatgttttcgataattgaacatatagagtacttgatgacgtgccacgattgtgtggttattcccggatggggcgcgtttatcgccaactatggcgttgctggctatgacgaggactctgaggtgatggggcgtccccaacgcttgattaccttcaactccagcgtctcgcacaacgacgggttgattgctcagtcgatcgtccgccgcgagggcttggattataatgaggctatgcgattcatcgccgatagcgttacggcattccgtcagcaactgtcaggaggcaatgaggtttccatgggccgcttgggttatttcaaggcttgtggcgacgctcgcatggaatttgtgcctttccaaaacgaatatgcttgcgacggcttctacggtctgtccgatatggagctcaagacggtatcagtccttgagcaagagcttgctgatcaggaggctgcccgcacggctgtcgttcctgataagcccaacctgttcagccgcaaggctgcccagattgcggcatcggtcgctgtgctgataggcctcggcgttttgctctccacccccattatcgtggaccgcaaccatggcatggcagctatggctcccgaagtcaccgcgccacagtcccagcagttgggcgtatctgtccagcagggcgttgtggcacagcctgttgaggtggtggacaatcatcccggtattgctgccgtgggcaacacctcgggtaaatattacatggtcatcgcgaccctgcgcaatcagcaggagttggatagcttcaaggcaaagtatgctgcccttgttccttatatgaagttgctggaatacaagggatatacctgtgtgtatgtcgctcgcagcgacgattacggcacgttaatggaccttcgtggtgaactgcctgagcgcctgcgtgacgtctggatttacaactgatgccggtagcatcagacaggtgtagcgcttgccgttgagcatcagcaacaacgcatcatctttttctatgatatcgcgcacgtcatcccaaccgatgacgtgcgttttcattcgctcatcggtgaagctcagggtgatgccttgctcatcgacggttacggtcttttccatgatggaccaccgtgcctcgggcgagaggccgtagtagaagtagagcagcgccagcaccatgggcagggcgatgaagagcaccatcatcgcgacgatgacaaagcgcacgtcgatccatatcgccagcacggcgcacagggcgacaggtgccaccagccacaaccagttgtcggcgaggaacatggtgcacaggtgtcgcatgtaggcgctcgacgagacgctacagtcttggatggtgaaatctccttccacgttcattccttgttggtgaaggtgtgtcatcattcgctactgaattcttaatcggccttacagccgagaacctttagcttggcgtagtcaatggtgacacatcctcccggtgggtcatttcttattcttgccctttttggtcttgttgtagagggcgcggcggcgggcaatctcctcatagccgcgcttgtaggcctggcggttcttcagggtgagggtctggcagtagccggttccctcgttgttgtagagtttggagaggttcaggtactgcttgccgttgccgcgaacgacggggaagacttcctgcttgcgcttgttcaccttgtcgcactgcaccgagtggttctcggcagtggtacccgtcagctcaggggcaacaccgtcctcgccgacccacacgggatagacctcggcacaggggggataacccaaggcgatccacatcgtcgtcaggcgaggattctcaccggggatgatgccctcgatgaccacgctcgcggtcgagatgcggcgcgggatgaagtcctgatccacaatccacgtgtcgccgctgcgggtgtagtccttgccaatcagcgagttgtagaatgtgcgggacagttcctcggtgaatacagccggggtgatgtcttgattgatgatatggggctcgagcaggtgcttctcgttcttctcgcgcacgtagcccatgcccttgtccttctcgccgctataggaatagttggtgcgcatgaggatgccgcttgtcgcatcggcgaggtcaaacttcacatatttaaagttgccggtctcgaagtaggccccgttgccctgggcatcgatgacgccgaagttggcctccacgccgaggggcttgggcagggtcttcaataggttctcaaagtcatccaccgtcttgcagcgttccagggcatagcgcatcagttcgccctcacggtccatgttcttcacgccatcgttgccgttcaggttgtaggacgccgtgttcatgatggcgaagccggcttcgttgaagcccatccacgctgcagtgtcctgcaggtcgcgcgcgtcaaacagggcgacaaactccatcaggccgtcgtgcgccacgatgcgctccacgcggttgttcaggtcgttggtgtcgcggtttttccacatcaacggccgcccgttggcagtcagtttcccgctcacgatggccgacgtgcaggcatcagccgcaacaatcactcccagcactgccaccagggcaatcaataatctcttttccatgtctttcaattctcattatgtttctgtcgcaaagatagtgcaagtcaagtgaaatgccaaattttgtgcaagtcgatttctaacatagttaaacttgaactgaagaatagtaggcagatatgagaaacacaaagaagtatttggcatttcctaattatgattttagaaaatcaaactatgaaagaatgaatttggacgaaaatataaaaagaacgagacaaagtcccgctcttgatgttttcacaacggaataatccttattgtgaattgcttcaaatttgttctgcaaagatagtactgatttttgaaaactcaaaatagacttcaaataatttcaagtttttcataaaaatcattacttttgtacttcaataaaaaaagcaaaaaatagaattatcatgaaaaggatattaggacttgacttaggaactgctagtgttggatgggctgtcgttgaccaggcagaaaacgataaggagaaatcccaaattattaagttgggtgttcgtattgtaccaatagacacgcaagaaaaagatgactttgagaagggcaaaagcataactacaactgcagaccgaaataagaaacatgggatgcgtattaatctgcaacgctacaaacagcggcgagctcatcttgttcaactgcttaaacgtgaaggttttattgctgataaatctttgctctatgaagatggcaacaataccacctttgaaacctatcgtctcagggcaaaagctgctactgacgagatttctcttgagcaactggcccgagtgctactcatgataaacaagaagcgtggctataagagtaaccgcaaagcagacaaaaaagaagagggtcaactgatcgacggcatgtcaatcgctcgtaaactctatgatgaccatttaactccaggccagtttgtttaccagactcttcagagtggtaatcgatatatcccgacattctatcaatcggatttgagggcagaattcaatgctatttgggattatcaagtgcagttctatcctgatatccttgacgatgaattaaagtcaaagattcatggccgcaagaagaatgatagcgccaaagttttctatcaagtcaagcatgtttctactgccgaaaacaaggaccgaaaaacacgacttcaggttgcctatcgttggcgctctgaggctgtaaacaaacagttgccaatagaacaagttgcggctgtgctttgtgatattaatggcgatatatccaattcaagcggctatttgggtaaaataagcgaccatagcaaggaattgtattttaaaaaactcacggtaggacaataccttatgcaacagttggatagggatcctaattatcgtatcaagaaccgtgttttctatcgccaagactacttaaacgagttcaataccatttgggagacccagcacaagttccatcccgagttgactgatgaattaaaagaggaaatgcgtgatacaatcattttctatcagcgcaaactcaagtcaaagaaaggtcttatctcttattgtgaactggaaggcaaagaaatcaccgtagtggtcaacggtaagcccaagaaagtgatgactggtccgcgcgtatgtcctaagagttctcctttgttccaggaattcaaaatatggcaagaattgaataatgtggtcattgagaacaaaaagataaaagtcaccaaaaactcagagccttcattatttccaatagaagaaaaatacgtgccattgtcagctgagcagaaacaactgctgcacagtgaattgtctgtgaacaaggaattgagcaaaacggaggtgttgaaactgctcgggttgaattcaaaggattattcaatcaacttcaagacgttgcagggcaacacgacacaagtgcagttgcttactgcatacaagcagattttggaatggagtgggcatgatgcagatcagtttgacaaattggattatgctgctaagatgcaattcattaccaaggtttttgaaactcttggggcaaaaacagattttcttgagtttaatccggagcagttggatgactatctagatcagcccgcttacaggttatggcatcttctctattcctatgagactgacaatagtgaaacgggtgatgctaaactgaaggcgcacctgaaagaactgaccggactgagtgatgaatatgtatctgttctcgcctcagtgcagtttgagcaagattatggctcattgagcgctaaagccatcaggcggattatgcctcacttattgtctggcaaaaagtatagcgatgcttgcgaggctgttggttatcgccattctgcacagtctctaaatcgtgaggaactcgacactcgaccattggaaagttcccttaagattttgtcaaagaacagcctgcggaatcccgtggtcgagaagattctgaaccagatgattcatgtggttaatgcagcgatggaagaatatggggtggaacgtgatggtgtgaaaagatttgatgagattcacgtggaaatggcgcgctcgctcaagcaaacccaaaaacaacgtgaggatgcttcaagttttatagaaaagcgcacaagggagaatgaggaaatcatccgcgtgttgagcgaggaattccacatacctcatcccagccgtaacgacatcatccgctacaggctctttatggaattgaaggacaatggcttccatactctatactccaatacctatatcccaagagaagaattgttcagcgataaatttgagattgaacacattattcctcaagccaaattatttgatgattctcagtccaataagacgcttgaaactcatgaggcgaaccttgagaaacgagatagaacggcaatggactatgtgcttgacaaatatggggaaattggagcagaacagtatcgtcaacgcatagcctttttatatgacagcaaaaacaagaacggaacaaacaagaagcacaagtatctcactatgaccgaggccgagatacctgtcgacttcttaaaccgcgaccttgccgatacgcaatacattgcccgcaaggcaaaagagatactcatgcaagtaacgcgtaccgtagtgcctactatcggcgcaataacagcgcgcctgcgcgaggattggcaacttgttgatatgatgaaagaactcaacaaacccaagtataaagaattaggctgtgttgttgagtacaaaacacgtgatggacgcaagaatgattatattaaggactggacaaaacgtaatgatcaccgtcatcacgccatggatgcgcttactgtggcattcaccaggcaggagcatattcagtacctgaataacaagaatgccaatcaggaggaagatggattgcaattgcgggcaaaactgatcagggaacacaggttcttgccccctatgccacttgatgagtttagggcgagtgctcttgagcacatgagaggaatccttgtttccatcaaggcgaaaaataaagtggcgacaccgagtataaatcgtatcagcggcagcaaggtgcggcaagtaacaatgacaccacgcactcaattgcataaagagacctattatggcgctcgtcaacgttatgcgactgccgtcaagaaggtggatgccaagtttgatgcagggactattgcaatggttgcccgcaaggattatcgtgaggcactcatgcaacgacttgatgaatacggtggtaatgccaagaaagcatttactggtaagaattctttgtctaaaatgcctctttatattgatgctttacacactcgccaagtgccggaaaacgtgaagttggtttggttggagatctattacacgatgcggactgccgttgatcctaaaattgcaattgataaggtgcttgataagagagtacaagatgttttacaaaagaggttggatgaatttggtggcaatgctcaaaaggcatttagcaacttggacgagaaccctatttggcttaataaagaaaaagggattgctatcaagcgcgtaacaatacaagcacgtttgtcagaaccaatttccttgcacgataaattgaacagggatggtagtgccatgacagatgatgcaggcaaaaccatgcccgttgactatgtgagcacaggcaataatcatcacattgctatttatgaagatgcagatggaaactggcatgaaaaaatagtctcttattttgaggcaattgccagaattaacaacaatatgcctatcgtagataagcattttaacgaaagcgaggggtggcgattcatgttcacgatgaaacagaatgagtattttgtattcccggatttggaacatggttttattcctaccgagatagacctgatggacgagagtaaccatgctgttgttgttcctcatttatttagagtacaaagtttatcacaaaaggattatattttcagacatcaatttgagagtagtgttattgctggtaattacctgcctcaaggaatcgcttatattcgcataaggacagaaaacaaactcaaaggagtggtgaaggtgagaatcaaccatattggcagaattgtacatgttggtgaatactaatttattatggtcaagaaaacgctgtacttcggtaatcctgcttatctgagtctgcgaaatggacaaatggtattcagactacctcaagtagaaaagaatgatacggtctctgctgtttttaaaaaagaagccgagcggacgtttccaattgaggatttggggatagtgattcttgatgacaagcgcatcacagttacacaaggattgcttgaaagtttaactgagaataattgtgcagtgattacctgtgacagtacgcaccatccttcagggttgttgttgccgatggagggtaatactttgcttggagagcgttctcggtttcaggtggcatgttctaagcccttacgcaagcagttatggcaacagaccgttcaagcaaagattgccaaccaggcggcaaaccttgagcatctcgtacatgttgaacatcgtaatatgctggtatgggctgggcaagtacgcagtgacgatgccgataatcttgaagcacgtgctgccgcctattactggaaaaacctctttcccgagttccctgattttgcgagagggaggtttgaagagccacctaataacctgttgaattacggatatgcaatacttcgcgctgttgtcgcacgcagccttgtcgcaactggcttacttccctcgctgggtattcatcatcataatcgttataatgcctattgccttgctgatgacattatggaaccatatcggcctctggttgatgctcttgtcaaggatatgataagaaaatataacgatatagatgaattgacagtggaaatgaaaagggatttactttcactaccagttattgatgtgagcattaagggtcaaaacagccctcttatggttgctgttgacataactactacatctctgtataaatgttttgctggggagtctaagcatttgatatatcctgtacttgcatgaaaaatgaactagaacggattagccaatatcgcatcatgtggatcatggtcttttatgatttgccaactgaaaccaaaaagcaacgcaaagatgctgccaaatttcgtaaagatattatgggggatggattcatcatgtttcagttctctatttatctgcgacattgcaccagtaaagaaaatgctgatgcgcatataaggcgagttaagacaatgttgccggcatcagggaatgtgggaatattatgtgtgacagataaacaatttggaaacatggaactgttttatggcaactcagttaaggaaaaacaattgactggggttcaactggaaatcttctagcaaataaaaaacctccataatgaaggttttttatttgctaaacacatctttttttattcttggtgaccatatgtaactaactgttctccaatggaatgcaaatattcagatgtgtaataccatgcaaagatacaaatttgaaagcaattcacaactagttcgtcttggggtagaacggcaacggcgatgtgtaataccatgcaaagatacaaatttgaaagcaattcacaactaacaatgagaacaacttctgcatcgcccagatgtgtaataccatgcaaagatacaaatttgaaagcaattcacaactctcttggcgcgttcttgctgatgttgtgtgatgtgtaataccatgcaaagatacaaatttgaaagcaattcacaacggtaagaacatagcgtcatactcacccgaagatgtgtaataccatgcaaagatacaaatttgaaagcaattcacaactccagtcggggcggcatccatgggcggggcgatgtgtaataccatgcaaagatacaaatttgaaagcaattcacaactatgctagtacttctcaaagccaaaatattgatgtgtaataccatgcaaagatacaaatttgaaagcaattcacaactgctcccctctcgcgctcaccccgtgttgagatgtgtaataccatgcaaagatacaaatttgaaagcaattcacaaccctgcggggcaagccttgctggtaagaggcgatgtgtaataccatgcaaagatacaaatttgaaagcaattcacaaccagcctacgatgtcgatgtttcaaatcgatgatgtgtaataccatgcaaagatacaaatttgaaagcaattcacaactcaattacctttgagtagaaatcggcatccgatgtgtaataccatgcaaagatacaaatttgaaagcaattcacaaccgcttgatgttggttgagccgcccacgcctgatgtgtaataccatgcaaagatacaaatttgaaagcaattcacaacgaacgcatggtcgaagctgtcatccacaaacatgcaaagatacaaatttgaaagcaattcacaaccaacctctacaagtaccgcatcaagtagcagatgtgtaataccatgcaaagatacaaatttgaaagcaattcacaactaatcgttctcattgttgtcttggtttagtgatgtgtaataccatgcaaagatacaaatttgaaagcaattcacaacgtatttcggaagcgtgaggtagatgttcatgatgtgtaataccttgcaaagatacaaatttgaaagcaattcacaactgatgcggtgggcagtggacgccgggaattgatgtgtaataccatgcaaagatacaaatttgaaagcaattcacaacgcttaagaatggcttaacagtgccgtgcgggatgtgtaataccatgcaaagatacaaatttgaaagcaattcacaacttgaggacgcagcaggtcaaaacaggcatagatgtgtaataccatgcaaagatacaaatttgaaagcaattcacaactctagaagagaagaaacaagaatggtgtttgatgtgtaataccatgcaaagatacaaatttgaaagcaattcacaacgcggttgaacttgcggggtttcctcatcgggatgtgtaataccatgcaaagatacaaatttgaaagcaattcacaacgcatctcgtccgcgcccagcgtcggcagttcgatgtgtaataccatgcaaagatacaaatttgaaagcaattcacaactgtcagccagttcttttccctggcgaagccgatgtgtaataccatgcaaagatacaaatttgaaagcaactcacaatatatatcattgattaattataggtagaatcattcactaaatatatatgtggattcttgctttatgtcattgacttgagagcgggggtagaagtacttttgtggcgtgtgttggaggatttgcttttaacactgcgttaaccttcccgccccacatattgatgattattggtgttgttgattgtgctgataatcaattagttgttgataatagcatttgaaatagtgactttgctgtttgacggatactgctcatggcattgagtaataagttgccctcatatagaatagactatgccaagtgaaatgctaaaattaatctggcatacaggctaggcttgcactattttcacgcccgtgtttcaatgagtttgggttacttcctgggagatatagattgaaaacaccccaaggaatgtgcctcccaattcctaaaaaacgtagctttttacccttgccaacgcttagccgtcccattacctttgccgaataaatgatcaaccaatattttaaagccatgaagacaacaaacaacatccagcccccaagatttaacctatcccatgtcgatttcgcaacagtctataaaccaataaattacagaaaaattaacattattttaacacttcccccgaaatttttatttccaaaacacacttcccatcactccccatctcttcctataaacccctatctcctcctatcaccccctataacccctcatctcaacaattctctcttatctattctctattatctaaaatagtattacctttgcggcgtgattcaatgagtttggggtgctctctgggagatgggggctgagaacatacccatgggatctgatccggacaatgccggcgtagagaacatttattgattcaagtttcgcaactgcttgcgaaacttgaggtttagggtttagagtttagggtttagtggcgatgcgcctttaaacattaacctttaaccattaaactttgagtgggggcaacagggttgcgggacttgggaaaacgaattattgcatgaagaagacttttttgacggctgccacggtggtggcaggccttgttgcggtggcacagcctgccgcgaccgacacggtgcctactgtcgccttgagcgaggtggaggtgctgggtacccgtgcgagtgctagcactcctgtagcgtttactaaccttaccagcaagcagttggctgccgaaaaccatggcctggacattccgttcctgctgacgatgaccccgagcgtgatcacgacgagcgacgcgggtgcgggtgtgggctacacgtcgatgcgcgtgcgtggcactgatgctacccgcatcaacatcaccgtgaacgatatcccgatgaacgatgccgagagccacagcatctactgggtgaacacgccggactttgcgtcgtcggtgcgcgacatccaggtgcagcgcggtgcgggtacctcgaccaacggctcgggtgccttcggtggcagcgtgaacatgaggacccagggcttctcgcgcgacccctatgccgaagtgtcgggcagctatggctcctataataccaacaaggagaccctgcgcgtgggaacgggtctgctgggcgaccactgggccatcgaggcgcgcctgtcgcacatcggcagcgacggctaccgtgaccgtgcgaccagcgagctgctcagctacttcggccagctgggctactataacgccgggacctcgttgcgcttcatcacctttggcggcaaggaagacacctatcatgcctgggacggcatcagccgcgacgacctgaaggaacgccgcacctataaccccaacggcgagatcaagcacgatggccaggtgacgggcttctataaggaccagaaggacatctaccgccagacccactaccagctcatctggaaccagacgttcaatcccctgtggaaactcaacgtggcgctgcactacaccaatggcttcggctactaccaggagtacaagaacgcccgtacgctcaaggagtacggtctgctgcccgtggtgactgccgagggtaccagcaagaaggccagtctggtgaggaagaaatgtgtggatagtaacttcggcggcggtgtcttctcactgcagtacaccggcgaacgtctggctgccacgctgggcggcggcatcaaccgctacagcaacgaccactacggccaggtcatctgggtcgagaactacaccagcccgctggctcccgaccacgagtactaccgcaacaacggccgcaagaccgacatcaacatctatatcaagggtaactatgtgattaccgcaggcttgagcgcctatgccgacctgcagtaccgccacatcggctaccgcatcacgggcaacaacgacaagtgggactggacagccgaccccgagcgcctgcagaccctcgatatcaacgagccgttcaacttcttcaaccccaaggccggtctcaactggcagattaacaagaagaaccgtgtgtatgcctcgtttgccgttgcccagaaggagcccacgcgcaacaattataccgacggtctcttcctcgagcaccccacgagcgagaaactctatgactgggaggccggttacgagttccgtacggaccgttacttgttgagcgccaacctgtactacatgaactacaaggaccagctcgtgctcaacggcaagatcaacgagattggcgagctgatggccgagaacgtggacaagagttaccgcatgggtatcgagttgctggcaggaatgcagttcaccgactggctgcgttgggaggtgaacgccacgctgagccgcaaccgcatccaggactatgtgggctacgtgagcgactatgacgccgacacctgggacgacatgtggacccagaccgccatcgagaagggcaacaccaccatcgccttctcgcccagcttgaccgtgggcagcatgctgatgtttgaatacaagggcatcaccgccaacctgcagtcgcagtatgtgtctcgccagtacctcgacaactttgagcgcaaagaggactctctggatccctacttcgtcaacaacctggacttgggctataccttcaagttgccgcacatccgcagcatcaccctgggcgctaccgcctataatctgttcaacgtgaagtatgagaccaacggctactcccagacctgcgccctgtatcctggcggcagcaaggaggggaaatatgacctgtacagcgatccgcgcttctatcccatggcaggcatcaatgtgctggggcatgtgacgtttaggttttagacgctagactttagatattagatattagggaaagtcgccgagaacggcgacttttttgttctagggggtgtgaaattgactttgatttttggactggctggaggatggtaaaattatggtttacagtagattgattgtttttgagggttagattttttgcttgatggctgtgggggtatattaattatgtgtacctttgtgaaaaatcatcaaccaaaaataaccaaaatgaaacgaattctttcaatctccatcctgatgatggtatcgttgctggcgatgtcggcagtctatgagccgacgctgagcagcgacagcgaggtgtgtgtcttttttgaggccaacaacacggtgaccgatgcgcccaagatctgggtgtgggaaggcaacaccggtggcaatagttatgtgggcaccaactggcccggtgcgtcaatgacctatatgggcgatacccagagtggcaacaagatctacaagtggacctataccggctcgctggcgatgccttcgggcctgattttcacctggaacaaccagggcggacgtgttgacggttcgttcaccaaccacggctactacgtgatgggccaattgaccaaggtcatcggggcaggggagagcacctttgttcccaaccaacatgtcatttatgagcttgacctgtacaactttaccagcgcgggtacccttgccgcagcgcagcagcgtctggactacctcaaggacctgggcgttgacatcatctggctcatgcccatccatccgcgcggcatccagggccgtatcggctctctgggcagcccctatgccccgcgtgactatcatgccgtgaacagcgacttcggcaccatcgccgacctgaaggcctttgtcaccgctgctcatcagcgcggcatgcaggtgtggctcgactgggtggcaaaccacactgccaaggacaacgtgtggattacccagcaccgcaactactataactcgacgctcaccagccccaacggctatggcgacgtttatcagctggattacagcaaggaagagacccagctggcgatgatcgaggcgatgcagtactggattgaccaggtggatatcgacggctatcgctgcgactacatcagcagcaacaccattcccaccgccttctggactcgcgccatcaaggccctgaaggagtataaacccggcaagaccatcaccatgctgggtgagggcgacatggccaacagcgtgtcgcgtctgctggtgtgcggctgggactatgactacgcctggggcttccagagtgcgctggtcaacaacaagaccaatcccagcggcgtgttgaaccagtgccgcaacctggtgggcgacctgcgctttatcgacatcagccgcatggtgtatctcaccaaccacgaccagaattacaacagcacgatgaacacgcagtatggtaataatgtgtatgctttcacggtgctgacgtttaccctgtacggtatgcccatgctctacaacggacaggagacaggctacctgatgaatcgcaagctggactacttcaaccgcacgcccatcaactggaacaccgtcgataacaagatgctgaacaccgtcaaggcactggcagcgttgaagcacagctgtgacgcactgattgacaacggcgaccgcgccagtgaggtcaagttcctgaccacgggcaacagcaatatggtggcctatacccgccatcacaacgagcagaccgccctggtggtgctcaacctgggtaccagcgcgctgaacacgattgtcaccggccttgagcccggcgagtggaaacgtgccatcgatgtgagcaacatctcggatggactgacggccattcccgtgacgttcagttcgacgcagagtttctcgattcccgctggcggttaccaggtgtatgtcaagggtgagcctgtcccgacttatctgcatggtgacgtgaacggcgacggcgaggtgaccatcggtgacgttagcgccctgattgacctgatcatgagcgacaatgttgaaagtaccctcttcaagagagccgacgtgaataatgatggggaactgtcgattggcgacttatcggcgttgatagatattattttgggagtttagacgttagactttagacgttagatattagactttagacgttaggttttagagtgatgaggaggattgggtttcttatggcgatggtagtggctggtgtcgttgtggcactggctgctgagggtggcggacgttttcagcgtctcgacagcttgattgctgcgcagccccagattgtcgccgccaaagaggcccgactcgcacagctgaagttcgatttgggcaaggggacgacagccccggggcgctatgccgccttgaaacggctctatgaggagtactcggcttaccagtacgattcggcctacgcctatgtgaaccagtgcatacgcttggcccagtcgatgggcgatgaatcgctgttgaacgagggccgcctgaacctggcccatatcctttccaccgcttgcctgatggacaaggcacaacagacgctgaatcagattgataccacgcgcctgtctcccggccagctcgtcgtgtatcaccgtacgctgaccgacctgctgatttatcaggcggagtatatgcagggcacgcaatatgccgaggagtatgtgcagcaactggtgggggtgcgtcgagctgccatagccatcaatgtgccccatgacaacatcaattaccagatcacgcaagccgagtgctattctgacgacaaccagccccagcgtgccatcgaactgctgtccaagctgatggacaactaccacagtggcgagcgcatgtattccatcatcacaagcacgatgtcgttctattattcgcaactgggcgacaaggagcaccagatggagtacctgatcaagagcgccgagagcgacctggaaggctgcatccgcgagaacacgtcgttgagggcgattgccgatcgcctgtttgacgagggcgacatcgaccgggcctatcgctacatgcgcgtggcggtggacgatgccaatttctacggtacacgcctgcgcaacatccaggcgtcacgcatcgtacccaaaatcctgagtgcctaccagaccaagcaggaacagggccatcgcaagatgatgtggctgctgggcatcatttcggtcatcgcattgctgctggtggtcggcgtcatcgccatctatcagttgttgaagcgctaccgtcgcctgaacgagcagaaaaaagccatcaacgaagagttgcggcacgtcaacacccaacttggcgagaccgtcgaagaattgcatgaggctaacgggctgctgcaggaacgtgagcagttgaaggagcagtatatcgcgcgcttcatggcgttgtcgagcaggtttatcgaccgtggcgaggagcagcgcaaggccctttatcgcctataccgcgaccgcaaaaccgaagacctcgcgcgggaactgaagagtgccaacttcggcaatgagaacgcgcggctgttttatgaggactttgacaacgcgttcctgaacatctatcccacctttgtcgatgaggtgaacaagctcttgc

SEQ ID NO: 2223 - DNA, 24170 bp, synthetic construct
  source 1..24170: mol_type = other DNA
  misc_feature 1..24170: note = Synthetic
gccgcaatcctcaactgactggccgtcttctggttgtctgcacggaaacggatcttgaccttgcctttctcattgggctgacggtcaaactcatcacacttcatagcagccttcagtgcttccattcctgccttatacatggctaccgtatcgaaaggattagtggcctttgtcgtctgatttgttgtctgaatcgttgagttgtcaacataaatctgatactggtccttacatacctgattccatttctccgcttcggtcttggcatcctgtgcaaaggctgaggctgacattgctgcaacagcagccatcatcattagtttcttcatcttttcaatatttaagtaggttttacattattcaatccctgttacggcctcattgctatctgccgtatctttatccgatatgttattcgatgcaatagaattgttttctgccgtatccgtattccctgcgtcatgttcaaatgcaccttcgctctcctgctcgacaacttcttcatctgaagcactcatcactttacatacacttgctatcgtatcgtttttcttcgtaagatttataagacgcactccttgtgtcgcacgtcccatcacacgcacatccgcaactttcagacgaatgagaattccgctcttgtttattatcattaaatcgttttcatctgtcacaacctttattgccacaagacgcccggtcttctctgtgatgctcagtgtctttacaccctttccgccacgtgatgtcttacggtagtcctcaacatcactgcgttttccgtatccgttttcactaaccaccattatcgtttccgactgcgggtcattaacgcagaccattcctacaacctcatcgtcaccatcgtcaagacgcattccgcgcacaccggtagatacacggcccattgtacggatatccttttcattgaatctgattgcacgtccatttctgttggcaagcaccagttcattatttccattggtaagacgcactcctacaacctgatcaccatcaagaatgtttatcgctataacaccattggcacgcggacggctatacgcttcaagacatgtcttctttatgacaccgttctttgtcgcaaataccacataatgggtgttcaagaattcctcatcatcaaatttctttattctaagcacagcattaatggcatcatccggctctatattcagaagattctggatagcacgtccctttgcgttctttgccccctccggaatttcgtaacatttcagccaatagcatcgtcctttctgtgtaaaaaacaacagcgtgttgtgcatcgttgccggataaatatattcagtaaagtcctcatcacgcgtatgcgcgcccttactcccgacgcctccacgactctgctcacggaattcagtaagtgccgtacgctttatatatccgagatgactgatggttatcactacaggatcatccggatagaagtcttcggcattaaactcctcacttgaatactttatctccgtacggcgttcgtcaccgtatttctccttcacctcctgcaattcttccttcatcacctgcttgcaaagctccggatcattaagaatagcctgaagacgtgcaataagcttctcaaggtcatcatattcctgatgcaacttatccatctgcagtcccgtgagttgcctcagacgcatatccacaatagcagaagcttgtacgtcatcaaaaccgaaacggttcttcagcccctctatggcagcttggggcgtctttgaggcacgtataatatgcaccacctcatctatattgtcacaggctacgataagagcctcaagtatgtgtgcacgatcctgggctttcttcaagtcaaactgtgtgcggcgtatcgtaacatcatgacggtgactgacaaaatagcggacacagtctttaagggaaagaagcttaggacgcccttttaccaaagcaatgcaattcactgagaatgagctctgcagtgccgtcatcttaaagagtttgttgagtattacatttgcatttgcatcacgctttacatcaacaactatacgcatgccctgacgccctgactcatcattcacattgcttatcccctctatcttcttctctgaagcgaggtcggcaatgtatttcacgagatcggccttatttactccataaggtatttcgtttataacaatcttatcgtgagtgtcaccactttctatctcggcctttgcacgcatcacgatacggccacgaccggtctcataggcatccttgactccctgtataccatagatatacgcaccggtagggaaatccggagccttgatatgctccataagcccgtcggtatcgatatccggattgtctatatatgcacaacaaccgtcaattacctctccaagattatgggtcggaatattcgttgccatacctacggcaataccgttgcctccatttacaagaaggttaggaatctttgtaggcattactgtaggctcctgcaaagagtcgtcaaagttgttcgtcatgtctacggtatctttctcaaggtcgtccatgacatgctctcccatttttgacagacggcactccgtataacgcatagccgctgcagagtcaccatccacagatccgaagttaccctgaccgtcaacaagcgtataccgcatattccagtcctgagccatacgtaccaaagccccatacacggaactatctccgtgcgggtggtacttaccaagcacctcacctacaatacgggcacatttcttatatggcttgtcacttgtgtttcctacccccatcataccataaaggatacgacggtgaaccggcttgaatccgtcacgcacatcgggtaaggcacgcgcgactatcaccgacatggaatagtcgatataagaggatttcatctcctcctcaatattgattttaataattctgtcttgatcgattgtctgatccatttgtaaaatatattattattttatgctctttaatttatacaaacatccttcgatgtcattttcgtgtgtttatgcattataatcgcttaaacctgttgttttggccattttaaggcaacattcatacgacaatgatatgctatgcataagcaacctttttttattaagacagcgttcttaacgccattctaagcccgtataaagctttcggtctgtcgagaagaggtcacgataatagcagtcaaaggtaatcatttttttttattccacaaaacttttacctaaaaaagacgcacaacgctcagcacaccgttcaccgtcaacaccggcagaaacaattcctcctgcatatccggcaccctcaccacacgggaacagtccggctattccgacatgcataagcgtatcggaatcacgtaatatccttacaggagatgaggtgcgtgtctcaacacctatcatcacagcatcatttgtaagaaatccgtgacacatctttccaaatgtcttgaatccctcctgaaggcgacttccgacatgctgcggaagccaaaaatgaagtggagacgatatcagtcccggagcatagctgcttttaggcaagtcatagctcagacgtttgttcacaaaatcggccatacgctgtgccggagccgtctgcttcatatttccttgcagccaacagttccgttcgatctcttcctgccaacacatcatacggagagcaccatcgccactgacatcctcaggcctgacctcaacaaccattccactgttagaccaccggcctccacggttgctcgggctcattccgtttaccactatctgctgtttgtcggttgccgccggtatgacaaaccctcccggacacatacaaaaagaatatactccacggccggccacctgtgtaacaaaagaatactcggcggcaggaagatatttcccacgtccctgacggctatggtattgaatactgtctatcagttctgaaggatgttccaaacgcactcccacagcaatgccctttgcctcaatttcaacattcgcatcattaagataacggtaaacgtcacgtgcagaatgtccggtggccaatattacaggccccttaaacattatctcacgcccggtattcaaatctgttgcctctattccaacaacccgacggccggcaccgaaagcatgttcagaacaagaaccgtctgatatgacgagcctgtccatgcgggtctggtgatgaacttcacctccggatttcagtatagtatttctcatattctctatcacccccggaagtttgtccgtacctatatgcggatgtgcatcggcaagaatcgtttccgatgctccatgctgacagaaaacatttaggattttctcaatgtttcctcttttcttactccgggtatatagcttaccgtctgaataagcaccggcaccgccttcaccgaaacaataattgctctcactgtcaatcttctgcgccttggttatcattgaaagatctcttttcctttctcttacattctttccacgttcaacaacgattggtttcagtccaagctcaataaggcgcaatgcagcaaaaaggcctcctggcccctcacccacaacaattacttcatcagcatctgaaacatctccatactctgtttttatataggagtcacatgccggcatctcattgacatacaccctgactttcaaatttacatagataatacgctgacgggcatcaatacttcttttcaatacccttattccatatatggtacgtacatcaaaacctttttcacgtgcgatataatcttttattgtgccctcattcgaggctacctgcgggaaaacccttatctgatattcatgtatcataaagatgctatataatattatgtatactgggatgcctcataaaaataggaaagaaccagaatcacacaccatctgctttcaaaaccaccgcattatgaggcatataacatgcaaatttacataaaatccacgagattccattaacgacaactaacattcacataaaaaccgtgtatttatttccggaagaaacaatacacggcacgtaaaaccttaaccggaatttatctcattcatacagctatcaaccaaaaaacggtatggattatgtattgaacccttgagaaaatccagtcctcatcatatactttttaatatcagttcattagccttgtctataacggaagtgtccaatgacgcaagatatatctttgtcgtactctcggaatcgtgccccataccttcactgattacagacaacggaatattattactctttgcaacgccagcccacgaatggcgggcgacataagttgtaagctttatcggaagccgtatctgcacagcaatccttttcaattggctattcacaaggtgaagagcggtatcatactgttttcgcttattctcaggataacggattataggaagcaaatactccgtaacattctgtggatacttatttataatctcctgcatacatttttcccactttattataagttgctgtcctgtctttctgcgcttatatgtcaatattccgtccttaaggtctgactttttcaggtaggcaatatcgacaaacgacattccgcgcgtataaaaactgaacataaaaatatctctggcaaagtcaagcgcggaattgcatggcagactaagttcctttatcttcctgacataagttatagacattccgcgcttcacggttttgccgattcctgtatatacatgtctgaaaggatatttctgaacggtaagtcctttttcaacggcacggttatatactgcacgaagcacccgcatataaaaagatacagtgttcatcgatatctgacgggatttaaggtaagcctcataccccatcatgaagtccgaatctatttcatcaagaatggtattctcaccggcaaacctgataagactgtttaatgtagccttatatgtctctgatgtcctgcattttccgacaagtttcagttgagctattatgcctcgcatgaaacagggtaaagactgctctacggttgcctgctcaaaacgcctaacaatatcatctgcagtacatgcctgcaatccattatccaaagacactacaattctatgaaaacgtgacaactccagatttacccgtctacacacaaatctaagatattcctctcgcgtaccaatgccttcattaacaaaagatgctttaattgttttagtcgttgtatcccattccgactttaaaatcctgtaattggtataaacctgacgaacaattctccgacatattacctgataatacaaacagccggtttcaccgtcaaccgacaattctctgaatctaacttttactgatgccatattttctaattttattatatttaaaagcttgtgaaagataacaataaaaattattcttataaaaattcaaataaacacagtgttaccactaaagaataacacttgacggaaactcgtttaaaagtcattggcagacatactattgaaggcaattcatgactatcatacagaagtattatgacaagaccttgtatgaacataatatgttaataaaccatatattttccacaacaagcattgaaaatgggaaacaataatatacatttgcaataatttccaatggaaagtattttaaaagattaattatcaacgaataatatatttagaatatgagcgaaagcaaaatcagcaaatacctaattgtaggtggtgtggcaggcggtgcgactgctgccgcacgtatcaggagactgacagaggatgcagaaatcatcctcttcgaaaaaggcaattatatatcatacgccaactgcggactaccttattatataggtggagttattgaggagcgcgaacgtcttttcgtacagacaccgcagactttcggcagacgattcaacattgacgtgagaacaggaagcgaagtcatagccatcgacaggacgaagaaagaaatagccgtaaaaaccacagagggaaaagagtataccgagacatacgacaaactgctcctatcgccaggtgcatcacccgtacgccctccattggaaggcataaactccgaaggtattttcacgttgagaaatgtggatgatacagacaggataaaggcatacgtagaaaaccacaacgtgaaacgtgccgtgattgtaggcggaggatttatcggactcgaaatggcggaaaatctctgtcttgccggagcacaggtagccgttgtagaaatggctccacaagtaatgtcccccatagactactccatggccgcattagtgcacgaacatctgctgcaacatgacgtaaaactatacctggaacaagccgtggaatcattctcacaagaaggtgaagaactgacagtacacttcaaatcaggtatagaacttaaaaccgacatggtgttactctctattggtgtgagagcagaaaccaaactggctcaagaagcaggactgcaacttggcgagatgcgcggcatatacgtcaacgaatatcttcagacttctgactgtgacatatacgctgtcggtgatgccatagagtacaagcaccctataacagaaaagccatggctcaacttccttgccggaccggccaaccggcaggcacgcatcgttgcagacaacatggtgaaaggcaacaatgtgaaatacgaaggttctataggcacggccatcgccaagatattcgatataactgtggcatccaccggactgccggccaaacgtctgcaacaaatggatattccctatctgtccgcaactattcactccggctctcatgccggctattacccaggttcgctacagatggcgataaagattaccttctctccatccgacggcaagctttacggagcacaaatagtgggatatgacggtgtggatacacgcataaaccaatatgccctcgccatcaaacagggatgcaccgtacaacagcttacaaaattggaacacgcctacgccccgccattctcctcggcaaaagacccggtggctatttcgggatatgttgccggcaatatcctcagcggaaagatgaatccactctattggcgtgaactcaaggaagcagacctgtccaaagtcacactcattgatgtacgcacagcagatgaggcagcattaggctcgatacccggagctgtaaacataccgcttgacgacctgcgagacagaatatcggaaataccgtccggcaaacctgtatggctgttctgcggtgtcggactcagaggttatctggcctcgaacattctgaaaggtcacggatataacgatgtgttcaatctcatcggaggcttgaaaacctacaaagcctcaactgcaaagatgcctgccccagacggctttaccacaacaagtgagacatgcgaatgtgccgggagtccacataacagccattctccaatcatacggttagacgcatgcggattacaatgccccgggcccatcctgaaattaaagcaggcaatggaaaaactaacagtagaacagacactggaagtgaaagccaccgatgctggctttccacgcgatgccgaagcatggtgtcgcacaactggcaacattttcctcaacaagaaatcggaaaaaggaatacatacagtagaaataaaaaagtctgcgtcatgcatggtcaaggatgacaatccacagaccggcaacaccggcaagacattcattctattcagcgatgacctcgacaagacactcgccacatttgtacttgccaatggggctgccgccacaggtaagaaagtaagtatattctttacgttttggggacttaatgccatcaagaaatctgtcaagccacaggtaaagaaagatatttggggcaagatgttcggatggatgctgcctgccgactccacgaaactcagcctgtcgaagatgaacatgatgggcatcggaggaaagatgatgagatttcttatggccaaaaagggcgttgactcacttgagactcttaggcagaatgctatcgactccggtgtggaattcattgcctgtcagatgtcgatggaagtgatgggcataaagcacgaagagctgctcgataatgttattgtaggcggtgtggcttcatatatggaacgtgccgaaaaggccaacgtaaatcttttcatataaacaaaatctatcgcatattaatgcgtaatacaggaaatggaaaaaataaaatgtatatgtgtaatgagagagttgtataaagctctctcattactcgaaaatgaactgcagaccactcatggtgtgtcgctcaatgaagcaatggttatgtgtgccatcggcactgacagtatcactgcttcgaccgtcaccggccagacaggcctcagtgcgtcaaacgcctctaaggtaatcagagccctggaacgcagaaaactactgttacgtaaattcggcaaagatgacaagcgtctggtatttctttctcttacagccagtggaaaggataaactcgacaaactaaaatgccatcagtttgacattccacccacactgcttagattttttgataccggagattctgcaatttatcaatagaaagttttatttattttggcatatttattctccttttcccgccatagctgtattcaaaaagcttgatattctaatttcggttaacgaaaagttttcaggcttataaataccgaaatgtcacgaccgacttcatcaagcaggtaaatcacttcacaatatatactgcgtttagccatttcatggaaatacttatgaagtgcccaaagcacaactctattctttttgaaaatggacattaccatataataaaaacccaccgttaaggacgatgggccaacctgagtgttttcacaacggaataatccttattgtgatttgcttaaaattcattgcaaaggtattaaaaaaatatttatatacatagactttactcattatttttttcgtatatttgcaaaagaaccataacaatgtcaacaacttaaatcagaaaaaccggaaattatgaaaaagatattaggcctcgacttaggaacaagcagtatcggatgggctgtcgttaacgaaaaagaacatgaaggcgaagagtcttccatagtaaaactcggagtcagggtaaccccactcaccgctgaggagcaacgcgattttaaggcaggcaaacagttaacaacaaatgccgatagaaccatgaagcgcagtatgcgacgcaacttacaacgctacaaactgaggcgcaacaatcttatagaaataatgaaatccaacggtctcataaaagaagatacaacattgacggaacaaggaaacaaatcgacatttgagaccttccatctcagggcaaaggctgcaacggaacaaatatcattagaagaatttgcaagagtattgctaatgataaacaaaaaacgcggatacaaaagttcacgcaaaataaaagctaatgaagatggaagaattatagacggaatggatgttgccatacagatgtacagccaaaatctcactccgggagaattcatgttccaaaatataaaaaacgggaaaagatacacacctgatttctaccgttcagatctgattacagaatttgacagaatatggaactttcaaaaacagttttatccggagatacttacagacactctgagagtagaactgtatgacaagaacgaaaagcagacatgggctatatgtgccaaaccgttctcacttacaggaataaagcgtgaaacaaaaggagacgaacaaaaaagagaaaactatgaatggcgcaaggatagtctatcacataaaatgaatcttgaaagacttgcgattgtcctgcaaaaaatcaacggacagataaacaattcgagcggctatctcggagaaataagcgacagaagcaaagaactgtatttcaagagacagaccgtgggacagtatcttatggaaaaactaaatgccaatcctaattacagtttaaagaataaagtgttctatagacaggattatttagacgagtttgaacgaatatgggaaaaccaggctatatatcataaagaacttacaaaagacttaaaacgcgaaatacgcgatgtgatcatattctatcaaagagcattgaaatcacaaaaaggcctcataagtttctgtgaatttgaaaataagcaaatggagattatcgtggatgggaaaaccagacaaataaccgtcggttcacgcgtttgtccaaaatcatctccattatttcaagaattcaagatttggcatattattaacaatatccaggtttcggggaaggttattccgacagaatatacagatctgttcggaacaacatgccaaatgaaacacggtaaacgttttcttgatcaggaagaaaaagaaatattattcaaagaattgaatatcaaggaaaaaatgtctaagaatgatgttctgaaactcttattcaataagacagaggaattagatcttaatttcaaggaaatagaaggaaaccgtacgcaggctgcattgttcaaagcttatcagacaataatagatatgagcggacacggtaaatatgatttcccaaaaatgaaaacagacgaaatcatgaatatagtaaagcccgtcttctgtgaccttggatttaatattgacattcttcattttgactcttctataaaaggaaaggcatatgaaaaacaaccggcatatatgctctggcatctactgtattcatttaccggtgacaattcaaaatccggtaatgaaaaacttatcgggaaaatatcagaactatatggcttcgacaaggagtatgctgcgataatagctaaagcaacattacaacaagattatggaaacctcagttcaaaagcaatacgcaaaatcttgccttacatgaagaatggacaagaatacagcatggcttgtgaatctgctggatacagacattcgaaaaagtcacttacgaaagaagaacttgacaacaagatgctaaaagataggctggaacagttaccgcgcaacagcctacgcaatcctgtggtagagaaaatcctcaatcaaatgataaacatagtaaacagtatcatcacaatgtacggtaaaccggacgagatacgtatagagatggcacgtgaactgaagaaaagtgccaaagaacgtgaggaaatgacaaaagccataaaccggacaacaaaagaacacgaagattttcggaacatattgcaagaagaatttggtataaaaaacgtaagccgaaatgatattataagatataaattatatatggaactcgagaagaacggacacaaaacgctatattcaaacacgtatatttctaaggaaaaacttttcagcaaagaattcgacattgagcatatcataccgcaagcaaaactgtttgacgactcattctcaaataagacgatagagacccgtgatataaatatagagaagagcaataaaacagcatacgactttatatgtgaaaaatataatgctgaagaaattaaagattatgtaagcaaaatagacaaacttttccgcgatggcgtgataagtaaaaccaagcgagataagctgatgatgaaagaagccgacataccagatggatttatcaaccgtgatttacgagaatctcaatatatcgcaaagaaagcacgggaaatattggaagagattgtcagggaagtggtaccaaccaccggctctgtaacttcacgtctgcgtgaagactggcaactggttgatgtgatgaaagaacttaactggaacaaatacaacaagctcggactaacagagattatagaagacagggacggaagaagaatacgtaaaattacgaattggacaaagcgcaacgaccatcgtcaccacgcaatggatgcactcacaattgcattcacaaaacacagccacattcaatatctcaacaacctaaacgcaaaaaatgacaagggaggaaacatatatgctatagagaaacaagaactttatcgcgacaaaggcaagcttaagttctgccctcccatgccgttggatatacttagggctgaggcaaaacgtcatctggaaaacgtccttgtttcaataaagtcaaagaacaaggtcgtcacaaaaaataaaaacatatctaagaaaaagaatggaaagaacaagaaaatacagttgactccacgaggtaaattgcataacgagacgatatacggaaaaattaggcaatataccgtaaaagaagaaaaagtgaatgcggcatttacagaagagaaaatagctacagttgcaaatctgaaataccgcaatgcgttgtttgcaagactaaaaagctttgacggaaatgcaaaaaaagcatttacgggaagcaacagtttgcagaagaaaccgcttttcctaaatgaaatgcacacagaatgtgttccggaaaaagtcaagattgtgactcttgagggtatatatacacaaagaaaagaaataaccccagatttgaaactcgaaaaagttatagatgttcatgtgcgtgaaatattaaaagcacgtcttaaagaatatgacaacgacccgaaaaaagcatttgtcaatcttgactataatccaatatggctgaataaagaaaagggtatttcaataaagcgcgtgactatacgtggtgtgaataatgccgtggcactacatgacaaacatgataataccggaaagcttattcttgacagtgaagggaaaagacagccggccgactttgtaagtacaagcaataatcatcatgttgcaatataccgcgatgcggaagataatttgcaggagaacgttgtatcattctatgaagcaacaatgcgtgcaaatatgaatatgccgattatagacaagaactataggaaaacagatggatggcaattcctttttaccatgaaacagaatgaatattttgtttttcctaatactgaaacgggatttaatccaagtgaaacagatctgcttaatcccgacaactacacagagattagcaaaaacttgttcagagtacagaagctggcaagtaaatattatgtgtttagacatcatctcgaaacaactgttgatgacaataatgaattacaagaaattacatggaaaagaataacatcattaaacggaataaataaaataattaaagtccgcgtcaatcatatcggtcaaatagtatctgtaggtgaatactaaatattggaatatcatgataaagaaaacactatatttcggcaatcctgcatatctgtcattaaagttaggacagatggtgataaaacttccggaaatcgcaaaaaatgaaacactcccagaacgtatgaaacaacagggagaaattaccaaacctatagaagacataggaatagtggttctagacaacaaacaagtaaccattacacaggggctgttagaagcattgcttgagaccaacagtgccattataacctgcgacaaacgaagcatgcctgtcggacttatgctgcctctgtgtggaaacaccgttcagagtgaacggttccgcgaccaaatagacgcttcgctaccattgaaaaaacaattgtggcagcagactgtcaaagcaaaaataagaaatcagacttccgttctaactatttgcactggaaaggaaataaagaacatgagacgctgggagaacgatgtaaagagtggagatacggataatcttgaaggacgtgccgcagcatattactggaaaactattttctccggcatcaaggaactggatggatttacacgcgaccgtgaaggcatcccgccaaataatcttcttaattacggatatgcgatactgcgtgctgttgtagcccgtgctctggtttcaagcggaatgcttccaacacttggcatacatcatcacaacagatataacgcttattgtctggcagatgacattatggagccataccgtccgtatgtggatgaaatagtattctcgctgataaaagaatatggatatgataatattcaagaacttacaaaagagatgaaaatacgccttctttccataccaacaacagatgttataataaatgggaaacgcagtccactgatgatagcagtaagtcaaactacagcttcattataccgttgtttcaatggagaattacgacgaatatcatatccagaaatataaaatcatagttatgaaccgttttagtgaatatcgtgttatgtggatattggtattttttgatttaccgaccgagacaaagaaagacaaaaaagagtatactttgttccgtaagaatctgcagcgtgacggtttcactatgtttcaaatgtctatatatgttcgtcattgcgctagtatggaaaatgcagaagtacatattaaacgcgtcaaatccttcctacctcaatatggtcatgttgcaataatttgtattacagacaaacaatttggtaacataaaagtattttatggttcaaaacatcttgccacaaatgcaccaggacagcaacttgaacttttctaatcttttaaccttacaaaatattaattaacggcagtttagattaattcctatctatctatttatatatcaatatatgctattaatggaatctttatattaatgggattttgttatataacaaaatcccattaataagacaacattttttcttttctatttgtgtctgtatatctctgtctttcaccactttacttcacttgtgatgtttattactatacaaagatacgaattttaaagcaaatcacaacacaccggggatggtcattcccacactttccgatgtttattactatacaaagatacgaattttaaagcaaatcacaacgccaggtgatgactactgttaatattgatgatgtttattactatacaaagatacgaattttaaagcaaatcacaactccttacggtcataacattataaatgctttgatgtttattactatacaaagatacgaattttaaagcaaatcacaacctccaaccgttctaataaccgtaacaatcgatgtttattactatacaaagatacgaattttaaagcaaatcacaactcgccactgcggcgttatttctctcgccacgatgtttattactatacaaagatacgaattttaaagcaaatcacaacatgtcacttcaagtatcgttctacccaaaagatgtttattactatacaaagatacgaattttaaagcaaatcacaacacgacagcacaagcgtcatcgagcgcgatggatgtttattactatacaaagatacgaattttaaagcaaatcacaacgacttttaaacatgcctattcttccaaacaatgtttattactatacaaccatggtatgtggaagtatttgattgcctattatatgcagttaatacggtagaaaagtgaactagaatttacttataggtctaaggatagtgaagatttaacgattttaacctgctttcacgctaaatatgaggtttggatgacaaaatgaggaaagagaaataagagaagacagtcaaaaaagaaaataaaatgggatgcggttgaaacgatacccattcccatatatggatataaaggcaacttcgctttatagtctgtatatttaagaagtataaagtaaagtggattgcatggaatggggtcggtttaaaccacaccatctgtttgtatcgacctaaattgatttcttgacttaatgctatatataagagatgaataaagtcaagtagtacaaagatggtgagttgccaaggtaatagctcttttcttctttacataagcaaagctgtatatctcggcataattgctcaagcgagtgtttttaacagtggattcatgcgaaaattttctctttctgtcttacatttcattgtttggttttggaaactgcatcatatattcatgaaaagcttcaatagatatagtgccatccaacagacctttaaaataatctcccgatgttctgtcaaatacagcattgttagaagcagagccttttgctgcgatgatgaaattgtagtccgttaggaatcggcacatagtctcaacatattctcttttcatttttataagcctacccaaaatcttagtagagccatcatcttcttcttgtttagttactttcttacaaaaaaacgcacaacgcttatatattgcgtactcttcatctacaaaaccaccaaggtcttctttaagtgctttaattctttctgatgtataatggttataaagtcctgttggtttctcaccttgtgcttccacatacacatagttcaaataataacgcccattatcaataaaggccacaattctacgaatcaccaattcatcccattctattagaaactttcgcctattcaaatgcctaaaattagtaatgtttaacgcacagcctgctctgaaccaccaaattggatcatttaccccaataatacttttcttaaattgtatgggggaatccaataacttggacaagtgacgttgaatgtctcttatcttctgaaattcaaccaaacctctgtagccaggaaaagcctctgccattcttcttctgaaaaacaatgttgatttctcagagataactggctctatgacaggtttagagggtcttagcttttcatattgtttctctatccagttgataagatatgacttgtctaaatgcctatgcctaccattcctcttgatatattcaataacttcaagtatgcgtgaagtcaggtcacagttggaagaagtgaaactatatattgcacgatgattaatgtcaaagggcatattttctggaccccaattaccctgacgagccgcaacaataacatatcctactcccaaagcactcatagcatatcccaattctaaaagaacattaggattaggcacttccttactgacttgcatcccattcccagacgtcttctgatagtttatcactggagttacatctgcaagaaatatatcactagcatctattttccttagaatcgtctgatctatagatggcataccagattcacccaatgtagaagggtcaatctcaagccttatgcctctatcatttaatgcttccacagcgttttgtagagcaacatctaatgtctttctgctcttcttgtcctcagactgccaagagaaaaatactttgtattgactacccataatttcagttgacattatttttcacgattgcccaaaaaccatcattatccttgccttcacgcttcagtattccactcttttgtaaagcagaaaggtcacgctcgatggtacgttggctcaccgacaatgtctccgacatttgcttaccagttattgtcggagactctttgattatattaaggattttccgttgacgttcagagagttttgtctctgacacatctccgacattatctccgacattcgaactgtcggaagaggcaaagatgatggtctgaaattgggtcggggttgatttgaatatgggcttcagttcgtccctatacccatccaatgcttttgtctcattgcagatgcgtgtaagtccactgcctcgtttctccatatagtcaagctgagccattacatttgcaaggatagggttacgtctttcggaagaaacgtctgcgatgtctatgtcttgaatcagcatgccattgtacattccgccaggggatgttacagtgagtcggtcatcgaatatgtcaagatgtacttcaccacccatcaccgtatagtcacgatggataaagtggttaaccatagcttcaagaacggcacgttctgcatattcaggtttgttctttcgtctatcgggcagtttctcccagcctttcttagtgttggatttcacaaagttcatagcctcacgaagcagcatgaggatgttgcctgtgaactctgcatcgttgatggcatcacccttttcctttccatcccatcgtgtgcagtataggcgagattgccataatggacaatcatcggcaaacagtgctcctgcattagtaaggtaaccagtactggttaccagcccgaacgataatagatacttcttatcccattcttgtttagtacggtctttgaaagcattcgctattatcgtgaaagcatagtcttcaatcttataattcgtatgaagggaatcgtaggttttattagaacctttaagtaccaaacgtaccatttgctctgccgtgacaggaagactctcatcacctacacgaacaaaggctatgcgcagaccatcaccaacgtagtaatacggagtataatgccctgcaatgactttgagttgcaatacatgtaaaccatctatattatgagggatcatttccacctctggtaaaggatccatatagtcacgaatcttactactgatagtttcacacacatgctgtacatcatcaagacctctgacgataccatcattatcaataccaaagaaaagtgagccacctaaaccattggcgaaagcacttacgctcttcaaccagctcttaggcttcttttcttcaagcatcaacttaaaatcgcatgcggtacattctgttatcagagtattcagatccattgttatgataactactatattatcaatcagtaaaaacatttttattcataagtgcaaaattacaactaattatccgaaaaccagcataaaagtctttgtttcgtatagttctaagtatcataggtacaattttaatggtagatgaatatatgcattacattttgccgagcgagattcaattgttaagtgagtttgaaaatgcgcatatctgaatcagggtccagccattgaacttcaaggccggacgaacggactacgagagaacagatggaggcacagacagacaggtttgtccgttataagtttttgattttataagtcagatcggagcaatgacttataaaatcaaaaacaaaagaaactgaatgcttatcagtaaagcgtgaagcataacataggatacctcatgttccggacaatgaacatcatcagcgctctcgttcctccaggatattccggcatctgttcagcgattgtatagacagggggggggcgacaccggtatcggcctacaacccaccgtaataggtgataaaccggcgttcgatgaaaaacagttcattgtccacgtatgccctgcgctccgtccagttgccctgtgcgtcggccttcacgccttttatctccgcgtcgtaataccatccgtcgccgccgtattgaaggtccatgtttatgtgcgttggcgatgtcgggttgtcaccgtatgtataggtcattccatcgccctctccttctccattaatcatgaagggtggaaagtactcatagaatgactgcgcgggcatgtgtctgttcatatcgaagttgtacatcccgtcaatgctgccggcacctatttctttaagttcccagtctccggagtacgagatgctgtagtttgaaatcttgcgcttgtagtcggcggtaaagtcctgatcatatcgtgttcctttcacattaatgatatctccgctttgaacaaactggtatccggcaatcttcttgccgttgccgtcacgtctgacgacgctattcaagtctcccgacggcgagaacatgcattcgtatgcgaagttgcagattggtgcctccgttccgtccaaaagagttttgggatatgcgcggacaatcttcatcgttttcacatcgccgcggagcatgaaaaggctgcgctccgtcagtttcggttcgctgaccgctgttgtctcttcctgcggcccgaacgaccagatgggcgtgtaaagactgccgtcctcacctacgaagaggaaatccccctccccgtctatcttgcagtcgtccgtcagctggtccttgacgggcacgtcgccgtagtaaggatatggcatgtgggtgaggagcacgccttcgccgtatggcaagcccacgtacgtccaacttgtctgcgcacgcatgccgccgaattgctctaagtccgagtagtccgtgatgctcagtattacatagccgtctctctccttgagcgtagccaaagaatagccgttgtcgtacatgttcgaattgcccaggtagttgctcccgagaaacctgcgcgagaagttcgtggtcttcacctccctgacgaactgctttgacacgtatccatactttttatcgtgccagaaacctatccatccgtccttgtcctcatgtacgagaaaactgttcccctcgccgaccgtgtgtataaccttgcccgtcacgggactttccctcatgttcacattcttccctgtcacggtatatagtttctgctgtgccgaagccgtaaaaccgatgcaaagcagtatcccgcaaaatgccatcactctccttgccatgacgtacgttatcgatgtcctcatacgtatcattgtttatccgtttgtgaattttccttccccatcattcttacactgccgttcaactgtccgtcggacgacacctctccggtgagcacaagcgaatcaccgtcagtcctgcaaaggcgcaacttccattcatccttctgctctatatgcttgttacttccattcggaagaataaaattacggctgtgttcgcccgtaagcaccatcgtgctgtcggcctcgatatttcctttcaacagaagcctgtcatctggcgaggaaagcatcgaaaccatcattgaacagtattcagctcttacgcttccgggaatgctgtcccactgcaacctcatgctgacgtcgaaaaaatccagcaccttgcaatcgaactccacttcgtgcaccggaggaggcgcttcaccgcaacctacggccattgcagccataagccacaaagccccggcctgctttttgaaaatacttcttttcatgatattaaatattaataaaaaaaggcgtgcaaccattctttccgcttgctttcattcatggttaccgccaagtgaccttatctcccacaagcacagaatagtccacgccccatgagcgtgaactttcagtctgcttgtcctcggagatgaatattggcggtattctgaatgaagagaacaagagctaaaagctcaatatatatttatatgttcgttttcaagtttcagtgaatggatacgctcttttaggtttgttgtttgtgccgcattttctttccgtgcggcgttgtttgtttaacttaaacctgcgggttgcagctcttccgggcgtacaaaatccccttgcgttccgttcgtttctgtctgttcctatgacctccttttttgatattattactgtatattgataatacaatgcaaaagtaattccttttcatgaaaaacaagaagacttaatgtagaaaatatgcaaattgcgatatacatttttctaccggatgatatcaaactgccaattaatggcaggctatgaaagaagatatctgcaacaaacaacaattatattcttatgcttccttgatttcttgcaaataagtacagattatattgacaattactttaaaaagtatgcaaaataagttacaagttcattaaaacaattgaataaatatgtcaaattatctgttttttcatttttttgtagtaattttgcggatatagaatagaattcaaaatgaaaataatcaacctcaaaggaactgatgaacgactgtacggattagtggcacgtttgattatgaatccggcagtgttacgccaaaacaacaactatccattcaggacttctctgagacacacatggtatattgccatggacggagacgcggtcataggatttctccctgtgaaggatatgcgtccgggactatatcttgacaattattacatcaaaggagataacgcacagacattaagctgtttacttaaatatctcatatccgattccgaccaaaatattacggcaatggttcacaccagacatgcggacattttccgtcaacacggttttatctcttataagaaatggacaaaatatgagaaaatgcagtatcacaatataatatgtaaagagaaataatgatacataggctaaatgtatatgacgccgtggaagaacggctgaagattatctttgagaattttgactatgtctatgtgtcattttcaggaggcaaggacagtggtgtcctactgaatctttgtgtcgactacatacgcaaaaacttaccggaacgcaaactcggtatactgcatttggattatgaagcacaataccggcatacgacagagtttgtacagagcagactgaccgcggacagcgacattcttgaggtttatcactgctgcgtgcctttcaaagtcgcaacctgcacatccatgtaccaatcttattggagaccatgggaagaatcaaaacgtgatatatgggtacgtaatatgcctcctcattgctatacggccaaagacttcagctttttctgcgacgatctgtgggattacgaattccagaatcttttcgcaccatggcttcgcaaacagaaaaaatgtcaaaggatatgttgtctcgtgggcatacggacacaagaaagcctaaaccgttggcgcaccatacacagtgaaaagaaccacaggcatttaggacactacaaatggacccatcgcatggaaaaacatatatacaacgcctatccgatttacgattggaaaacttccgatatatggatagccaatggaaaattcaaatggaaatacaaccacctttatgacctttactatcaggctggaataccaataggcagacaaagagtggcaagtccgtttatatcaccggccatttccacactttcaatatatcgcataattgatccggacacatggggaaaaatgctcagccgcgtcaacggggtgaattttgcaggcatatacggaaaaaccctcgccatgggatggaagacaataaaatgtccgcaaggattttcctggaaaaaatacatggagttccttctcgagaccttacccgaagaggcacggagaaactacaaggaaaaactaagggtgagtatccggttctggcgcgaacggggaggatgcatggacgagaaaacaatacagaaactacagaaacgcggcatacctatacaagtatgtcaaacaacggcatatcacacaaacaagctgcctgtaagaatggagtatctcgatgatatagacatagaggaattcaaggaaatacctacatataaaagaatgtgtatctgcatactgaaaaatgaccatatatgcaagtatatgg

SEQ ID NO: 2224 - DNA, 24170 bp, synthetic construct
  misc_feature 1..24170: note = Synthetic
  source 1..24170: mol_type = other DNA
tactttaaatttagcagcatctttaatatctggagtttccgttccaattttatttacagcttgtgcaaaagaagaacctcctaatttaaatgtatcagaagaaaaatcgatataataaatagcattgccttgtttcttagagaaaacaggctctactacttttttaagatcattacagtgtcctactcccgaaataattaccgtacctggagcaattacatctttgttagggtatttttgtttcatagataaagaatcctttccggttggaatgttgattcctaaatcgatagcaaaatctgaaaccgcttttacagcgttgaacaaacgagtatcttctcctttgtttttacaaggccacatccagtttgcagataacgaaactgatgttaatttctcttctaaaggagcccataccaagttggttaaacattctgcaatagcattacgagaacctgccgcttcatcaatcaatgcagcaataggagcatgaccaatagaggttgcaattccttcttttccgttgtaatccaaagccattaccgcaacatcgtttaatggcaattgcaaaggacctgtacattgttgtttggcaactttcccacccacacaacggtctactttattggttaaccaatctttacaagccactgcttctaactgcaatacagtttctaggtttttagaaatatcattattactatacgttacttcttcgtaatttctagtcgtagttttgtcatttaaaacagtttttggagaagaaccaaacatatcgtttaaatctaaatccataggtgcagcacctgtagtggcagatttaaaggtaaaacggttgttgtctgtaacttcacctacggtgtacattggcgaacgttcacgagcagcaacacgctctaaataatcaatatctttttggttaatcaccaatcccattctctcttgagattcgtttccaatcgtttcttttgcggatagggtaggatctcctattggtaatttatcggtatcaattaaaccacctgtttcttctaccaattcagataagcaattcatgtgtccaccagcaccgtgatcgtgaatagaaacaattgggttgatatcgttttctaccataccacgaatggcattagcagcacgtttttgcatttctgggttagaacgctgcacagcatttaattcaataccagaatccatagctcctgtatctgcagaagataccgcagcacctcccataccaattctgtaattgtcccctcctaagattacaattttatctccagctttgggttcgtcttttaaagcttgttccgccttaccgtaacccactccaccagcttgcataattactttgtcaaaccctaaagttcttaaatctgcatcagataagtttttattcaattcttcgtgctcaaaggttaataaagaacctgagattaaaggttgaccaaatttgtttccaaaatcagaagctccattagaagctttgattaaaatatccattggcgtttggtacaaccattttctttcttcaatattttcccaaggtctattttcttctagtcttgagtacgatgtcatataaaccgctgttcctgccaaaggcaaagaacctttacctcctgccaaacgatctctaatttctcctcccgcacctgtagcagcaccattaaaaggctctacagtagtagggaagttgtgtgtttctgcttttaaagaaattacagattgatattctttagtttcgtaaaaatcgggtttgtctgctgttttaggagcaaactgttctacttttggtccttttacaaaggcaacattgtctttataagcagatacaattcccccagggtgttcgctagaggttttacgaatcattttaaataaagaagtctctttttcttctccatcaataacaaaagttccgttaaatattttgtggcgacagtgttctgagttaatttgtgaaaaaccaaacacctcagaatctgttaatttacgtccaatacgtgtagacatatcttctaagtaggtgatctcatcatcacttaaagacaatccctcttgctcatcaaaagctctaatgttttctatctctaaaataggaagtggctttgcattaatagtgtaggtttcttgatttagtcctttgtacattttctgtaacattggatcaataggagtatcttgggtgtttacttgtgtaaactcttctattctttcaatactagaaatactcatgttttgagtaatttctaccgcattggtactccaaggagtaatcatttctttacgtggtccaataaaaaaaccgtttaaagcttcagaatttatttgtttagcgtttccaaataaccattctaatttctgaatgttttcatcgcttaaagcggatgtttgtactgcaaaaacagttgtatttttttgaaagaataatatcattatcaatgaagtttgttcaaatttaacttaaaagctcaaatttaagaatttcaccgattaaaccactctttgcattaaggaattattacagaagcttttgtttagaaaattactctttctcaaaacattaattctgtttttatttttttttgatttgattgtttttaaagcctttaaaatgttaacggattgttactataagcatttgttttaaaagtaacattgttgtaaaaaacttagggtggctacaatatgaatttatagctgtattaattaatacagctataaatataatggcttaatagtaaataattaatgtgaattacatcttgtattttatgctgttattttacataaataaccaactttctattatgaatagaaaatcaatattaacatttttctgagaaagcatttatttctctaaatcaagaagagctcttgttttttatcaaaaaggattcatctccctaacgtactgattacagttttttattagaaattattttatagtaaaatagttggtctttaataaagtaagcgggtatatatgtcattgttttaagttttataattacgaattatttaattaaatatgttttttataaatgaatatttaagtaattgatatttttttaattaaatatatttttattgagtataatttgcgtaaccttgtattcaactaagctaaacgcaattaatgatgataaaaattgataaattaattttatttacagcatttatgtttgtttttttaacaaatgctcaaagtggtccaactcttaacagtggtcaagacaagaagccatggaatatgaaatgggaaaaagttgaaaatatgtctgatgaatttaatggaagtttagatttttcaaaatggcatacaaaccctaaaggaaatggatggacttggattggtagaccacctggactttttgaagcagattctttttatacctctgaaggtaccttgtgttgtgaagttaaaaaatataatagtcctaaatatgtagagggaaaaaagtttaactataaaggtgggattataagatcttatgcttcggcaggagtagggcattattttgagtgtaaaatgaaagccaatgctactgaaatgtcatctacgttttggttaaaacctaggattagttgtggtaaaaatttagaactagatatacaagagtgtgtaggagctaccaatagtatgacaaaaccttacgctataggatgggataaaattatgcatagtaatatgtttgattttaaaacaccatgtcatcctagtgaatttaaaacgatacaacttcaaggtgctcttaatatttctgagaaaaattctagtcgttattttgtttatggatgttatatagagtctcctacaaaggttcacttttttttagatggccaatatatttactctattacaccacctagaccttatgatatagatatgtttatcaccatggcaatggaaacttatgattggaatcctatttcttctgcaggagattttaaattaaaaaatggaacatggacagagagaacaacaagatatgactgggttagaacctggaagttagtaaacgactctggtactgatctgagtattggagaaactttttttcttgaaaatagagctactggtaaattaattagaccccaatctgacggttctaacagtaaaatttcacaagcacctaactcttggagaggtgggtacacaagatggactatggtagatgctggaagtggacgttttcacttaagaaatcacgctacaggtagatacattgaacctgtaggtagttggaataatgcagaattaagacaggtagatactccaagatggggtacacaatggaccaaagagaatgctggagatggatatttttatcttaaaaatagttcaacgggtaaatattttagacccattggctacgatgatttagatgctaatacaggaaataattatgcaatgcagttggtgccaacatcattaagagggcattttacacagtggaaatttgtgagtacacgtacggggcgtacagcagcacaacaaacaacaataagtgaagaatttataattgaaaataagtttgatatttcaccaacattagcacataactttgtgaatataaccacaaataaaagtgattacaaagtgtatataatagatttaaatggagttgttgttaaatctttaaaagtgataaaaaatacaacattacaagtagatattacaaatgttattcctggattgtattttataaaatatatatcagaattagatggaaaggttaacataaaaaaaataattatcaagtaattgtttttaggctacgtaaatttacatatcttatacacacaaaaagttatctaaaactaagttttagataactttttgtgtgtataagaagaaatgagtttttatcttaattttatagaatggtgttgttttaaaaagaaagaagcaaggcttatgttaaatagaataattatctataggttttaaattcaaattataaatgcaatgtttttaagaaaataaggtatttgttagtaataaattgttaattaaattaaatttgcatcacttttaaaagtgttgtattaaatataaatccatttttattggataatcacaataaaattttaaataaatcaaaagatgaaaattaaaacaacaaccgtgtgtggtttgttatttttaggaactttgctatttacttcttgtactgctcaaaaatctacaaatagcaccaacatcaaagctgcgtttccgtttaagttacctaaagaaaaaccaaatagactcatgagtacttctatgcaaagaagttacgatgtgtatggtgcaactccacaagataatgagttgtactcacagtttaagtatacagagttaaaaggttttgactacagtggtcacgatggtacggtttcaagaagagatccctctaaagtgatatttaaaaacggaaagtattatgtttggtatacttatagaaataccaaaactcctccaattggaggtaaaaatgcacatttagcaacggacgtaattccttctgctgattgggatttgtgtgaaatttggtatgctacctctaaagatggatttacatgggaagaacaaggtgtagctataaagagaccagcaaaaccacaagccggatggaggtctgtaactactacagatattttagaatggaagggtaaatattatttgtattatcaaggttttatggaagctagcgggaagcgtggagatgattgtccggtggcagtttcttatgcggattcacctgatggaccttggacgcatcataatcaagttgtaattcctaacggaaaaccaggagagtgggatcaatactctatacatgacccgtacccattggtgcatgatggaaaaatttatatttattataaatcagatgccaacggtcagcccaatttgataagaatgcaaggtttggcgatggcagataatcctttgggtccttttacaaaacatcctttaaatccagtaatgagttcgggtcatgaaactacaatgtttccttttaaagagggaatagcagctctagtaattagagatggaaacgagcataacaccattcaatacgcaaaagacggagtaaattttgaaatagcatctattacagagtttttaccagatgcagcagggccttttattccagatgcgtttacaaacacaaaagatggaagaggaattacttggggaatttcacattttatatcagtaacaggttggaaaaccaatcatgctgtattaactcgttttgattgtgacttaagtcaggatataaacgatccttggatgaaaaaaaaccacgtttatttaaaaccagcatttttttacaagcaagggttaaatggaaaacagaaagaaagaatagctaaagaaaataaaaaaataagagtttcagatttgtcaaaatctaaaaaatagagctacaactacttttaatcactaaaaaaattagtgaacctttaaaaagagattgaatattattcaatctctttttttatatatgtataaacatggtttgtaaaagactgtgtgtttttttaaaatggaactgattctaatttatttatgtttgccgaaccaaaacaacaaaatttatcaatcagtaatttttttgagggattgtttgaatacaaaatgtactaaaacattagttttttagtacttaaaattaaaatgcaacttttagtaaagagacaggtgcaatttaagcttacataaataaccaattttaaaaataataataaatagtatataagtaaattacccaatatttaattgggtaatttgtttttaagagtacttataactattaaccctaacactcctgcagtaaaggaaatagtaagatttaaaattaataatccatagtttatttgagaatgggtaataatgtgattgggggtaaaacccaaccgtccaaaacttttgatgacaaaaatgctagcaaaaactccgctaataacatttgaggtaatgcctagtgtgtatttaggttttagaaaacctaaaaaaatagctcctaaaattcctatcaaaatgcttactaaagaaagtaaagtgtgtgtcataactttttagtgtccgtattctctgtcatcaattttacctttgtttagttttttctgaattataaaataagctataattaaagctattccaattaccatccatggaatagctacagacattccgtattgactagttgctgtattgtatatggttaaagaaggatttattttgtttgtagaaggtagtaaaaccggaaacatagtagctagggtagaggtaacacctcctgtaataattaagctagaaaaaataaatccatgtatttctttttttaactttttaataaagaacattcctgttaatcctacaaaataaatgagaggaaaaattaaaaaaagcggatattttaaataattttctagtggatgaggttctactaaatgccaaatacttatagaaaaaacagttagaatagctaaagttacgtttaatttaaaaattacattttttaactgcttgttaatgcttgcgtttgtttttaaaataatccaattggcaccatgaattgctaaagtaactacagcaataataccaataacaatggtaaaccaatcaataactccagggtgtgtagtagagggactaaaactactatcccacagcggtaaaaaaaagtagtgagcctcgtatgtagaaacaccgttttctaccccccctaaatttacccctctggcaacgtttcctaaagcaattccaaaaaacaaagccaatagcaagctagacacaccaaaagatttgtcccaaatggttttccatataggatgattgatttgccctcttaactctagtcctaaagctctaaaaataattaaccaaagtataataattaaaggcaaataaaaaccactaaaggcagatgcgtatagcgttggaaatgccataaaaattaaaccaccagcagccactaaccaaacttcattagaatcccaaaaaagtccagcagctttagagataacttctttatccttgtctgttttggcaaaaaataaatgaataattcctgttccaaaatcgtaaccatctaaaataaaaaagagggctaaaaagactgctataataacaaaccaaaagatttccatagtttaatgtttttgatgttgaggtccgtggtaaatggtttttcctaccaagactaaaaataagattcctaaaagcatgtataaggctacaaaacctaataaggtaaataaagtatttcctgaggatacggtaggagatattccttggctagttcttagtaaaccatacaccaagtaaggctgtctacccaattctgctacataccaacctgtaatattggcaataaacggaaaaggaactaaaaagaacaaggtccataacaaaggtttaaaactatatagtttttttagatacaagaaaagtgctgacagaaacataattccaataaaaatggttcccaatcctaccataatatgataagagtaatacaaagcaggaatgttgtctggtaattcttcttttttaaactggtccattccaggaatttgtttatcccattcttggtaagttaaaaaacttaaaatgttaggaaccgctattttgttgtctagctttttctctaccatgtttggctgtccaatcaatacaatttctgcacctgcatgttcggtttcaaaaataccttccatagcagcaaaagccgcgggttgatatttggctacattttttgcgtttaaatcgcctgtaggaaaagctactaaaagactagaaattaagccaacaataactccagtttttacaaataattttccgtattcttcatgttttttaattaacaaataaaaagctccaatactagctactacaaaagctgaagtaaccaaagatgccatttgattgtgtaaaaaagcgggtaataaccaaggattgctaaataattgagaaaaatgagttaatacaaattttccgttttctagaacttcatatccaacagggtgttgcatccaagcattggttgctaaaattaaataaccacttgcccaagatcctaagaaaacaaaaaagcccgttaaaaaatgtagtttttgacccataattttttcaccaaaaataaataaggctaaaaaagaggattctaaaaagaaagaaaaagttccttccatggctaaggtctgaccgatgatacctcctgttaattcagaaaacttagcccagttggtaccaaactgaaactccataggtattccggtaactactcccattgtaaaattgatggcaaaaattttcataaaaaattttgcggcatcgttgtaaatttctttgttcgcttttaaataatatcctttaaataaaataataattaaagaaagtcccatggtaagttgcgggaaaatgtagtggaatgtaatcgtaaatgcaaactgcaatcgatcgtagaaaatcatgtcttccatgtggaaatagatttagactttatagttaaataattaagtgctataattttagatacatcctagtaaaacaagggtgtattttaaaaaataggatgctataaatttacgagaattgatttgtttataagtaacttttgatacataaaattactctttttaatcagttaaaatagcgagtaattttaatcttaaagtttggttttgcaacaattaatcagttattaacaaggtgtaaaaaaaaattagggggtagtagctatttaaaaaagtatggatttgatacaaataagaaaacgacaacctaagttgccgtttttaatgttttcacaacggaataatccttattgtgaattgatttcaaattgtagtgtaaatatataaaaaattagcaaattttttaaaaaaaacattatttttaatttagtcttttaaaattgttgtaaaggcttcttaaactttttaaaaacagacttttaacttataaccaaagttaggggtattattagaatatgctatgaaaaaaatactaggattagatttaggaaccaactccattggttgggctttggtacatgaggctgaaaatgtaaaagaaagctctgaaattataaaattaggtgttagaataaatcctttaagtagtgatgaagttatagattttgaaagaggaagacctttgtctgtaaacaaagatagaaccttaaaaagaggtgctagaagaaatttacagcgttttaaattaagaagaaaaaatttaattgatattttaatcaaagctaaaattcttaggtctgatagtgttttaactgaaataggaaaaaactctacttatgagactttacagttgagaagtaagagtgttaagcaacaagttaaaaaagaagaatttgctagagttttattagctataaataaaaaaagagggtataaaagtagtagaaaatcaaataataaagaagaagaaggaaatttgatagacggaatgtttatagcaaaagaattgtataataacaatttaactccaggtaaatacgtatatcaattattatcagaaaacaaaaactacatccctgatttttatcaatcggatttaaaaaatgaatttttagccgtttggacttttcaaaaacaattttatcctgatattttaacagaacaactttttattaatttacagcaaaaaaataaaaaccaaacatgggctatttgcaaagaaccctttgatataaaaggaattgtttataaaggaacagctaagcaaaaaagattagaaaagtacaaatggaggtctaaatctctaactagtaaaatagatttagaaacacttgccattgttttacaagaaataaacaatgatttaaacaaatctagtggataccttggggctattggagatagaagtaaagagttgtattttaacaatataacagtaggtcagtatttgtatcaacaaattaaaaagaataatcacactagtttaaaaaatcaagtgttttacagacaagattatttggatgaatttgaacgaatttgggaaaaacaatctaaattttatccagaattaactaataaattaaaagaggagataagagatgttgttattttctatcaaagaaaactaaaatctcaaaaaggactaattagtatttgtgaattggaacaaaaaacaatagaaattgaagtaaaaaacaaaactaaaaagaaaattataggtccaagggtagttccaaaatcatctcctatatttcaagaatttaaaatttggcaaatattaaacaatcttacttttactcgtaaaaatgaaacaaatctttttgaaaagcaaaattataaagtaacccttgagaacaaaaaaaatatatttaatgagttaaatataaaaggaacactaaaaattagtgatgtatttaaactcttaaaattaaacacaaaagattggaagtgtaattttgacacgcttgaaggaaacgttacccaacaagcaatttacaatgttttacaaaaaatttctgaagatcaagattctagttttgattggagcaaaaaaaatgcttttgaagtaaaagaagaattacgtgcaacgctcccaacaattggaatacatcctaatattttagattttgatgttaatgatgataactttgagcaacaacctagctatcaattttggcatttgttatactctgcagaggatgatactaaaataaccgaagaggatgaaaaaaattacggcaaaaactacgtaaacttaaaaaagaaattacacttaaagtttggtattcctataaaatacacttcactttttaccaatatagtattagagcctaactatggtaatttaagcgcaaaggctatccgtaaaattattccacacttacaagaggggtatgactattatgatgcatctagattggcaggatacaatcactctaatagtattacaagagatgaaaatttaaagagagagcttaaagataaattagaactgcttcctaaaaatagtttaaggaaccctgttgtagaaaagatattaaatcagttggtaaatgttgttaatcagattattgaaacttacggaaaaccagatgaaataagaattgagcttgctagagaattaaaaaaatctagaaaacaaagagaagaaatttataaaaatatttcaatagccaccaaaagaaatgaagaaataaaaaaaactctacaaacacctcctttcaatcttaaaagcccaactaaaaacgatgtggtaaaataccgtttgtatcaagaattaaaacctcttggatatcgtactctttatacagataaatatatttctcctcaactattattttctaaagaaattgaagttgagcatattattccaaaagctgttctttatgatgactctttctctaacaaaacacttgcttttagacaagttaatttaaaaaaatctaaaatgacatcctatgattatattgataaaatagagcataaaaatttagaaaaatacatccaaagagtttctgatttttacaatggtggtaaaaacaaaattagtaaaagtaaatatttaaacttgcttacacctttagatgagttaagtgatgattttatacaaagagatttaaaaaacacacaatacattgctaaaaaagcaaaaaacatacttttagaaatttgtagagaagtacacccaacaaatggtaaaattacagacaaactaagaagagattgggatttattaaacataatgaaagagttaaacttatctaaatatagagcgttgggtttgactgtttttgaagaacgaaaacatggaaataatgttgaaaaaataattgattggacaaaacgtaacgatcatagacatcatgcaatggatgcgcttgtggttgcatttacttcaaaatcacatattcaacatataaatactttaaatgcagaaagtgcacaaaacagtatacaatcggtaataataagtcaaaatcaaaaaactaaactaaaaaacaaaggtttgtatgtgttaccaatgtctaactttagaactgaagcaaaaaagcatatagaaagtattttaatttcctttaaaactaaaaataaagtagttactaaaaacatgaattttgagcaaaaaactttaactcctagagggcaattacatgaagctactatatatggtaaaattaaaagtgaaattctcaaagatgaaactattggaggaacatttataattgaaaaaattaatacgataacaaaaccagaataccgaaatttattattgaaacgtttagaagaaaaccacaataatcctaaaaaggcctttgcaggtaaaaatagtttgattaaaaagcctattacccttagcaacggtaaagaaatgcctttaaaaataaagacaaaaaaatatgaaacaatatacacaattagaaaaaatattaatccagataattttaagaatataaaagcaattgaaaaagtaatagatgaaaaacataaaaatattttaaaagaacggttaactaaatttaacggtaacggaaaagaagctttttcaaatttggaagaaaaccctatttggactaacaaagaaaaaagaattgccttaaaaagagtaactattaaaggagttagtagtgttgtatctttacacgataaaaaagaccatttaggaaacgttattttagatagtaatggtaaaacacaatcagttgattttgtaaatacaggaaataatcatcatatagctatttataaagatgaaaatgggaaattatatgataaagtagtgtcactatttgatgcagttactagctgcaatttaaatcaaccagtaatacagaaaaattataacaaagatttaggttgggaatttttatttagtttaaaacaaaatgaaatgtttttaattccaacaaatgagttcaacccaaaagattacgatctaaaaaacactaaactatatagtctattatcgaaacatttattttacattcaatccatctctttgaacaaatatggaaacaatattattagagattttgtttttagacatcatttagactctttaaaaactaaaacaaacgcactcaaaaattacacttattttcatgttaaatcattggatgacattcgtctaattggagcagtaaaagtgaggattaaccacattggacaaatagttcaggtaggtgaatattaaaatagtatctattatgataaaacgtaccatttacataggcaatccagctcatttaaaactaaaaaatcaacaattactggtgcaagaacctttaggaaatacaaaaggttctgtacctatagaagacatggctttgttaatgctagatcattaccaaataaccctaagtactcaggttattaacagtttgcaagcaaatggggtgtgtattgtaacttgcgatgcgcatcaccttccgtttggaataatgctacctatttatggacacagcgaacattctgagagagtaaaacaccagttagctgttagcgaacctttaaaaaaacaattgtggaaacaaaccattgtacaaaaaattaaaaatcaagaggctttgttaaaacttaacaatagggtgtatgagcctatggaaacctatagaaccgccaccaagagtggagacacaagcaataccgaaggaaaagcagcacagcattattggagacatttatttccagaatttcagcgtaaccgttttggagacgctcccaacgcgttgttaaattttggttatgccgttttgcgtagtattgttgcaagagcgatagtaagctcgggaatgttacctgtactaggtctttttcataaaaacaaatacaacccgtattgtttggcagacgatattatggaaccctacaggccttttgtagataaaatggttgtaaaccatgtaaataattttaaaaaaacagatgagttaaccaaagaaactaaggcttatttgctaggaattgctacgcaagatgtttggatagatggacaacaacgtcctttaatggtggcagttactactaccacagcctctttgtacaaatgttatacaggagaactaagggctattaaatatcctgaattagactaaccatgtcacaaaacagatttaatgcttatagaattatgtgggtactggtgttttttgatttgcctaccgaaacaaaagtagaacgcaaggctgcaaatttatttagaaaaaatttaattaaagatggttttgatatgtttcagttttctatttatttacgtaattgccctagtagagaaaatgccaatgtacacattaaacgtgttaaaaatgctttgccaaaatacggtaaaataggggtgctatgcataacagacaaacaatttggaggtatggagttgttccatggaaaaaaacaaaccgatttgccgagttcaacacagcaattggaacttttttagttttttgaatttaaaaaacagcttgtaccaatttaaatcgctaaaaaacacagtctttttgtttttctaaaaaacaatccccaaacctttagtttcctaatgttttggggattgaccttgtgattgctcacgtaaaaatacaatttgaaatcaattcacaaccagcatagtatggcagaatcagatgtaaaacttgtgattgctcacgtaaaaatacaatttgaaatcaattcacaacagccaagacgaatacaacgcacgtttgcagcttgtgattgctcacgtaaaaatacaatttgaaatcaattcacaactaatgtaatgattttcagaacgaaacgttacttgtgattgctcacgtaaaaatacaatttgaaatcaattcacaacccgtatcatcatccagtcttgaattaagtccttgtgattgctcacgtaaaaatacaatttgaaatcaattcacaacggtttgtgattagagaaataaacggaatacttgtgattgctcacgtaaaaatacaatttgaaatcaattcacaacacatagctaatgatggtgttctttctccagcttgtgattgctcacgtaaaaatacaatttgaaatcaattcacaacacagacagaggacaaacgacccacctagaccttgtgattgctcacgtaaaaatacaatttgaaatcaattcacaacggtgtttcttttttaacctcatttttacaacttgtgattactcacgtaaaaatacaatttgaaatcaattcacaacctatagatagatgttattttaaaagagaattgtttgtaagttaaagcagcaaccataaaaagaggggtgttttatactaatttttatagtttagattaaaaaggatgtacaaactaaacaaacaatttagtaaaatttaatataaaaatgttagaaaaaataccagcagattgtatagcaattggctaaaaagtatattaaaaaccctagagtatattcttgtatatcaagaaaaaacttgtatatttgcttaggaaatatttgaaggagataagtggggctttaaagccccactttttatacgtatatatggataaaaataaggttgaaatattaataaatagtgcattagaagaagattcttctttgtttttagttgatttgactattgaagcggataataagataatagttacaatagatggagataacggcgttcctttaaaagaatgtattagagtaagtcgttttgtagaggccgatttagatcgtgaagaagaagattacagtatagaagttgctacacctgatattgctaagcctattgtaatgaaaaggcaatatgtaaaaaatataggtagagttttaaatgtaactacagcagaagaaaaatacgagggtgtgttggctgaggttcatgaagataatatagaattgtcttgggaagcaagagagccaaagcctattgggaaagggaaaataacggttcagaaaaaagctgttattgcctatgaagaaataaaagaaacaaaagttaaaatattatttagttaaaatatttaaatggagaatatagatttaatcaattcattttcagaatttaaagacgataaaaatattgatcgtgtaatgctaatgtctatcttagaagaagtttttagagctgctttaaagagaaaatatggttctgatgataattttgatattattgtaaatcctgataaaggagatttagaaatatggcgtaatcgtgttgttgtagaggatggtttctcagaagatgataacgaagaaattgagttggcagaggctatattgattgaaccagattttgaagttggtgaagaagtatcagaagaaattaaattgcatcaattaggacgtagagccattttggcattacgccaaaatctaatctctaaaatttatgaacatgacagtaccaacttgtacaaaaagtttaaagaattagaaggagatttgtacacggcagaagtacaccatataaagcacaatgctgtaattttattagatgatgaaggaaatgaaattgttttacctaaaagtgaacaaattcgttctgacttttttagaaaaggagattctataagaggaattattaaaacggtagagttaagagggaataagcccgcaattattttatctagaacatctccagagtttttaagaaagttatttgaacaagaaattcccgaaatttttgatggtttaattaccattgagggtgttgctcgtattccaggagaaaaagcaaaaatagctgtagattcttatgacgatagaatagaccctgttggagcttgtgtaggtgttaagggatcaagaattcatggtattgttcgtgaattaggaaacgagaatatagacgttgtaaattacacaaaaaacacacaattatacatttctagagctttaagccctgctaaagtcgtaaaaatgaatatctttgaagccgaaggagaaaacaaacctaaagccgaagtttatttacgaccagaagaagtatcaaaagcaattggtagaaatggtgtaaatattagattggcaactcaattaacaggttacgaaattgacgtgttaagagaagggacagaagacgatgaagatgtagaattgacagagttttctgatgaaatagaagcatggattattgacgaattcaaaaccattggtttagacactgcaagaagtgttatagacaaagatgtggctgaattagtgagcagaaccgatttggaagaagaaacaatcatagaggttcaacgtatattaaaagcagaatttgatagataaataggtagtcagtagcctattaatttcaaaacatcttcttaaacataaaatagtaaaaagtatatatgtctgtaagcaaaacattaaggcttaacaaagttttacgagagttaaacatatcgttagatagagcggtagagcatctttcaaccaaagggattgaaatagaggctagacccacaacaaaaatctctgatcaagaatatcaaatcttgttagacggttttcaaaccgatgcccaaaagaaagcagtttctaaagaggttggtgcggaaaaaagaaaagagaaagaagaattgcgtttggaacaagaagacaagaaacgcaaagaagaggaagagagaactagagtcttaaaagctaaagctgataaactagaattgaaaactgtaggtagaataaatttgaataaaaaacctaaagtagaacctaaagtagaaaaaacagcacctgttaaagaaaaagttgaagaagtaaaagtgcctgaagttaaaaaggtaaaagaaccccaaattattaaagcaagtgctcctaaactgggtggtttaaaaatagtgaaatctgctcctgttaaagaggagaaaaaagcggttgtagagaaaaaagagaaaactcctgttaaagaaattagaaaaaataacacagataaaaaagaggtaactccaaaagcagcaactccaaaagtagtagctaaagaagctccaaaggccgaagtaaaaactacaacagtaggtaaatctcctgaagaaggaggagagccagaagctttaaaaactcaatatcaaaaattatcagggcctaaacttacaggtacaaaaattgatttaaaacaatttgaacgacctaagaaaaagaagccagatccaaaagcaaatgctaacgatccaaagaaaaagcgtaagagaattgtaaaacctgctaataatagtgctaacagagcagcagcaaacagagctggaggaggtccaaacagaagaggtccagcaaatagaggtggaggtagatttaattctgcaccagttactaaagaagagcctacagacgaagaagtacaaaaacaagtaagagaaactcttgaaagacttcaagggaaatctaaaaagaataaaggagccaaacaccgtagagataagcgagacttacaccgtaagcaagctgataatgtacaggcgcaagaggagttagaaagcaaaatactaaaagtaacagaatttgttactgttagtgaagtagctacaatgatggatgtttctgtaacagaaattatatcggcatgtatgatgttaggtatgatggttacaatgaaccaacgtttagatgctgaaacaattaaaattgtagcagaagagtttaactatgaagttgaatttgttggggcagaagtagaggaatctgttgtagagattaaggattctgaagaagatttagaagaaagagctcctattgtaacaataatgggacacgtagatcatggtaaaacctctttattagattatatccgtaaagcaaatgtaattgcaggagaatcaggagggattacacaacatattggtgcttattctgttaaaattggaacaggtcaaaaaattgcgtttttagatacaccaggtcacgaggcctttacagcaatgcgtgcacgtggtgctcaggtaacagatattgtaatagtagtgattgcagcagatgatgatgtaatgccacaaacaaaagaagcaatcagccatgcacaagctgcaggagtacctatagtttttgcattgaacaaaattgataagcaaacagcaaatccagataatgtaaaacaacaattagctagcatggatatgttggttgaagattggggaggtaaatatcaatgtcaagaaatttctgcaaaatcaggattaggtgttgatgaattgttagagaaagttgttctagaatctgaaattttagaattaaaagcaaacccaaacaaaccagcattaggaactgttgtagaagctcaattagataaaggacgtgggtatgtatctacaattatggtacaagctggttctttaaaaataggagattatatattagctgggaaacattctggtaaagtgagagcaatgtttgatgagcgtggtaaaaatgtaaaagtagctgccccatcaactccagtgtctattttaggattagacggagctccacaagctggagacaagtttaatgtatttgaagatgaaagagaggcaaaacaaattgcatctaaacgttctcaattacaacgagaacaatctgtaagaacacagaaaacattaacattagacgaaataggtagacgtattgctttaggagactttaaagagttaaatatcatcttaaaaggagatgttgatggatcagttgaagcattaacagattcattccaaaaattatctacagaagaaattcaagtaaatatattacacaaaggtgttggagcaattacagaatctgatgtgttattagcttctgcttcagatgcgattattgtaggatttaatgtaagaccagctggaaatgctagacaattagcagatacagaagaagttgatattagaacttattctattatttacgatgctattaacgacttaaaagatgcgatggagggaatgttatctccggacaccaaagaggaagttttaggtaacgtagaaattagagaagtatataaaatatctaagattggtaacattgcaggatgtatggtagttcaaggtaaaattacaagaaactctaaaatacgtattattagagatagtattgtaattcatgatggagaattaacagcattaaaacgatttaaagatgatgttaaagaagttaccaaaggttatgattgtggtgttcaaattaagaactacaacgatattgcaattggtgatgtaatagaatcatatcatattgtagaagtaaaaaagaaactataagttttaacttagcttttaaataaaaaaactcatctaatttttattagatgagtttttttatacctaaaaagtaaaataaaaaacaggttttaatttgggaattataaaataaatagtaatttagttcactaatatttattacataaacaaagtgaaaaaaggtacagtaaaattttttaatgaatctaaaggttttggatttattttagacaatgaaacacaacaagattatttcgtacacatttctggattgattgacgaaattattgaaggagacgaggtagagtttgatttacaagaaggaagaaagggattaaacgcagtagaagtaaaagttatataatatttttataaatctttttaaaaattgtaaaagcctctcattttaaattgagaggctttttatatgttacttattttacaaaaaataattttatgttataattaaagttattgttaatctgtaagttataaaaaatacactccgttagcaattttgatttttttgtattctagtatgtttaaacctttattggttttttataaaacaacatctactaaagctcccatttgattgcgtataaataatttgtatgtatccctttttttactatcacaagttatattgattacattttacaattgtgtcagaaatattaaatcttcagtacatgtaataaaagtttctgtattggatatactattatgaggaataaaactcttaaatagtttttagattgattaaggtttcgttttttttatttaaaaactggagttttggctaagtttaactcataatcaattttacctcgttggtaatttctagatgtaatttattgactcatagatcaatggaggttttctgtagatatgtagtttaaaaatatctttgtagtaaattaaatatttttaagtcataaatgtaagagagtagggtttagatcaataaattaactaaattcttctaaacaacttaagaagatctatctttttaaaacttataaggcggttcaacaaaaatgaatatcaaatttttactttatgttgaatataatcaatggatttaatatttataaattaggataataaagcaatagacatccctaatagaatagctataaatttaggaaaactaaacttgtggttttcagaactttcaaataaaataacggtagaaatatgtagaaatataccaataataattgcggttatataattttgataatgctgaaaaaagtgaatttttgaagctaacaaacttcctaatggactcattaaagcaaatgttagcataaaaaatacaatctttttaatattgtaattatgtttaaaaaagaaagaagttaatacaattcctacaggtattttatgaataacaatagcccataaaaaggactgattgtttttataacccaatggaattccttcggaaaatgcatgtatacataaactaacaaaaagcatccatggaaattcttttttatgattatgaatatgtacatggccatgttctgctcctttagaaaaggattctaaaactaactgtataataatccctaaaagaataaaagatccaatcaattttacgttgatagcttcagaattatggtggtgatgattttctatctctaagataccaaaagtttcaggtagtaaatggcttattgtcatagacaataaataggctccactaaaagatagtaaccattgagtaaactttttattaggtttgttaatacttacaaacagaacacttattaaaacagatattattaaataaatataggtcatttgcttaaaatcagaataagtctatcagaagtatctttattgaattctgataaattgtaatctccaaagatatggttaatttttaaatttgcttgtgcacaatagcttttgaatttgatgaaatcaattgcttttactctttcctgaaagttgtgttcttttccattatctataaggtgaatatctttggtaataaaaccatctgttagatgtcttttaatattaaattttaaatgatctctaactgtagtttcactttttactaagtttttaatcactttgtgcacattcatataatcaactacagcaacaccgttttgctcaatgcaattctctatattttttaatacttgaatatcgtcatggtcttggtcaaaataaccaaaactagtaaacatgttaaaaacagcatttgcttttaaacgaaaaggtttacgcatatcttgcaccacaaattgtaagttttcgttagaaaactgattggcatattcaatactatttttagataaatctgcacctattaccttgtaacctaatgagtttaaaaaaatagaatgtcttccttttccgcaagctaaatccaaaatagtagcatcttttggaagttttaaaaaagaaactaaattttgaataaaatttttagcttcatcattatttctgtttttatataaaatatgataataactagtgttaaaccactctccaaaccatgttttttctgttgccattgctctttttttgttggtatgtaaatttagttaatttattctttacaagttttattcaaaagacattacaaagaattacttttgttatctaattataggatgtttatgcgcgagaattttaaaatggtagcaacaactctacaaggtttagaagaggtgttaaccaatgaattaaaaatgttaggagctcaagaggtaaaatctggagtgagaatggttgagtttgtgggagatgaagggtttatgtacaaagccaatatgtatttaagaactgccatcagaattttaaaacccatcataaagtttaaagtaagagatgaacaagatttgtacaaaaacttgttaaaaattcgttgggaaaaatatgtagatgttacaggaacttttgcaactaagggaacgagtcaatttaaaggattgacagacaatactcattatttagccttaaaaacaaaagatgcaattgccgactattttatggctaaatacgagtctag

SEQ ID NO: 2225 - DNA, 24167 bp, synthetic construct
  source 1..24167: mol_type = other DNA
  misc_feature 1..24167: note = Synthetic
ggctccacccttactttcattttctttgtcagcatgagtatttcctttggtacgcaacagcccatgaattactccgtgctggtggattgtacgtccgccctgctgctggccgccatgccggcttaccgctggagtgtggatgaaaaactagctcaaaaaatatagtatatgcaggctaataaattatgggtagtactcgcctttgccacggtgtacctggtctggggctccacttatttcttcattcaaatgggtatacagggctttcctcccttactgctgggtgcattgcgcttcctggcagcgggatcgctcctgctgggatggtgcgccataaaaggagagcgcatctggcaatggcaacacgtgaagcacgccgcggtaagcggtagcctgatgttgtttgtggcactgggactggtcatgtgggcagaacaaagcctacccagtggcgtagtggccatcctggtctcttcctccccactctggtttgtactgctggatcgcgcaaagtggcaacaaaacctgcgcaacagggccaccatcctgggtttgctcaccggatttgccggcgtggccttactgtttggagagcagttgctccatgatgtaaagcaggtacaaatacttcccatgctcctgctcctggttagcacaattgcatggtctgccgggtcactgtattcaaaatataaacttaccggtggtgctgcaccggtgaatacggcctggcaaatgctggccgcggccgtgctctttgtaccttgtgcatggctgcacggcgacgtacaacaactgcactgggcgcaaatacccgtggccgcctggtctgccttgatctacctgatcgtgtttggatccatcgctgctttcagcgcttacgtttggctgctgcaggtaaggcctgccacgcaggtaagcacttacgcttatgtaaatcctgtgatcgcggtgctactggggcttttcttcgggcacgagcctatatccctgttacagatgggcgggctgctggtcatcctcaccagtgtattgctgctcaacctgcaaaaataccgcgcgctgaaacctgcgcccaaattgggtttcatctgaacatataaaccagggaaagatccactacaggtgaccggtaagaacaggtactttagtaacagcaattgatggctgccagggaaagatccactacaggtgaccggtaagaacaggggcccgataaggtccgcagcatccttcctcctgcatattccgtaaggactggaacgtccgccgcatactgttgcaaatatgctaacggaaggaataataaatggaaatattgccatactcgtggctatagccatgcttcagtaacgccgtggaagtattctgcatgtaagacaaaccgaaggcacccaggctgatcacgccgccataattaagcccatacaccagcttttgaatgccggcccggggccggttcacggttaaggtcttgtattcatcttcaggatcctgcgctttcagttgcccgtccagcaggctattgttgatcacccactgcacttccggccggaaaacaatgtaggcctgtaacacccgcgggcggcggcttttagctggccgtacatcactgaactgctgaatgtatcccttgtaataattatgcattttgccaatccttagtaatgggtataaagacaggccactgaacatggtacctgcactggcctgcgtgccaccgctcagctccacgtgcgggccccattgcgccagctgtttttcaaaccgcatattcaggtttaccaggaatttgttttccagctggtgcgaccatccgtgcgggcgctcaaaacggaacaggcgatggatgaaccgctgggaagcctctcccccggctgcggggccgcgcacaccgaggatcagctctgagaaaatagcgtaatgttttacaggattgaatgcatacacggagtgggtggcatacagggcggcggaatacgcgtagtcatcggggcggtaatcgtaatcggtaagactgtccggggtaaacatcaattgcgtggcagaccagccgtaggtttgcacgctttctttgcctgccttgggcgcccaccggtccaggaaaaagtgatcgggatggtctttcgtgtagaacaggtccaggcggaaaccgttggtataggcctggtctgtgggcaggaaacggatattgagcccatcgttgtcatcgtaaagccgcagcatcttgttcagatcctgcccctgcaaccggggcacggctgccaggaaatataagagcaaaaagaataatttttttttcacgtccggtctttttgagtcatttgccattcggtgcataagcccgcggaacacggggccctggaaagtgggccgtgaaaaaggagtgcttgctcatgcgacagtttatgctgtcaaaagtaatacaagtttccacgcagcccaagttaagaatgtaacccaggcgcgcccatggcggttcccaaagtgccgggcataaaaaagcgaatggccccgtggaccatccgcttacttttatgttgacctacttttgctggtcgtttatgcgttatcgggaacgaaacgcatggaaatggagttcacgcaatgacgggtattcttagcagtaaaccgctcaccggtgaacacgtggcccaggtgacctccacagttggcgcacacaatttctgtacggcggccgtctgcatccggcagtctttttacggcacccgggatctcgtcgtcgaaactgggccatccgcaatgggattcgaatttgtctttggaatgatagaggggtgcattgcactggcggcacacgtacgtaccgctggctttattgtcggtatactcgccggtaaaagcgcgttccgtgcctttgtgcaggatcaccctggcttcttcgttggtgagtttgttgtatgacatagtgagatttttccttccctgaatatacataaaaaccataccactaaaatgcccgccagaaggacagccacggcgcccggaaacacgttgttcccgtcagtaaaatacatgctccaccgccaggatgacacggcccgtaaatggccccaaccaccttctttatcgccgccattgccccctggtgcattccgcgaagtggcagatctttgaagcacagaattgaacagccactaattcccgccctcctccgctccggccatttcgttattttacgggatttcgtaattacctttggcgccttaattcagtaacacattgacagacagcccgtttcacacctggcactgttataggaaaggaaaggcacatgtctacaacacaccactacatcttacgctggggcagtgcattgctcctatgcctgagccttgtaacaggcagggcccaggagcggtacgacccggttgtactacagcaacaactggcacatggccaggcagacacgaaccgggccatgcagtacatccacctgggcgactattacctccgtaaaatgggggaattgccgcacgacctggacagcgcagccctgctgcagggccagggcctggcgctggcgcaatacctgcacttccctgaaggggtggcggaagccgtattcctccaggcgcgcatcctgcgggaacgtggccagaatgatgctgccgccgcgaaaatggatgacgcgctacgcctggcgcaacagggacatttccgcaagctggaaggatacatctacatggaccggggattctggtacggcaatgacggggagaactttgataaaaaactggcctgcatgcagaaggcggaggctattttccacgaaaccggcagcatcgccgatgaagcgggtatgctgaagaccatcgcagagatctaccagttcaaagcccgccacgataccgccgccatattgctggaccgcgcgcttaccctggcccgctccatccattccaaggatgtagcgggcatttatattttgatagaagaaaactaccgcgaagccggcgattatccgatggccctgcgttatgcacaactggccgtgaacagtgtggaagaccagcatgacgaaacccagcagctggtggaagtatacaaccgcatggccatcctgtacagtgccatgcgcgattttgaccagtctttggtgtacctgaaaaaagcagcgcagggagccatccggcaacaggataccgcttctgccgccatcctcaattgtaacattgccagcatctacaacacgctgggcaatactgccgcggcatccgccctgatgaaagccaccgtgcgggacctgatgccgaaaggcgtattcagcggcaaattgagcgtggccatgacctgtgtgaatgtatttgtcgctaaccgggaagtgaaagcagcccagccctattatgaaatgctggtaaagtactatcacgaagtagctacccaaaaagatgaacaggtaggcatactgctgcccatggtccggtacatgcaggccaccggccactacccggatacctatcgcatgctggatgagtacatcggctactacagcaaatttggcaacagcccgcaggtatcgctggcggaagagctctacttccgcgccgattctgctatgggccacctggccagcgccatcaggcattaccagcgctataaagcaggctatgatgcccgtaccaataccgcgcaaagccgcctgatagccaccatgcgcgcgcagtttgacctggagcggaaagacaaggacatacaattgctctctaaacagaaccagttgcaaaccacctcgctgcgccaggagcaggtgatccgaaacgtagtgctggcgggcatttgcatgttgctggccttactggcattgatctataaccgctaccgcaccaagcaacgcagtcacctgcaattgcagcaaaagcaaaatgagatcaatgcacagaacgagctgctgaaaaaactgctcacagataaagagtggctgctgcgcgagatccatcaccgtgtgaagaacaacctgcagatcgttatcagcctgctcaattcccaatctgcctatctcaataatgaagatgcactgagcgccatccgcaacagccagcaccgcatgtatgccatgtccctcatccaccagaagctgtaccagtcggacaacctggctagtatagacatgcaatggtacatctgcgagctggcagggtacatgcaggcatcgtttgataccggccagcagatccggtttgtcatagacactgcaccattgcaactggatgtagcgcaggccgtgcccctgggccttatcctgaatgaagccatcagcaacgcgatcaaatatgcattcccggacaaacgcaggggactgatcaacataagcctgcaacccttgcacgatgggcgtttccagctaagcattacagataatggagtaggcctgccggccaattttaatgtgtatgaaagccagtcactgggtatgtctctcatgcggggactggcagagcaggtggatggcgcccttaccatagtggccagggacgggctttccatccatatcacttttagcaaacgcgaagagatacaaacagttgaggatacacaaacacgcgcgtgacatgccagtaataccagaaaaaatactgattgtagaagatgaatttatcgtggctaatgacctgcgcattatcctgcaaaaagcgggttaccgggtgctgggcgtggcttcttccgtggcgcaggcccgcaccctgctggcactggaaagaccagactgggtgctgctggatattatcctcaaaggcccgctggccggcaccgtgctggcgcaggagctcaatgaagcaggcattccttttctttatatctctgccaacacagacgccgtaaccctggaagccgtgaagataaccaccccttacggcttcctgataaaaccattccgggagcgcgacctgctggtgatgctggacatagcccgttaccgcgtgaaagtggaagccagtaacctggctccggcagcaaccacgccggcacccgtggaagacatacgatccatgctgggccttattggtgaaagcccggcgctggccagggtaatggaaaaaatagcgctggtagcgcctacagcaacctccgtgctcattaccggcgaaagcggcaccggcaaagagaaagtggcgcaggccatccaccagttatccgcccaccatcaaaagcccatggttacggtgaattgcgccgcgttgcccgctgcgctgattgaaagtgagctgttcggctatgagaaaggcgcattcaccggcgcgcagcaacgccgtgtcggcaagtttgagcaggcggacaacggcactattttcctggacgagatcggcgaactttcattggaagcgcaagccaagatcctgcgggtgctccaggaaaaagaaattgaaaggctgggaagcgaatcgcccatacagatccaggtacgcattatagccgccactaaccgcgacctggagaaagaggtggccaatggcaaattcaggctggacctgtattaccgcctgaatgtatttcccctgccgctaccccctttgcgggaacgccgggaagacattgcagcactggctatgcatttcctgcgccggtacgcccaccaggcccgcaaaaaagtgaacaccattacggagccggtactacaacagctacggcaatacaactggcccggcaatgtgcgggaactggagcatgtaatagaaagacaagtactgatgacggaaggcactatgcttacgcaggtagaactgccggagctgcacactgccggcactcccgcggcaggccgcctgcaaacgctcgaagaagtagagcgccagcacatcctgcacgcactgaaaacctgccatggcaaagtgtttgggccgggcggcgccgcggaggcattgcacattccggccactacgctgtattcaaaaatgaagaaactgggtataaaacaaggctacgcctgatcaggcagtggttacaaaatgttctttacgaataccgagtttttgcatgcgggagatcaacgtagtagccggcaggcgcagtttcacggcggcgcctttggggccggatatacggccgttacactgcttcaccacttgcagaatgtattccttttccattacgtgcaggggctttaccaccagttcttctgtaaccaccaccgtacgctgtgggcccctgggcaggaacagctttttcaccgtatcgccggaagccagcagcacactgcgttctatggtatgttcgagctcccgcacattgccgggccagtgataggcctgcaactcctccatcgctttgggcgccatgtgcagaatgggcttgcctgcactgcgggccacgcgccgcacaaaatgcatggccaggtcggggatatcttcccgcctgtcgcgcaggggtggtaaggtgatggggaaaatattaaggcggtaatacaggtcgctgcggaaacgccctgcttctacttcgcgcagcagattacgattggtggcggcaatgatgcgcacattcactttcatggtgcctttaccgccaatgcgttcaatctccttctcctgcaatgcccgtagcagctttacttgcagctccagtggcagctccccgatctcatcgaggaataatgtgctgttattggccatctcaaacttgccaatgcgtttttccaacgcaccggtaaaggcgcccttttcatgaccaaacaattcactttctatcagcgccgcaggcagggcagcacagttcaccttgatcatgagccggtcgccccggggagatgcccggtggatagcacgtgcgatcaactctttgcccgtaccggtttcgcccaggagcagcacgcccgtatctgtaggccctacctgcgataccatgtggaacacgcgctgcatggccatgctgttgcctaccagctccgtgaactggtggcccaggttgcgttcctcctgcaggtacagcgtttcttccaggacctgttgtttataacgggcaatttccgcgatggccaggatgttggtcacggtgatgctaagctgcggcgcaatagcctgtaatagtcgctgctcgggcatttccaggggttgagcccctttgcgcagcaggaaaaaaatacccatacccggtaatggtaaagcggcaatattagggtaatgcaggaaagcagccggcaccggcatttccaatgaggacggtgtaacacgactgacagcagcttctttgtaaagctgtacataccagggagcagcggcaacagacatttcattctccagcaggttgtggtacgtaccagcggcttcgttgtaaacggtgagcaccatggcatcatgcgccggaagccgcttctgcaggacagttaccagctctttgcgatggcgcaccactgccagggccccgcaaaaggccagttgcagggactgctctttttccttttgttcccaatgcgcgcgcatgctgtcggtcgttgatagggtgtccttgtttttcatgccttacaaatttaggaggtgctgctggtatggacggaatgcgggcgcaagtttggtatagttttgacaaggcggcccaatccggcataaatttacggtatttcgtaagttttataaatgaaatattacgctggaaatatggttttcaattacttgttttaaatggcccactcggcaattcaccggccgccttaccacaaataaacgggtaaatacaagtgtgccccgtggcgggcacttacctttgtttttgaccaaacagctttctttacaatgacaacacaacctacttttgatacgatgtctgaagcagtggccggcctgcgccagctgggctatagttatgacctgaacctggaagacacttgcctccgttacgcggaggggcagctggtactttatccagcagacttccagatcgattatgtgttccggtttgaaggcgaaacagatcccggcgatgagaacgtagtgtatgccattgcgtcgcctctgtatgccataaagggtatactggtaagtgcctatggggtatatgcagatgccatgtgtgagcagatgctgcgaaaattacagtttcatcaataataccgtgctggcggccatgctggcacggtgttagcggcaccttgtagcaaaagcgttttcatatggaaatagttattcaatcattgggtttcaccgccagcgccgcgctggaagcgtttgtccgcgaaaaattacagaccctgaaaaatgaccgcgtgatcagtgcgacggtgaccctgtacaaagaagcggcagaaggtgaccctgcgtttaattattgcgagatcaaactggagatgccgggtaaggatccatttgtaaaaaaacacagcgcttattttgaaacgtcggtgagtgagtgtgtggacgtattgttttctgacctgcagaaactgaaggagaaaagtgtagaccggagaaagggcaaccgggatcagatccaggatgcgatcatacaggcggaggaggatgcggatggagatgtggagctggaagatgtggtgaagtaggaaagacttgtactttgtatattttttgagaagcctggctgcgggagcggccgggcttttgtatttggtggaatgggaagaattgtcttgatttgtaagactagatcgctgtggcgcacccctcctatgactgcaaccccaagatctatagtaatgattgtttgaaattgatccttgcaaatacgctatgagagaaactgtattagcacccgactttgcttttcaacttgaaagtttgaagcataaaaaagcccccgtcgaagtcgagggcaacttaatgttttcacaacggaataatccttattgtgatttgctttcaaggcaaatatagggttattatctaaaaaaaaaagaaatcatccaatggtgaatacagattttggaccgcttcaccggatcaccacccttatgctttcaaaatacgggaacccgtaacaatatcctaaaaagacttacgacatttccgattcatcaccctcaaacaattacaagttgaaaaaaattctcggtctggacgtcggcattacatcaataggctgggcctttgtcttagaaggtacgcctgatcaatcccgcattgtaagattaggtgtccgtgttaatccactaaccacggacgaagccgataattttgaaaaagggaagcccattacagaaaccgccggcagaaccttaaagcgtagcatgagaaggaatctgcaacgctataagcaacgcagggccaacctgatcagtatactaaagcaacatcacttcatcagtgcagatacaccactttgggaagagggaaaaggcactacacatagtacccatgcattacgtgccaaagccgcagaagctcccatttcattgcaggacctcgcgcgggtgttgttgatgctgaataagaaaagaggataccgcagcagcaggaaagtaaaatcgacagaagaagggcaagctattgacggtatggctattgccaggcaactctatgaacaaggcctgacacccgggcaacttgcctaccagctactccaaagtggcaagcgccatctccctgatttctaccggtctgatttacgaacggaatttgacaaggtttggaacttccaacggaccattcatcccgaaatcttaacgcccgattttaaaaaagcgattgacgggaaagggctgcgggcaaccaacgctattttctggacgcaatatggctttaataccgcggacgttaaaggcagtcgctcagagaaaaaaaataaaacgtacgcctggagagcggcggcgatcaatacgccattgagccgggaagaaatggcactggtcatcgcggagatcaatggtaatatcgccaactccagcggctacctgggagaaataagtgatcgcagcaaagccctcattttttcaaagcaaaccgttggccaataccaatacgcccaactacaacagcatccccataccagtcttgtgaaccaggtcttctaccgccaggactacatggatgagttcgaaaaaatatgggaaacccaggcgcaataccacaaagaacttacgccccaattgaagagagatatcagggacgttataatattttaccagcgtaagctacgctcacaaaaaggattaattagtgtctgccagtttgaaaaccggactattgagtcacccggcggccatgaaaaaaatgtaggctataaggtagccccccgctcctcccccctggttcaggaatttaagatctggcaaaatcttggccaccttgacatatgggacaaatctagcaagataaaggtagaattaaatgacgctgccagacagatgttatttgatgagttaaatataaaaggaaaactgcctaaagaaaaagtcctgaaactactgggactgccagcaaaaacctacgaggccaactttacaaatatagagggtaacaccactcaaaaagcactttataacgcttacctaaagatattggagcaggcaaggcatgagccttacaaactactagggctcgatcccgaaaaggacgagctctccgttgaagacgccaccacttcagtaacagttataaaaaaaggcattgccgaggcatttacttcccttgggattaacacagctatattggagtttaatgcagaattgccaggcaaagcatttgaacagcagttgtcataccaactctggcacctgctttattcctatgaatctgacaattccgcttccggcaacgacaccttacaggcgctgttgaaaaccaaattcggcttttcgccgtcacaggcgtccatactggcagatgttccgttgcttagtgactatgctaatttgagcgccaaggctatccggaaaatatttccatacattaaagtgttaaactacagcgaagcgtgtgcaaaagccgggtataatcattctgcgtccttaactaaagaggagaatgaacaacgagcactgaaatcgcatttaaggtcattacctaaaaatagccttcggaaccccgttgtcgaaaagatcctgaaccaactgatcaacgtggttaatgccattatagacaatcccgagctgggcaaacctgatgagatcaggatagaattggcacgggaactaaagaaaaatgcagcggaacgccagttgatgacagcagatatggctgccgccaccaatgaaaatgcaaggatatccaggctgattacagaaaagttcggatttccaaatccaacacgcagtgatgtaataaaatataagctgtacgaggagttaaaaatgaatggatacaaaacactctattcaaatacttttatacctgaacatgagcttttcagtaataaatttgacattgaacatatcgtccccaaagcattgctttttgatgacagcttctccaataaaaccatctgcctgcggaaggaaaatattgataaagccaacaggtgcgccattgactacatacaggaagcctttggcacggaagaagtggatgcatataaacagcgcgtggaaatgttgtatcaatgccaccagaaaaacaaaacagaaggaatcagcagaagtaaatacaaaaaactgctccaactgcctgatgatttggggaaaggatttattgaccgtgatcttcgcgacagtcaatacatcgccaggcaggcaaagcaaatgttggagaaaatatgcagaacagttaccgccaccacggggagcattacaaagcagctgagggaggactgggggctggtaaatattatgcaggaaatcaatatagataaataccgcgccctgggccttactgaattaattgaaaagaaggatggcagtacaaaagaacgcatcaccgagtggagtaaacgaaatgaccaccgtcaccacgccatggacgcccttactgttgcatttacgaaacccaagcacatcaaattttttaacacagtaaatgcgcgaaattcaaatgatgggaaagaggtctacagcagccaaacccagaaattcattgtacccatgatcaatttccggcaggaggctacctatcatcttgagcacctgctgatctcccacaaagccaaaaataaggtcgtcacaaaaaataagaacaggtttaaaacggcagccggcgctatggaaaagattgaattgacaccgaggggccaattgcacaaagaaactatatacgggcaaataaaggtacccgtatcccgtgaggaaaaggtaggcggcaaattcactgctgattatattaccagggtggcaagcaaaccttaccgggatgcattgctacagcggctatcagaaaatgggaatgacagtaaaaaagccttcaccgggaagaacagccttgaaaaaaatccgctttttgctgcggatggaacgccggttccgctatctgtaaaaatagttgaatgggaaacagattataccatcagaaaagatgtaacgcctgagaatttaaaagatgagaaagtcattgccaaaataatagacccggtggccaggaaggtattgatggaaaggtttgaggcctataacagaaatccaaaggaagcgttttccaacctggaaaaaaatccgatctggcttaaccaacaaaaagggatctgtattaaacgggtcacgatcagcggcattacaaatgccgaagccctacactttaaaagggaccacagagggaagtttatcttgaatgcgcaaggcaatcctattccggtagactttatcagcaccggcaataatcatcaccttgccgtgtaccgcgacaaagatggcaatctgcaggacaatgttgtgtctttctatgaggtggtagcacgcgcgcaccagggattaccggccattgacaaaactttcaacagggaagagggatgggaatttctgttttccatgaagcagaacgaatgttttgtttttcctggcgacggatttgacccaagggaaattgatttattaaatccagcgaacaataaaataattgcgcctaacctttaccgggtgcagaagttgtctaaaactcaaaaggggaatagctttgccagggactacacttttcggcatatctacgaaacagaagtcaaagaccggcctgagttgaaaaacattgcatataaacggattcttagcctatctgctttggaggccattgtgaaagtgcgcattaaccatatcgggcagattattaatataggaaaaatttaatatatgataaagcgaacactctattttggaagcccggcttatctgaaaacaaccaatgaacaaatggttatagaaataaaaggcgaagatctgaaatcagcgcccattgaagaccttggccttttaattcttgacaatgcgcaaataaccatcactcaggcgttgatgtcaaagttgttagcaaacaatgtggcgttgattacctgcaatgagacgcatcacccggttggactttttcttaacctggacggccatacattgcaaagccaaaaatttcaggcgcaggtggaagcctctattccattaaaaaagcagctttggcaacaaacagttatttcgaagatcagcaaccaagccgcactgctggcaaaagagcgttctgacaacaagttgctgttgcgccttgccagggaagtaaaaagcggagacagtgaaaatcatgagggccaggcggcggtctattactggaaacacttattcccggatttcctggaatttacgcgggaccgggacggcgtaccaccaaacaacctcctgaactatggctatgccgtattgcgggcggttgttgcccgcagtattgtaggttcgggactgcttccaacactgggcattttccatcgcaatcaatataacgcctactgcctggcagacgatattatggaaccgtaccggccatacgtggatatgatcgtttgttcgattgtaaccatgaacggccgttatcttgaaatgaccccagctatgaaaaaacaattattatccatccccgctatggatgttcttattgatgatcaaaaaagtcccttgatgaacgccgttcagcgaactaccgccagcttggctaaatgttttgaaggcaaagcacgcaagatcctatatccaacgctttgttaaaaattattcaacataatgcactcacgtttaaatgcttatcgtgttatgtgggtacttgttttctttgaccttcctactgacaccaaaggacaacggagagaatatggaaaattcaggaaaaagatcctatctgacgggtttgttatgtttcagttcagcatgtatatccgccattgcaacagcaaggaaaatgctgacgtgcatgtaaaacgggtaaagtcaatattaccagcggaagggcatattggcataatgtgcgtgacagacaagcaatttgggatgatggaaatattccaggggaagtttacggtaatgccaccaagtaccgtacaacaactggaattgttctgatagaaaaggaaaaatgggcttgcggcccatttttttgtttacaaaaacaacataacttgctaataaataattatttataacgattatgttgtctattagctaagctaaggaataaattgaaagcaaatcacaactgctctcgctcaatttgccggtggcaagtctgttgtctattagctaagctaaggaataaattgaaagcaaatcacaacttgagtgcgatcctggtaaacgcatctttggttgtctattagctaagctaaggaataaattgaaagcaaatcacaactgatactttttgtgaacagcaaaaatatcggttgtctattagctaagctaaggaataaattgaaagcaaatcacaacaattcaacgggtatattttcgtctacccaggttgtctattagctaagctaaggaataaattgaaagcaaatcacaacacctacaggcgctgacaccacgcctgtaaggttgtctattagctaagctaaggaataaattgaaagcaaatcacaaccgtgacagtgtaggctgttcaatatggaatgttgtctattagctaagctaaggaataaattgaaagcaaatcacaaccttcggtatcatacaaccaccaatactccagttgtctattagctaagctaaggaataaattgaaagcaaatcacaacgcagggaaatgtgggaaaagatcgccgcgagttgtctattagctaagctaaggaataaattgaaagcaaatcacaacagtgcctgttccatgtatgctttcatccatgttgtctattagctaagctaaggaataaattgaaagcaaatcacaacgccctgctgactacagccatggtcattacgttgtctattagctaagctaaggaataaattgaaagcaaatcacaacattcgtagcatgtgaaggtcaccagcttgcgttgtctattagctaagctaaggaataaattgaaagcaaatcacaacgctatctcccagcgtaatagtgtcgcccccgttgtctattagctaagctaaggaataaattgaaagcaaatcacaactggggacttgatgatgtcaaaccataatgcgttgtctattagctaagctaaggaataaattgaaagcaaatcacaacccggacttcggattgttcgcggctactaatgttgtctattagctaagctaaggaataaattgaaagcaaatcacaactactcttctatcactacaacaaaggtaccggttgtctattagctaagctaaggaataaattgaaagcaaatcacaacaccggtcatggaggtctcttgtggcaaaaggttgtctattagctaagctaaggaataaattgaaagcaaatcacaactcctgtaaaacacggctgcttctcattcccgttgtctattagctaagctaaggaataaattgaaagcaaatcacaacatcacctctaaaatataaaacatggaaacagttgtctattagctaagctaaggaataaattgaaagcaaatcacaacacgaagctcctgctgtccgcagtacggacggttgtctattagctaagccaaggaataaattgaaagcaaatcacaacaggatcgtgatgctaaggatgctcagattggttgtctattagctaagctaaggaataaattgaaagcaaatcacaaccccccatttctgcggccccaaaatgacaatgttgtctattagctaagctaaggaataaattgaaagcaaatcacaaccccagccgtgcgccaccatccaggcatttgttgtctattagctaagctaaggaataaattgaaagcaaatcacaactctatccgaatcgtccttttgcccgcctcaagttgtctattagctaagctaaggaataaattgaaagcaaatcacaacaatgctggacaactggcatataaaggctctgttgtctattagctaagctaaggaataaattgaaagcaaatcacaacatcaatgactattgtagcacctttcgctgtgttgtctattagctaagctaaggaataaattgaaagcaaatcacaacgcaggctttgatatggtgcggccgctggtgttgtctattagctaagctaaggaataaattgaaagcaaatcacaacccccttgcgttgtttgcttcgatgcgcacagttgtctattagctaagctaaggaataaattgaaagcaaatcacaacgccggaggaaacagagatcaccaactaccagttgtctattagctaagctaaggaataaattgaaagtaaatcacaacaccatcaagttcttgcagcaattaggggagttgtctattagctaagctaaggaataaattgaaagcaaatcacagccgtacaatgtgaggtaccgcgcgcaccgcatgttgtctattagctaagctaaggaataaattgaaagcaaatcacaacgtacttcgcaaattgaactttcttttacagttgtctattagctaagctaaggaataaattgaaagcaaatcacaactgcacaattgattgcgccaaatttggtaaagttgtctattagctaagctaaggaataaattgaaagcaaatcacaactcattaacaaccagtgctacgtcaaacgatgttgtctattagctaagctaaggaataaattgaaagcaaatcacaacagtcaacaggatgtgtattgttatcgaggggttgtctattagctaagctaaggaataaattgaaagcaaatcacaacttccgggtttcttccgccggaaactcctaaagttgtctattagcaataaattgaaagcaaatcacaacggtattcaccctgccactatactgatctcggttgtctattagctaagctaaggaataaattgaaagcaaatcacaacacctgcgtgcgtgtgggctttgttgtttgagttgtctattagctaagctaaggaataaattgaaagcaaatcacaacgaaagagccgcgcattcctatgcataaaaagttgtctattagctaagctaaggaataaattgaaagcaaatcacaacaaaataaggcagttaacaaaactgccgaatgttgtctattagctaagctaaggaataaattgaaagcaaatcacaactaggttgtgatacgttgttgcgctttgcggttgtctattagctaagctaaggaataaattgaaagcaaatcacaaccagaaagcattttcttgcttgggcaaagaagttgtctattagctaagctaaggaataaattgaaagcaaatcacaaccgagagggagctgttgaatgacgcagcaacgttgtctattagctaagctaaggaataaattgaaagcaaatcacaacacgtaggccatcacgagattgtagctacgggttgtctattagctaagctaaggaataaattgaaagcaaatcacaaccggtttgatggcgtggggccggattacatcgttgtctattagctaagctaaggaataaattgaaagcaaatcacaactaatctacacagatccctggtacggttcgtgttgtctattagctaagctaaggaataaattgaaagcaaatcacaactaaggattccagtgagcgcctggcaatcaagttgtctattagctaagctaaggaataaattgaaagcaaatcacaacctatggatttgagttcacccgtatcaacctgttgtctattagctaagctaaggaataaattgaaagcaaatcacaacaagattttgaatgtgaattctcggactttggttgtctattagctaagctaaggaataaattgaaagcaaatcacaacgcaggtgttcaacgagcgcacggacatggtgttgtctattagctaagctaaggaataaattgaaagcaaatcacaaccaagctgatggtatagttgtgagaaactttgttgtctattagctaagctaaggaataaattgaaagcaaatcacaactaattgacgttgtgtgacatgatttgaaaagttggccattagctaagctaaagaataaattgaaagcaaatcacaaccgcagatgtaacggcaatcatgttaagcatgctgtctattagctaagctaaggaataagcaaatcacaaacaaacccaaatcacaaacaaacccactcccccaccacattttttctccgtacctttccctcctcatgccgcccatccaccgcacccgcctggcccccacgcccagcggctatctccatatcggtaacgcgctctcctttgcgctcaccgccgcccttgcgcagcaacaccgcgcacaaaccctcctgcgcattgacgacatggaccgcgatcgcatacaacctgcctacatccaggacatcttcgacacgctctccttcctaaacatcccctggacagaaggccccaaaaacatcacccaatacgaacaacaatactcccagcaccatcgcttatccttatacgaaaacgcgctacagcaactggcccgtcagggcaaggtttacgcctgcacctgctcccgtgcacagatcctgcagcacaacgcggctggcatttaccccggcacctgccgccataaacaattgccgctggataccaaggacgccgcgtggcgcatcatcacagacgatacgcccctgcaggtaaacaccctggcacaaggcaccgtgcacgcacaactacctcccggcatgcaggacttcatcgtgcgcaaaaaagatggctatcccgcctaccaactctcctctgtagtagatgacgtacactttgccgtagacctcatcgtgcggggaaaggacctctgggacgccacactggcacagcatttcctggccatacaactgcaatacgccacctttacaaatgctgttttttatcaccacccattgctgatggaaaccacggaacaaaaactctccaaatccgccggcgctacatccattcactacctgcgcacgcacgggcacagtcccgcccaggtatatgcagacattgccgccgcgctgccattggacgggcatccctctacctggcaggaacttgcagccctggtacttcccaacaatttttatctttaggtcaaaaaaaatgcccgctaccagcgaagctttgttccagctcctgcaaatgctgaccggcctctcggaagccgatgcggcccccttttctgaaaccgccaatacgcgcctgctcaccgctggtgaattctacatccgggaaggtgataccgcccgcaaggtggcctatgtggaaaaaggcctggtgcgcggctaccatacccgcgaaaacggggaagaagcaactctcctcctccgctgggaaggccaatttgtggccgccctggataccattgtctaccatcggccctcccgcttccattaccgcgccctggaagacactaccctgctggaaattgattacgacaagctgggagccctcctgcgccagcaccagcagtttgagcccatgcgtaatttctttgtcatgaaaacgctggcagatgcaatggcgcgcgtggagtcttttgtgctcctttcgccggaagaacggtacctggccctggtgcgggacaagatcgatattgtgaaccgggtgcacgacaaacacctcgcctctttcctgggtatcacgccggtatcgctaagccgcatccggcagcgcatccgccagcgccggtaattatcctttgttaattttcgcccgcgggcccggttttaattttgacgtgtagttaaaatactcctccgtatgaaacaattcacggccaccctggcttacctcttcagcattaccaccttgcgatacctggtgctggccggtatccccttcctggcattttacattttcttcccgggcaagctggcccacctgaaaatccaggaacgggcagccgctaaaaaagactttctccgcgaaatatggcactccgtccaaaccacgctggtatttgccatcattgcctcgcttattttatatacccccttccgccagtacacccaggtctatactaacgtgaacgactacccggtgtggtacctttttgtaagctttggcctcagcatggtcatccacgatacttatttctactggatgcaccgcggcctgcatcatcccaaactgtttaagctcacccacctggtgcaccaccagtccgtaaatccatcgccctgggcttcttattctttccacatcctggaggccattgcggaagcgggcgtactgctcgtgatcgtcatgataatgcccatgcacgcgatcagcattgccatgtttaccgtgggtggatttattattaatgtgtatgggcacctggggtatgaaattgcgccgcgctggctgcggaacacctggatctttgaaatcaccaataccagtgtgcatcacaacctgcaccaccgtaagttcaggggcaattatggattgtatttccgggtatgggaccgcgtatgtggtacagagcacccggattatgttaaggaatacgaccgggtaatggcgcagcgcgacgcggctaacgcatttcccgcacgccctgcaaggcgtgcagccaggcagcctgttaacagtattgaataatgcacgctacagccggtcccggcgtatctcgtcttcttgccgctttatctccacggcatcttccgtggattcgtccggtggcattacttccctgcggtctttcttgttgcggaggatgaggaacaccagcaacgccagcaccagcacacctacaataattaccgggccaaggttcatggtttgcatacttttgagtttggatccatcttaatgcagcaattagcatacccggaactgttttctcacataatttttctgttaagcttgccggtgccaggagcgcagcattaaggcgctggtaaccaatccgtaggccgccgtgccccagtgaatacagaggtgttgcacgtccttaggcccgtttgccagccagatcgtaagtccgtctgtcatgggaatgaggcaggccaggctaaacaccaccagcgttacgcgcaggttgcgggtccatagcaaataagtgagcaccaggccactgaacaggtcgcggatgcctttgatgaggccatacagcagcggtgagcccgcgggcaggtcaatgccgaaagcgggtgcggctacctgtggcataaaaagaaaacggagaccaatgaacgaaatgcccaatgcgatgagtgcggccatccagaatgaagcggagcgtgggccccaggaatacgtgtgttgcatgatcttgtgtttttataccacgaagatcagccggcgcgcaggcaattccgttcacccaggttaattaccgttctgccatacgcttgcggatgcgcgacagggattgcggtttcacccctacataagatgcgatatggtattgtggcaggcgctgggccaggtctggataagtggagagaaagcccaggtaacgttgttccggcgtatccgtgtacatggagttcatttgttccattacccatacgaacactccttctatggccatgcggccaaaacgttctccttctttcaggtcgcggtaaagcaggtccatgttttcccggctggcagtgtacaggatggtgtcttccacggcctggatgttagtacgggcgggcgtttgcggaagatagctggggtagctgcaggcaaaatcattttcccttccgaagtgcaacacctgctcctccccgttcgtgatcatataataacgcagcaggcctttttcaataaaggccacatcgcggcacacattgccttcccgcaaaaaataatctcctgctttcaactgcctttgtacaaacaattcctgcacacgcagcacctcttccggtgagagttttataaagtggcggatggcctggatcaatgcttccatgcttctaaaataatcatttccttacaatgagaaaagggcgtctcagaagttctgagacgccctttacatgtacaaagcactatatatctttaataatacttcgccatgctggccgcttcaaacggcttcatctcatcatattttccatccctgaatttctgtacccagtgcggatcctggaggatggagcggcctacggccaccaggtcaaagtctccccgggcaaagcggcgctccagctcgtggaagtcggtggaagtgtccgctgtttccccgccaaagcttttcatcacgtcattggccaggccaatggaacccacggtgatggtaggatgaccactcactttcttcacccatccggcaaagttgagatcagacccttcaaactcgggctcccaaaagcggcgttgtgatgcatggaaaatatccacgccggcatctgccagcggcaggatccattcttccatttccgccggtgtcttggcaatcttcgcgttgtagtcggcagacttccattgcgagatgcggaggatcaaggtaaagtcttccccgacttcagctcttacggctttgatcacgtccactgcaaaacgattgcgttcgcggatggttttaccaccgtatgcatccgtgcggggattgctttggtcccacataaatgcatcgataagataaccgtgtgcaccatgcaactcggcggcatcaaaacccagttccttagcggattttgctgcttttgcaaaagcggcaatggtagcttcaatgtctgccactgacatgttgccgggatgttccctgggcgcgggcggcgtccagccagtcataccagcggcatcccccgtgtgccagatctgcggtgcaatgctgcctt

SEQ ID NO: 2226 - DNA, 24167 bp, synthetic construct
  misc_feature 1..24167: note = Synthetic
  source 1..24167: mol_type = other DNA
tagtcttcatgatttcataaccttcattaccacaatgctctcaccctcaatactgcaagtgggctttggtcacgaaataagacttgcattagcctactgcgcactgatgatgctggttgaatggcttacgcgtgaacgacggtttggacttgactttggcgactcgccaagtggcatactacgataccggtgggtgcgatggatgatttatgtcacgttgtatgcttacatagtcataatgtcggggttacactctaattttatctatttccagttctaagcaatgaagcgatttctcaagaaaatattgatttactctattatagtgatggctattttcattgcttatgaggtggcattgctctttgttccaaatgagtattcctacaagaaaaactatatagaggaccacaagcatgaactgaaggtgctagtgcttggaaactcgcatcttgccgactgcatcgaccccagcttgctgggcgatgacatttttaacgcagcgcaaccaggacgctcggtgtactacgacttgcaactgctcaaagaatacatagggcaaatgcctcaacttgagtgcgtcatccttccactaaacgtagattattactactggggacatcgatttgaaaaagtgcacgagccaaaattcaccacttatcgatgcatgtaccataaatacatgggttacacctacgaagacaaagagtggtggcactggtcagagattttgagctcgttctacaaccaccccgcacgcttagttgacgctctatataaaccgctcactgacctcaccatgtgcgactcgttgggagtagaaattgatgccagcatcgacactcgcaaagacgactggtacaaccagcaactgcccagcgacactccattgaacgattccaccaagctacatctctactacgtcaacaatctgcgcatctatagcgagatagtgatgcttgcacgggcgcacaagactcgtctcattttccttgctatgcccatctacaaaacggcacgacagcgcatcaacagctatcagcttcatgagctagacctgtttgttcagcgcatcaagcgttttaatcctaacattgagttctataactttattgacgcccctggctacaccgagcaagactactacaattccatccaccttaacaacacacatggtgcacgcaagtttgcacctgccttaaagcgaattctaaataaccggcagtgctcaaagcgttgacagcaggcgatagaaatcgcccgttgggatggctagaaactctggctcaatgcggtgtcccagctgcgaagactcgtggaaacggtcacccaaaagagctcgatacttgccacgcatgtcgccgagcaattcgtcatggtcgctaccaatgatgtgtgtcactggggtgatgaatggttcaatgccacgaaactcatctaggtcgctaggctggcaagtgaaagtttgcactccatcttcacgctgattataatactccactgtgtgccctatctcgggcatgtattgcatgctattttcagggttgagcgccggattgacagcaatcttgggaatttcgaccttcgcacataacgtgtaataaccacccagcgacgagcccgccaggatatctattccatgaagcgccacatagtcctcaattttcttaatcgactcaacgggatgatgtgtcacatcgaatgcatgaatttcatagtcattataaacctgcttaagggtaatgattgtgctactctgtgccgagctacggaaaccgtgaatgtataatagtttcttcttcatagtcatttccttaggaaaaaagatgtgggcagacaactttattacacccacccacatcacatttagtcatttaattttatctctatttcttagacgtcttcttggctgatgtttttttaccggtagctttcttggttgtagccttcttctcgggcttttcttctaccgtttcctcaacctttggaacaaagtcgcctgtggtatccttaacaatgttattgcgcatcatctccacctcgcgattgagttcttctatctccttctcctgattgcggatagtaaggagcaaggcgttaagctcctcgttttcgatctcctcagggaactgctcgcgcaccctaatcatgaagtcgctcagcacgttcatgtagttggtgaaagcggcgtagggtgaatcgtaggggctatagtgcgagtgtaccgagccgtcgctactgtgcttggtactcatgtagtagaagtggtcgctcgcttgcaaatagttccagtcctgacgtatgcgcttgtcctctatcaagcgtatgcgctcgctcaagcagtaaagcttgttaacggcctcatcctgcaagatatttcccatccatgcgctagtgtcgcgagcctcgtcggcccaggagatgggatgcataacgctgagttcacccactggtttgagcttgctcaccacctcgctaggagtcatgaaagtgatacctctttgctcggcaaatcgcggtaaagccttcataaactcaaatatcccactctcgcgtggctgcaactctccaaatgtttcatagttcatgaacaggttcaccagcatctcctcatcgggcaaagtagcaatccagtcgatatacttatcggcagtgagaggataagccgcccactcaggattactaaagcggaaagctatatcatcgctcagcttagagttttttaacaagagcttgagcttgggaacaggagccgccttatacaaatagttgggcgacttccagcccaatatgtgcttggcgccatcggttatcgcgcccttgaaacccattgaggcaaccatggcggcaatgtcatcgtcgtagataagctcggtgttgcggaacaccttgggtcgctggccaaagagctgataaatcttctcgtcgtgagcctttacttgagccataaactcctgggggtcgacgagcgacgagagcgagtgagcataggtctcgctaaggaactccacacaaccagtgtcggcaaggtctttcatcgagtcgataaactcaggaacatattgctctaactgctccagcgctgtaccacttatcgagaatgccaccttgaatttcttgccattctctttaatcatgtcgagcaacatctggttagcgggcatgtaagaacgctgtgctatgcgtgtgattatgtcatcgttggcaaagtcgtcatagtagtaatggtcgttaccaatgtcgaagaatcgataagtcttcaggcgaaacggctgatgtatctgaaaatagaaacagattgatttcatgttgatagtgtgtgttatagtagtggataattatctattaataagtcgcttgtaaatatcaataaccttggcgccagcgcggtcccatgttatcttattaacctcttcaagtccctgctcacgcaactgcttgtacatggccgggtacttgataatggaatagatagcatcggcaatggcattggtatcccagtagtcgaccttgataacattgttcaaaatctcggcacaaccactctgcttagaaattattgacggtactcccatctgcatcgcttccagaggcgagatgccaaatggctcactcaccgaaggcatgatatagacatcgctcgccttgagcatctcatacacttgcttgcctttcaagaagccagtgaaatggaaacgaccggcgatgtgacgacgtgcagccaggcgaatcatcttctccatcatgtcgccactaccagccattacaaactgcacgttatttaccttttgcagcacttgccatgcggcatccacaaagtattcgggtcccttctgcatggtaatgcgccccaggaaagtcaccactttctcatgcttgggtggcacttccaagttgagcagttcctggctcagtggttccacggcgttgtgcacggtagtcaccttgtcgggactgatgccatatttttctataaccgtcttgcgagtgaggttgctcacggtgataatgtggtcggcattattcatgccatctttctcaatgccgaacaccgtgggattcacctttccacgactgcgatcgaaatcggtggcatgaacatgaatcaccagtggcttgcctgtcacttgcttggcatgaatgccagcaggataagtgagccagtcgtgcgagtgaatcacgtcgcaatcgatggtgcgggctataacacctgccacgatggagtaattatttatttcctcgagcaggttgtcggggtagcgacccgagaattctatacaccccaggtcgttagtgttcatatagttaaaatcgctatagatgtggtcgcgcaagtcaaaataagtgcgtgggtccagcactttccctattcgcccttccacatagtcccagttcacatcgcgccatgccacgggagtggtgttggcaccaatgatgcgagcaaagtccttgggctcatcgccccagggcttgggaatgacaaaagtgatgtccatgtcgccacattgtgccatgcccttggtaagaccaaaacttgctgttccaagcccccccaggatgtgaggaggaaattcccagccaaacattaaagccttcataaattattatcttagtgttttaagagtttataaaaccaatattcttgaacaagcgcaacacacgcagcacgccgcccacattaggagcatagctcaccgcaccacggccaataaatggcgggttgccgtcatatagctccgacagagtgccaatgccgccctgcgacatttcgtcctcaaaacctatcatcatgcgctcgatgaacgacgcacgattgagaccaaacacctttatataagcatcggtatagaagcccatgagccatgggcgtgccgagccggcatagtaagctacccagcgttcctcgggattgcccaggtaccacggcttgtagccccagctcttggggctgagggtgcgaagtcccttgggggtaagcaactcacgagtcaccacatcgagcacactcttgcgctgacgacggtcgagcggtgagtagtcgagtccagcggctattaccatgttagggcgcacgctggggtcggcataggcgccgtctacatagtcgtagaggtagccatagtcgttaaggaacatgtcgacgaatgcaggcttggccttgtcgctgatttccttgagtgaggcaatatattctttttcttgctccacctcggcaaacatctcctgagcaaacatcagagcattgtaccacagcgcgttaaactcaacgagatagccagtgcgcggtatcattggggagccatcggcgtgggtgctatccatccacgacatgggcctcttggtgccgtcggtggttactaagccattgggctgcaagaataagttggggtgatacttgtcaataatctgtcgcaacaatgccttaacaagttcgccatagcgctctcgagcgacagccatgccagcatctttagcgtactcctgaagtgaccatattgcccacaacgggacatcggggaggtcgatacctttcaagtgcttgtcgagagagccatctttcacaaatctcatcagggcctcgctggcggtgtccattattttctcaaagtcgggacgatggtggttagagatagtgcaacccggcaaagcgatgaactcgtcgcgggcacgaatcttgaaccatgggtatcccgcaaggatgtagttaccgtcggcattggtgagatagaactgcttggcgctgttcttcaagcagttatagaagctagtgcgtggtgtacgggagtttacttcatcctcgtgcatgcggctcaggttgcgagtgttcacctcctgagtgccagccgagaacaccagtgtctcgcctttcttgatgtcgatctcaaaatagcctgggacatacaggtcctcgctataagggatgccacgctccatgtccttgatatattcaatgcctttgtaccagtgggggtcaaaaacaaaccgtggcttgtgattgaactgcatgtagagtgtgggataaccctcatacatgcaggtggcaataccattttgcacctcacgatattcctgactggcaaccgagttctcaacacacaggtcgttagcattgcggaatgccaagaatgggcggaactgcagcgtggtcttagagtgcgcctccactagggtgtagcggatgaggatgcggttttcgttagtaatgaagattttctcgcgcttcatgataacaccgcccacacggaaggtgtgagtgggaacgcgctcgcaatcatactcacgaatgtacttgtgaccattggggctataaacattgcccttgtagcggtgcaatcccaggttgaaggcggcgccatgctggattaccgtctcatcgagcgatgagagcaacacatggttgttgtcgtcaatctcgggaataggaatcaccagcaagccgtgctgcttgcgtgtgttacaccccacaatagtggtgcaatgataagcccccgactgattggtcctgagaatctccttagtgagagactgctcaagatttatcatcaggtttttatcaaattttaaatagctcattaagttttaaagtatctaatattgttaatattttccaggttattatggcattaaatcattccatacacattactcattgtaatcgtgacgaatttacaactttttactaacatggacaaactattttcaatctttttatcaacagatttataatttgtactatctttgcacttagttcaacaagtattcaacactttatatcatgacatcaagaagccacatcgctgctctcaaaaaacaaaccggcgagtgcaactgcgcacaagccgtgacctccacctatgccgacatcgccggcattgaccacgacacagccatgaatgcctgcaacgcctttgccgcaggcatgggcaacatggagggcacttgcggggcgctggtgggagcaggcattgtgctggggcttgtcaagcgcgacaagatgctgtcgatgaaactcatgcgtgagataatgacacgtttccaacttgaggctggagccactcagtgccgccagctcaagggcgtggacagcggcaagccactactcccctgcccccagtgtgtagccaccgcatgtaagctacttgaagagtacctataaacacttgtcaaaattactaaaacttaaatcatatttctatcaaaaatgaaacttcacaggtttttatctctctttgctctggctgtggtggcgatgaccgccatggctaagaagcaagctatctctatcaacgacatcaagcatgctcaaaccatcagcgtggaagccatcaatgacgacatcgtcaaggtgcaggtcacaccccaagcatggaacgggaaaccactgcagtcgctagtgagcgacaaggcgctcaaagaggcccaagccaccgtacagcttaacgataatggcagcgacatggcagtgatgaccacccaaagcggactgcgtgtggtgctcgacaagcagctgggcagcgtgcaagtgagctgtggcgacacattcttcactaccgacttgtgcgaccgcaagacccaaggggtggtgcgactgttgcacaccggcaaggagtcgttctacggagccggcgagcgaggttactcactcaaccttgctggcgacacgctcatcaactacaacaagcaaaactatggctacgtggcaggcgagaagcgcattagccaaatgggcatcaccatgccgtttgtgatatcgtcaaagggctacggtatcttctttgacgacttctgccgctcgtcgctatacctgggagaagatgggattgagtataaatcaacctcgccccagcctctcacctattatataattaatggcaacggacgcgtggagaacgtggtcaggaacttcaccgcgcttgtgggtcgccaggacttgccaccactgtggaccctgggttatatcacctcaaaatatggctatcacgaccagcgagagagcgagggcgtggtcgacacgctcaagcgtgcgggctatcctctcgacggcatcgtgtttgacctctactggtatggcaaggagcaagacatgggtcgcctggaatgggaccgcgaccagtggcccgaccaccgtggcatgctcaagagatttaaggacctgggcgtgcatgctgtgaccatctcgcagccctatgtgcttaccaacggacgagctatcaacaactatcgcgagctcgaccccaaggggatgttctgcaagaccagtggcagtgacaccacacagacggtcaccatttgggtgggcaagggaggcatgtttgacgtgtcgaaccccgacacccgccagtggctcagaaaccgttaccgcacgctcaccaatgagggcgtgaccggctggtggggcgacctgggcgagcccgaggtgcatcccgaggcgatacgccaccacaacggtctcactgccgagcagtatcacaatgtgtacggcaacgagtggagtcgcatcatctacgacctctttaaggaagaatatccaagcgttcgccccatgataatgatgcgcgcaggcacggcgggcttgcaacgctactcggtgttcccgtggtcgaccgacgtgtcgcgctcatggggaggtttccagccacaagtcaccatcatgctcaacgcgggcatgagcggactgggttacatgtcgcacgacgtgggtggctttgccatcgacccggcatgcccacgcgacggcgagctctacatccgctggttgcagctgggcttgttctcgccagtgctgcgcacccactcacagcaacttgccgagccctatcactacaccgagtatggcgacctgccactgcgcatcatccgtgagcgttatcgctggctgccctacaactacacccttgcctgggagaacgccagccagggccttcccatggtgcgtccgctgggcttctacgagagcgacaaccgcatgagtcgctacgacggcgttaccgaccagtacctgtggggccacgacatcatggtcgcaccagtaatgaagcagggagccacaagtcgtgaggtcaccttccccgagggtacatgggtcgacatcaacaaccccgctaagcgctacgacgggcacagcaccatcacctactcagctccactcgaagtgttgccactcttcgcacgcgctggcgcatttatcccgcaggctaattacaagatggagaacgtgggcgactaccgtccttccaagctcgacatcacctactatcacggcgatgagccatcgagctacaccctctttgacgacgacctcaccagtacaggcaccctagccaagggcaagcatcgcctcatcaccttcagcgccacccccactgccagcggctgcacatttaccatcaagggcgagggcgcagggacacagcccactaaggactaccgcctcataatcccggcatgcaaagcacagcccaagaaaataaccgtcaatggaaagaaggccaaagcctccttcaaccgcaccaccgcagccctcaccattccactcacaatcaaggacataaacacagccaccacagtgaaagtggaatattagttttgacagccaaaccactattgagtaatacactttatcactcaatggtgaaggagaataaaagaccttttttagaataacaaactgttccaaagcaccaactttgggacagtttttattatattatagaacaagcagaattttacactttttccaggcatttaatttctttttattttgacgtgctcgattttggcactatcaatgcttatatttgcaccagaaaaaaagaacgaggctcgaaagtcccgctcttgatgttttcacaacggaataaatccttattgtgaattgcttcaaatttgtcctgcaaaattagacaaaaaaatacagtcaaacaaatattattatagaaaaaacaactttttcttatatttttgctatatttgcaaaaataaggaataaaatacttaaaacatgaaaaaaattctgggattagatttaggcaccagtagcataggctgggcagttgtcaatcaggcagagaatgacaatgagaaaagcaatattgttaagcttggtgtaagagtgaatcctctcactgttgacgaaaaaggaaactttgagaaagggaaaagtatcacaactacagctgaaagaactataaagcgtggaatgcgacgcaatctacagcgctataagcaacgtcgcaacaatcttgtgacagtgctacgtgataataacattataggttcagaaagcaaattgaccgaggacggaacaggtagcacttttgaaaccctagaacttagagcaaaagctgtgagtgaagaagtttctcttgaagaacttgctcgaatactaatctccatcaacaagaaacgtggctacaagagtaatcgcaaggcaaacaatgaagaagaaggagaactggttgacggaatggctgtggcccgtgaactatacagcagaggcattactccaggagagtatgtttatgaactcctgaaaaagcaaaaacgttataaaccatcgttttatcgctcagatttagcggcagagctagacgcagtgtgggaaaaacaatcatcctattaccccaccgtacttaatgaggaaaccaagcaaataatatcaggtaaaaataaaaccgaaacacgcaagtatttctatgcggcacacaagattgaagcttccgaagagaaagacagcaaattgcgtcaagtaacctattataaatggcgtgctgatgcagttaaaacacgcttggaattagggcaacttgtcacggtgctatgcgagataaatggtgacatcacggcatcaagtggctatcttggagcaattggcgatcatagcaaagagctagaacttaaacatcaaactgtgggcgaatacttgtggggcctaataaagcaaaatcctcatcaaagccttaaaaacattgttttctatcgcaatgactacttgcatgagtttaacaccatttgggaaactcaagcaaagtttcatcctgagctcacagctgagctcaaggacaaggtaggtcaacatttaatcttttatcaacgtagacttaagtcgcagaaaggcttaatctcatattgcgaacttgaaggaaaggaaatcacacttgccaatggcaagaaagtgatgacaggtcctcgcgtatgccctaagagttcacctttgttccaagagttcaagatttggcaagacctcaataatcttgttctagaacgcaaagaggtcaaacgctcaataaagaagaaaatagatggtatgagctcgttgtttggcgatgaattttgcgaagaaagattcgtcacattgagcaaagaacaaaaagatactctttataaggaactttattgcacaaaagaactatcggcaaaagaaatgctgaaaatacttggccttagtgacaaggagtattctctcaactacaagaaagtgcaaggcaacatcacccaggtgacactgatgaatgcctgtaagaacattgttgagatgactgggcatgatgtagataaattcgacaaaatggatgccgggaacaagatgcacttggtagaagttgtgcttgaaaccttgggagcaagcacaagtttcttgaacttcaacgccggcaatagccatgaagaaatgcagaaaaatcccatgttccagttgtggcacttactctattcctatgaagatgacaacacggctactggtaatggaaaacttgttgagcacatttcaaagttaaccaatttgccagaggaatatgcctcaataatagcaagaacaacttttgttcaagactttggctcactgagttcaaaagccatcagaaaaatcttaccattcatgaagaatgatggcaaagtttactccgaagcatgtgagctagctggttatcgccattcaaaacagtcattgaccaaagaagaaattgaaaagcgcgaacttcatgaccatcttgaaatacttcccaagaacagccttcgcaatcctgtagttgaaaagattattaaccagatgattcatgttgtgaatgggtgcattgaggaatttggcacatttgatgaaattcacattgagatggcaaggagcctaaagcagagccaaaaacagcgcgaagatgcaaccacacgtttgaacaaaaaaaccaaagaaattgaaaacattaagaaactactcaaagagtcacctttcaatatttccaaccccacacgcaacgatgtgctaaggtatcaactctatgaagaacttgctcctaatggatataagacactatactcaaacacctatattagcaaggaggaacttttcaatccagtttttgatatagaacacattatccctcaagccaaggtgtttgacgactcttattccaataagaccctagaatcacgctcagttaatattgagaaaaaagacatgaccgcaatcgactatgtagcgatgaaaggtggtgaggcgggagttgaggaatacaagaaacgcattgaattccttaataaacctgcaacagggaagaaatacaagaacctgacaactgttgaaaaagacattgaaaatggtttcttgaaccgtgacttgagcgactcacaatatatagctaaaaaagcaaaagaattgctactgcaggtatcaaggattgtagttcccacaacaggttcgattaccgcacgcttgcgtgaagactggcagcttgtagatgtgatgaaagaacttaactgggataaatatgacaaactgggattaacaacagctgagcgcaatcgtgatggccatgaggtgcgtcgcattactgactggacaaagcgcaatgaccaccgccatcatgccatggatgcattgacaatcgcattcactaggcattctcacattcaatatctcaacaacctcaatgccaaggatgaagatgaaagcaaagattccaacatctatggtattgagaaaaaagagctattgaaaaacaggaaatttgttccgcccatgccacttgatgagttgcgtgcacaagcaatgaaacaccttgagggaattttggtttcaattaaggcaaagaacaaggtcacaactcagaacatcaacaaagtgaaaggtgcaaaaccacaattgacacaaaccccacgaggacagctgcacaatgaaactgtctatggcaaacgtcagcgttatgtgacacgtattgaaaaagtagattctaaatttaatttagaaaaaatcggttcagtttgtaagaaatcatatcgtgatgcactttatagacgactgacagaaaacgataataatcctaagaaagcttttacaggaaagaattctttcacaaataatcctctttttgttgattgtaatcatctaattagagtgccaaatgaggtcaaaattgttattttagagagctattattgtattcgtaaaccagttaatagttttttaaacgtagatcttgttgtagatgatggaattaagaaaattttaaagaacagattagctaaatataataataatgctgataaagcattctcaaatcttgacgagaatcccatttggttaaacgaagagaaaggcatttgtattaagcgtgtaaatataaaagttaacttaaaagaagtaactccaatcagattcaaaaaggataaatatggtaattatattacagataaatctggtggacgcattcaaaccgatttcgtgaatcaatcaaacaaccatcatgttgcaatatttaaagatgagatgggtaatctaaaagagcacatcgtttcttttaatgatgcagtaaaaaacaaattaagaaataacattgttattgatagtgagttcaataaagctttaggatggagcttttgtttcacattaaagaaaaatgaattatttgtttttcctgatttgaaggagaactttgacccatcctctattaatttggaagattctaataattatcaactagttagtcctcatttatatagagttcgaagtatttctcataatgattattattttatgcatcatttagaaacaacagttaataaaccaaccgtcttgaaggatgttacatggaaacgaattagaaatgcaaatggacttaaaggagtcgtgaaggtgcgtattaatcacttgggcaaaatagtagtagttcatgattaaacgtactttatactttggcaacgcggcctatctgagcatgaaaaatgctcagatggtgcttcgcatgcctggcaaggatgatgaggaagatgtggtacgtacctttcccattgaagacctaggcgtggtaattcttgatcataagcaaataaccatcacgcaaggactaatggaacgattgatggaaaacaactgtgcggtcattacttgcgacagcactcacatgccctcgggattgctactgcctcttgacggccactcaaggcagagcgagcgattcaaggcgcaacttgcttgcagcaagccattgaagaaaaacttatggcaacagactgttcaagccaagatcgccaatcaggcttcggcactagagcaatgtgtgccggagtgcaagactggcaatatgcgtgcatggggtgaggaggttagaagtgatgacaacatgaatcttgaggggcgtgccgctgtgtactactggagcaacttttttcctgagattcccgatttcaagcgctctcgcgaaggtttctttccaaacaatttgcttaactatggttacgcaatattgaggggcgttatcgcaagaaatctggttggctcggggttgttgcccacaatgggtattcatcatcacaacaattataacgcctattgccttgccgacgacgtaatggaaccttaccgaccattcgttgatgttcttgtcaagaaagtaatgaaagaatgtgacgatccctgggacttgtctactactgtaaagcgtgaattgcttaccattcccacaattgacgtgaaaattaatggaaaacggagaccactgatgatagcagccgaaatcacaacagcatcacttgccaggtgcttcactggagagttacgtaagatttcatacccttatttttaagaaagtttaactaagaatgtcgtcctgtgagcgatttagtgagtatagaataatgtgggtgcttgtgttctttgacttgccaacagactctcgcaaacaccgaaaagcatacgccacatttcgcaagtgcttgttgcaagatggctttgctatgattcagttctccatatacgcaaggcattgtgccagtgcacaaaacgctcaagttcatgttcaaagagtgaagaacatgctaccgcaagaggggaatgtttgcatcatgactattactgacaaacagtttggaaacatggaaattttcaatgggagaagtcctgatacgccaaaatgtggcggtcaacaactggaattgttctagaaataagaaatccacccctacgaggtggatttcttattgtagtaatacaacttttttaaattctaattgacactgcaactctttgttattgaacaagttgcacacattgagttgtattatctgatacaaagatacaaatttgaaagcaattcacaacggtgtgcctctgcctgtttctgggctataggttgtattatctgatacaaagatacaaatttgaaagcaattcacaacctcgcgggttgtttcgctgtaactgttttgttgtattatctgatacaaagatacaaatttgaaagcaattcacaacactccggctcgctacctcgttccacttcgggttgtattatctgatacaaagatacaaatttgaaagcaattcacaacataaggctatgatgcacgaatggcaagacagttgtattatctgatacaaagatacaaatttgaaagcaattcacaactcgttgaagaattcatcaatcatgcgataggttgtattatctgatacaaagatacaaatttgaaagcaattcacaactgttcccggtgacactattaaggtgtctacgttgtattatctgatacaaagatacaaatttgaaagcaattcacaacaagttaaaccatttcgcaatatgagtaacggttgtattatctgatacaaagatacaaatttgaaagcaattcacaacagaccaatgagttcaattctcctcaagccagttgtattatctgatacaaagatacaaatttgaaagcaattcacaacgctttatagagctcgattatttaaaaagtggttgtattatctgatacaaagatacaaatttgaaagcaattcacaactcttttgccttttgcagcctatacaaagagttgtattatctgatacaaagatacaaatttgaaagcaattcacaacaatggtttcaagaaacataaagctggcgaggttgtattatctgatacaaagatacaaatttgaaagcaattcacaacttcaaaggcaatctccatttttggcatcttgttgtattatctgatacaaagatgtattatctgatacaaagatacaaatttgaaagcaattcacaacatacctgcatatgtttttttggagtcatctgttgtattatctgatacaaagatacaaatttgaaagcaattcacaacctaggaggaagtgcggatcattcttctccagttgtattatctgatacaaagatacaaatttgaaagcaattcacaaccttgctgactttttaggttttccaactcagttgtattatctgatacaaagatacaaatttgaaagcaattcacaacaagtactgaaacgtcaatatcttgatactcgttgtattatctgatacaaagatacaaatttgaaagcaattcacaacaagccagcctcgttaatgaacttaagtgccgttgtattatctgatacaaagatacaaatttgaaagcaattcacaacgtctactgttgcacgatgcctgctggcacgttgtattatctgatacaaagatacaaatttgaaagcaattcacaactcagccgcgcgatattcttaaaggcttcctgttgtattatctgatacaaagatacaaatttgaaagcaattcacaacctacgagggtggcttcacagcgcgtgatccgttgtattatctgatacaaagatacaaatttgaaagcaattcacaacactgggtggaacgcatggacatgggtgtcggttgtattatctgatacaaagatacaaatttgaaagcaattcacaacgtatcaagcgacgctcgtttacaacgtccagttgtattatctgatacaaagatacaaatttgaaagcaattcacaacactttcaccgccagtaataaaacgctcccagttgtattatctgatacaaagatacaaatttgaaagcaattcacaacttcaaaggcaatctccatttttggcatcttgttgtattatctgatacaaagaatacaaagatacaaatttgaaagcaattcacaacagtagtgccagcccatattgaaagcccaatgttgtattatctgatacaaagatacaaatttgaaagcaattcacaacgctttagtggcacgacaattcacgattgctgttgtattatctgatacaaagatacaaatttgaaagcaattcacaacaccaagcacgtgacggtgtttccatgttgtattatctgatacaaagatacaaatttgaaagcaattcacaactaccaggctaccacggaaaactctccaagggttgtattatctgatacaaagatacaaatttgaaagcaattcacaacacatacagggtatcacattccaaatcatcgttgtattatctgatacaaagatacaaatttgaaagcaattcacaacacgctggatgtgcctctagcattgccttaagttgtattatctgatacaaagatacaaatttgaaagcaattcacaaccgcacgacagagagggcgagagcgcacacgttgtattatctgatacaaagatacaaatttgaaagcaattcacaacactgctcaagcgagaggtggcgaaagagaagttgtattatccgatacaaagatacaaatttgaaagcaattcacaacaaaatggaaaacgaaagaatgattttcaagttgtattatccgatacaaagatacaaatttgaagtaatgacacaacactattcatctgttatcccatcgtgtcttggttgggaggtgctaccattaaaaagtgaagtgcatctggatgcggattccgctgcggttgatgcctgggatgtcgcggtagttgatgcgccacacgtagtcgacacgtaggaaagtgagaatgttgtcgagtcccactcccacttccatgtagggtcgcttgcccatcttcatgcaaagggcgctagtggggaactgtagtagttcggcattttgcgcggggtcgttcttgcttgtcagtgagccccacaatccacggaaggagatcacttctcgcatcttgaggcgcttgagcaatggaatgcgattgaggatagctccgttaatccagtaggtgacgtcccacgacaggtactggtcgttgacaaactccatggcgttcatgagcgcaaacgactcgggctgaatggtataggacaggttggcgttgggcagcaacagttcgggataaggaaccttgctccatactttaccggcgcgcaggatgatatcggtgtagccgaatgccgagaaccagaatcgtttttggattcctgcctcggtcttgttaatggtgtagtcgcttcccaggaagcctcgtggcatgaaggtgtgagagagggtgaacaccggcgcgtcctggttgatggggatgcggaaggagcgtgtttggtaaaatttctctcctggcgcatagcgcaaggtgatgttgaatcccgctgtggtgtaatggtcgagtgcggttttaaagccgtcgacaaatggcaggaatcgcgatgcctcgtggcgcaagtgctggagtgacgctgtgattgagaatcccgcctgggtctcgagcttgtattcgaggattgtctctcgcagataaatcatcttgtcgtccttctggcgcttgagggcaagaaacacgttgtcggcattagtgtagaggtagtgctgccccagcttgtcgacgtcgtagcggtgcatgagtcgcaacgagttgacaggaaactcattggggtgccgtttcttgttgacgaaggagtattccagctgtcccatgtacttgaagcgctcatcgcgcgtgccgtaggccacatagaacttagcaaaccaacgctggctgaggcttgcggtggtcatgccacctagcctgaagcgcgcgccctcgagggagttaccacttatcagggtgttcatgggtccgatgtcgaacttgctgtcgtgagcgttgcgactagtgttgatgtatccgctcacgagtgtagtcaccactttttcgcaccagtagaagagcctggactggcgcaagcgtgcgagcatgtccttgacagtgtgctcgttcttgacggcaaccacgggcctgtgtgccacccagtagttctcgtcttgcttcttgagctcggcgttaatcacctcaccattgtgttcaaagatgctcatgtccttgggtcgcttgaaggagtgcccgtcgtaaaaagtttgtcgccgcgcataaatctcgggagtcttgggagctatctggaactccaccatgagatcgtcgcgcaccttgagcctactgccgtcgggggctttgatgtagtcttgctccaggtagacctgattcacatagttgaggttaatcttgtgtggcacgttcatctttatctttgagatgaacatggtggtgtcgctagccggcacatagagtcgccccaggaagccgaaggtctgtgtgttgaacggtgtgaacgtgagctcatagcattccacgccatccacctcgagagtgtcgagatagtacttgtagaagtcggtgccaatgcttgagagcgggctcacaaagcggttttgcatgaatgtgatgtcgttgctgtagatgtccatctcgcggaacacgtcgtcgatgaatcgcttgaggctctcggtgtcgtgctggtcgtcgatgccagcatggttagtagccttaaccacctcgcggtgagtgcttggcgacttgcgatagtactcctcgctcactttctcctgtatggatagcggcaaaatcatcttgccggtaatatcgctcgtgtcgacatattccttgagaaacttaaagttttgagcgatgaggttgcgcgaactctcgctattgaaattattcaaaccaaaggacactttctcatacttgttgtagctgtaaaactcgtggtcgcgagggttgtacatgttgcgacgagctcgcagtttctcgacaaacgccactgcggggtttcccttcttgacatacttggcagtcttgcgcactatcacctcgttgagcatgacggtagtgggcacgagttttatttccaggtcggtgtggcgtcccagtggcacctcaatctcttgagtttgataccccacgtagttcactttcactttatcaaaaatcacacctgtgattattgtaaagccccctttgtcgttagttagcgcaccagtttgcgagccagtgaggaagatttgcgcgtagggcaagccctctcctgtgatagagtcgatcaccacccccttgatagaggtgtagccctcaggcgcttgcccacgccccaccagggctgtgagcatcaccatcatcaccaaaatatatctcttgcagtccaagtgggtgacagttgttggttgttttcgactttccttgtagacgttattttttaattagcaaagccacattttcgacatggtgggtgtgagggaacatgtcgactggctgaatggcctcgacacggtatttcttgtcgagcaacgcgatgtcgcgagcttgtgtggcagggttgcaactcacgtatactatgcgccgtggctcggcgtcaaggataacacgcaccacatcctcgtgcatgccggcacgtggcgggtcaactatcatcacatcggggatgccatgctgtgccacaaattcgcctgtgagcacgtctttcatgtcgccggcatagaacttggtgttctcaatgccgttaatgctcgagttaagtttagcgtcctcaatggcctcggggacatattcaataccaattacctcgcgcgcctggcgagccacaaagttggcaatcgtgccggtgccggtgtagaggtcatagactagctctttaccagtcagccccgcgaaattgcgcgccactttatataattcgtaggcttgctcgctattggtctggtagaacgacttgggccccacacggaacttcaagccctccatctcctcctcgatgtagtcgcgaccgctgtatagaatgaattcctggtcggtgagcgagtcattgaccttgagatttaccacatacatcaatgaggtgatttgcgggaattgctctttcacagcccccatcacatcggctatagcagcctcgttatcctcgccgaataccacaaccagcatcaactcgccagtgctggcggtgcgaatcatgatggtgcgcatgaggcccacattgttgcgaatgtcgtagaaggtgtagccacgctgctgggtatagtcgcgcaggaaaagtcgcaacctgttgctgatgtcgtcctgcaaccagcatttctcgatgttgagcaccttgtcaaagccacccggaatgtggaaccccacggcattgcgattggggaactcctcgccactgcgcatctgctcgggcgtgagccagcacttgttgctgaaggtgaactccagcttgttgcggtagtgtgtggtcttttttgagcccaagatggggctgattgccggcagtggcaccttagcgatgcgctccagagcgtcgaccacctgctgctgcttgcatcgcaactggtagtcataaggcagatgctgccacttgcagccaccacatgtgccaaagtgctgacacatgggctccacacgtagctcactgggcttgacaaggctgtcgattaccccctcggcaaagctgtgcttcttgcgggttatcttcacacgtgccacatcgcccggcgctccatagggaatgaacaccaccatgtcgttccatcgccccaggctcttgccctcggcagccactccggttatctcaaagtcctcaagcagaggcaaattcttcttttttcccacaggctatattatttatttaaatgaatcgagatgcaaagttagcgagtttttttcaataagatactctcagagtgattttttcattcccttcggtcttttaaggtgcttttttttcaacttgcatcttaaaaaacaccaaaacaaaaccattttggaaaaaaagattaactttgcaaaaataaatgtaacatttaatattttctttattatgaaaaattctttattgatttccttaattgtgtttgcattgggcattaacacacatgctcaagaattaaagacctacgagaacaaagcgtttaggattgattatcctgccgactgggaagtaacatgggacggtgaatctttcgtaaacatagctaacgaagatggcgacatcaaatttgatgttagtttcaaccagcaaggtcccaccaaagcccaattgcaaaacgctgtcgacaactgggtttacatgaaagagagtcatggcaataaggtagaccaaaagttggtaaaggatgattatgccctagtgcgttctatcataaccgatgaagatgatggcaaaaaaactgtggaggtgtggttcatcatgatttctcttgagcccgaaggattctccggtacgatgacctcccccattgggcatgccaacgaggcactcgatattcttgtgaaaatgcttgccacgcttagccccagataaggagagccactcacaatgcgccttagcgatgggcagattaaatcatgcccccaaataactcctagcggtcactaattattaattctcaaacatcataactgccactagaaattatttataaaacactggagttcagaagttaaatcagtcatgaattgaccgcaatgacgctagataaaagaaaaactggttgagaatctcaaccagtttttttacattattgcggaaagagagggaattccccaactgccctgaaatcagtgattttcagctttttatctgtcagcctttcaaaggctagtcgcaaatattaacatcatcattgatggtgcaaaagtagccgtaatatctggatctaccaaagaaaaacctgaaaattctgcaattattttttggtctagtaagggggtgctagtatagtcggcacatccttctttagtccactaggggttttaggtttgctgaaatccaacttttgtggaaagttcaggggcgaggggttaaattcccctagctgatgaaatttaatcccataccccttgtgtcatattcttctggccaccaacagctcataatttgcataatatcagaaataacaatagatatagaatatatgtttcacaatctataggtgagtttttattttttcattatgtacctttttttacaaaaatctcacctagcctaccgatggagatgtaatatatgccattattttgagtaagcaataaagaggaaagagagcaacaactacaaataaaataaaaaagctaggtgtctatgactgccttttgggatgattttattatttttgcaccattgactatgcaaaagaaaaagaggaaccgattaaaatagtaaacatataaagatgaaaactctaaaaaaaatatttggcaaaaaagagaatgagcaagaaacaactctaagctctacaggtgtccaagaagaacaacaatctaggcaagtgccaccacctctacccccaacaccaccagaactgccaaaacaattatcacctattgataacgtaattaattattttgatgaaggtggtatcattaaagcatactttaaccaaagagccttagatttttgtttatttcaaagagcaaaacaaaatagtaataatttcactactaagtttagctgggatggaaatgaagcacgaaaaaggaatgtcacaatgacagatatagccattaacaaacattccatcactaatagaccctttaatgatggtgaatttctttcacaaggggatgtaattatagaactggggtta

SEQ ID NO: 2227 - DNA, 24167 bp, synthetic construct
  misc_feature 1..24167: note = Synthetic
  source 1..24167: mol_type = other DNA
cttgtttttatcccttaagaatgcatatgccgcataaggaacaagccagtctttgttggactcaaagaaagctacataggatggatcttcaaaaaaactgtctttttcctgatcaaaaaggagcttaaaataagctgatttaatcttatgtacctcggggtaattcacaaattcttcagcattcaatgcttgctgtagttcggaaaactgagcaatggcttttttatccttcagttttcccattttttgcaaattgagaaaaacaggatgtagtgcaaatacagaaatggatttgtaaggatatgaatccaaccatgaatgtgttgcgatggtttcattgactggcaggatttgaaccatgctcaagccaaccgttttcgcccagtctatcaaatcaggcagatcattgaattcacctattccaaaactttcatcacttctcagtgaaaatacaggaaccgcaacacctgcacctctccaaggaccctgaggatatttaaaacctacatcagatactaaatatcctgctatatctctccattctgaatgatcttccagagatctgttgtgcccgctttcaaaagccaccagtttcttcattctggtgtcgtaataaccgtatttatattctgaagggaaggtaaaatgatccagattggccgaaccactccaaacaacatctccagcatcgcatccaagcagtaaaggcttttctacatcccaatttcccaacgcctttgattcccctgaaacacagatttgatatccttggggaacagcaggaactgcaatactgaattgaaggatctttttggattttgaagtggcgcccttcagatttttttcgcgcttgaagaccacatctttaagggctgaactgaaaagtactttttcttcgtttaccggataaatccagtggtcttggacaaaaagtccgtcctggttcaaaggcagtcttaatgttctgttttttccccattcccaaatcattttgtcccattgatccattaggaaatacttatattccatttcggtcgttccctccggaatattgagtaaaattgtccagttaccattttgggagtaattcagacgaatggctttcacaatatcccaattccccaaaatatcgcctttcccagtgataaatatattttcacctggtttggtatggtagtgtatttttaaaaaaatctccattttattaaagtgtttttcagaacaaaaatcggtagtttttgagtattttttacaattcaattcatttttttccttttaaggcaaaaaatcacattaaaattttgtaaatgaatgcattttttatcaaaaacatgcattctcaggatggttaaataaaattctattatgccatcgttttgtagtgcatcagaaaaaaaaattacattgaaaaagtaatctgactcatcaactatcaggttgattgttttttttattcagttcctgcataataaaagcatactccagcgccaggtctttgatccactgaaatcttcctgatgcgcccccgtgtccaaaatccatttgggtgtgaaaaagaagtaagtttttatccgtttttctgtcgcgcaatttagcaacccatttggctggttcccagtactgaacctgtgaatcatggtagccggtcgtcacaagcatcgcaggatatccctgtgtacagacattatcatacggagaatacgacagcatgtactgatagtattgtaaatctttgggattgccccattcgtcgaattcaccggttgtcaacggaatggattcatcgaggatcgtggtaaccacatccacgaacggaacctgtgcgatgatgccacggaacagatctgggcgtaaatttgcaacggcgcctaccagtaaacctccggcacttcctcctttcgcaaataatttatttttggaagaataaccggctgtgatcagatgttctgcacatgatatgaaatcagtaaaagtgttctttttcctgagtagtttgccatcctcataccatttacgtccatagaattgttctccccgaacgtgtgctattgcaaatacaaatcctctatccaggagtggaaggatgctgatcctgaaaaccggatcaactgtgatgccataagatccatatccatacaaaagtgcgggtgcagaaccgtttttcttaaaatctttcctgtataccaggctgataggaatcctggttccatccgtcgccacggcaaaatcccgttttgtttcataatctgaaggattgaagccacccggaatttcctgttgcttgagcaaggtgctgcgtcgtgtttttggatcataatcaaaaacggaacctggagtagtgagagaagaataactgtacctgatcagttctgaattgtacgctttatttgtgctcagattcacaacatatacttcttcatcgaaagaaatatggtgtgcatcttttccatcccatggcctgatatgcaactggttcaacccatcttttctttcagctataaccaaaaaatctttgaaaacatcgaatcctgaaatgaaaatgtcttcattgtgtggaatgaaaatttcccaatgatccaggcctgttcgcagggtgctggtgcgcatcacgttgaaattctcagcattgtgatttgtccttatgtaaaaatgatcaccgctgtgttctatggaatactcgaggcctttgatcctgggttgaaaaacgctaaaagatcctaatgaatgatcggcattcaaaaaacggtactcacttgtcaatgtgctttctgaaccgatgaccagatatttttgtgttttggttttgtatatgaaaacggaaaaagtttcgtctttttcaaagtagacagtgacatcttcagaaaccggagttccgagtatatgccgcctgaccttttcagaacgcagggtttgcggattgcgttgcacataaaaaacggttagattgtcatttccccagatgatccgacccgttgtcataggaatttcgtcctgtagcaacgctccgttctccaggtttttaaagaagagcgtataattccttcggctcacagtatcaaccccataagccagaatccggttgtcagggctgaccgaactgccgctgatatcgaaataggaaaaagcttcagccatttgattgacatccaggagtacttcttccttcgcatggatggaagtctttttcctacatgaaatataatattctttaccttcaacagaacgtgtataatagaaataatcattgaaaaaatagggtacagaattatcttcttccttgattttgccccgtatttcatcatacaaactttcctggagtggcaatgttggcttcataaccatgtccaggtaagcgttttcttcctccagataacggatcacatcaggatgatccctttcattcagccagaaaaactcatcaatccttaggtggctgtgtgcgatcagttctctgggttttttaggggctgatggtgcaacgggcatttggtcttcaggaaaagtttctttcatgaaatgcaattatttttggcaaaaataacattttaaatcatttggagaattgaagtcaatgaatgtggttgattattgactccttagaagttccactttcggggcggactcaatgcaaaagcctctcgttggtaaaattgtctggtattttgtgattgtgctggaataaagtatgagttcagtttattaagtattaaagttgaaagttcataaagttatattgcagatattgagatgtttatgataattttgcatttgtagtttaagtgttcaattttgggtctgctcagaaaagtcccgcagggacgaaatgattattaaccgtatgcaagcgatagcgcagcttacgatccctgcaccacctgtattccagagccctccaagggcaacattacaatgaatgtgacgcgtaagcagtaaagcgtctcaattcttttaacaaactgaagtagttatgtgatccggaagaaacttttgtaccgggtaaaagatgatctcaccccatgcggggctgtaatccgtttttattatgtccgtaagctgcgctatcgcttgcatacgcttatccaactgttatccctgcgggactgaatctaaggaaaggggtgagtgttttgataatttgaatcacgacaatgaatgtcgtgatctgcgagattcgaaaattcgtagcaattcccacattggtcatgcaaatatccattcaatctacattcgaaaaatacagtttgcaacgcggatgacgcggatgctgtgcagcgcggatctatgtttggaaaagcgagagattggtagaagggatcatttgaaaattggataatttgaaaatttgaaaattcgtagcgacccccacattggacatgcaacgatccttttaatccacgtttaaaaaatacagttggcaacgcggatgacgcggatgctgcgcagcacggatctatgtttggaaaagcgagaaattggtagaagggacaatttgataatttgaaaattgacctaggtgtaaaaaagattttcccgcagattttcgctgatctgttttctgaacaggaagctaaattcttcgcagatcggcgagttatgcgggaacgaaaaaaaaagggtttaacttttactttccctgatctcaatgaagttgacaggattccggctcaaggccggaatgacagctccaaaaaatagaaacgaatacatttgagtctactccgaatagtctttgccccctaaatccccactgacgttttcagtcagtacaagcactgacattttcagtcagtacaagcactgacatttttagtcagtacactccttaaaggggacttttaattagttgatattcaatcgtttccattcagtcttgggctgatctttgacgtcagtagaaaggagcaaaaaaacgattgaaaatcaacgaatcgcacttgtcgtagcagactcaaactttatactttttaaactcgaatcaagtatatgagttctcagtgtttttagccaatgttttatgactggaattaacactaaaatttccacagcaaatttattgtcaattgttccaagtattcccgcaaatcgaacggaaaaatggacgattaatctcttcatcaaaataatccgtttatttttatacttttgacccataatttccgttttatgcttttaaataacgtaaggatcattttttatcaaaatttgtaatttgtatgagaagtttattgttaactattctgtttgtaatgggttttatagtcatgggaatatctcagaatgaggactcaaccatgattaaaacacataagaagatcattatcaaaaccgttgaccctgaaggcaatgtccaaacaaaagtttttgaaggagacgatatgaaaatggattcacccagaccatttataattaccaaaggcagtgattccatcattgtggaagtttttgcagatagtatggtcatggatgaatttgaaccttttgaaatagaggatgtagaaaaatttcattggaattttaaagaagggaaggattttcccggtcaaggcagaaggatgatgatttttggggatggacaacccggatttgaacctatggaacaccagaataaaccaaaacttggtgtgtttattgaagaatcggcaaaaggtgtcaaggtgacagaagtagaagagttttctgcagcttactctgttggaattttagccggagatgtgatcaccagggtaaacggagtgaaaattacaaatgtagaagagttgcaacgggaaataggatcaggtaaacccggaaatatgaccgaaattaaagtcagaaggaatggtaagaataaatcttttgaagtgagattgcacggtcagccaaaaatgaagaaagcattcagttttgttccggaagaaggcatgttcccaccggaaatgggacgatttgactggcaggaaagacagcaaaactgttcaggcaagcataaagaaccagtttgttgcgagggttttggattcaacggaagatggcatccttttgatcagaaatgctgtgaaaagcatgatagccattctggaagaggctctcatgacgaacataaatgttgtgaaaaacacgatatacattcaggtaaagcacatcagggcgatcacaaaagctgcagcaatcatgaagaaaaaaagaattgtaacgatgaacagcatcatcatggttcctgtaaagataaggagaaaaaataattgaagggtaaaaaggatttgaacccgtctttttagtgatcttcactgcaaaaattatcaaatcaaagaggactggccgaacaccagtcctttttatttgtatcgcaatccaaattccgggtttgtttacaaaatcatttttactgaagatatacttcctgatagtttgtatcttgcacaaaaatatggggcataccggatctgatttgattaggatcaggggatttttttatcaccaccattcatttttatttaagcttgaaattaatgagttgaaattgttatggtgtagggttaatttttttgggaataaaatcgtaatgaatgaaagtgccattggcagaaaggatgcggccaaattcgctggatgaatatatcggccagcaacatttggttggcgaagatggtgttttataccgaatgatcaaatcaggttccatcgcatccatgattttttgggggccacccggaacggggaaaactacgcttgccaacatcatttctcagacccttaaaagaccgtttatccacatgactgcgatcaacgccggtgtgaaagacatacgtgatgccatcgataaagcaaaaaagcaacattttttcaacagtccgaaccctatcctgttcatcgatgaaattcaccggttcaacaaagcccagcaagatgcattattgggaagtgtcgagaaaggtattttgacgcttatcggggcaaccacagaaaatccttcgtttgaagtgatttcagcgctgttgtccaggtgtcaggtttttgtactgcaacaccttgacaaaaaggatttattggaacttttacatcttgcattggaaaaagatgcagaactaaagcaaaaagaggtcgttttggaagaaacggatgctttgctggctttttccggaggagatgccagaaaactgtacaattgtctggagatcgtcgtcaaccatttcaaggaagctgaaaccgtccgtatcaataatgaagtggtggcaaaagccattcaacacaatgtcagcatctatgataagtccggagaaatgcattacgatatcatatctgctttcatcaaatctttgaggggaagcgatccgaatgctgccttgtattatatggccagaatgatagaagggggtgaagatccgctttttatatgcaggcgaatgatcatcctggcagctgaagacatcggtttggccaatccgaatgctttgttgatcgcaaatgcatgttttgaatcggtgcataagatcgggatgcctgaagggagaatcgtgatgtcacaggcggccgtttacctggcaacctcacccaaaagtaattctgcttacatcgccatagacctggcacttcaaaaggtgaaagagactcaaaatttgcctgtcccattgcatttgagaaatgcgccaacagctttgatgaaatcgctgaactatggcaataaatatcagtatgcgcatgattttgaaaaaaattttgtccatcaggaatttttacccgaagagatttccaatacggttttttattcgcctcaggaaaaccagcatgaacgcaaattcagacaatggcttagagaactatggaagggtaagtatggttattaatcattcatatacaaataattataactgtcagcatacttagaaaagtcttacccaataaaattgtccgcaactgagttattttgaataaaatacaaattaacttttatgtaggaagttttttccaaaaaatgttctttatttaaagtaatattctattttcacaaattcaaactgatacatcatgaattttaatatttatagtgacgaaaatctcaaagttatagaaggaagtatagctgatttcactaaaaaatatatcgaaccaaactacaaagattgggatgaagctcaggtttttcctgtcaataccatgcatttattgggtgagtatggttttttgggagcggtcattcctgagatgtatggtgggtcaggtttgagttatcaggcatacgtatctattttacaggaaatatcgaaagtgtgtggctcaataggattgtctgttgctgcccacaattcattgtgtaccaatcatctttacatgtttggtaatgaagaacaaagactgaagtatctgcctgatcttgcttcaggaagatggatcggtgcctggggattgacagagcccaataccggaagtgatgcaatgagaatgaagtgtgttggggaaaaggacggagattattacattattaatggctcaaaaagctggatcacgcacgggaaatcaggcgatgtcgccgtagtgttggtcagaacgggcgatttgctggacagccgtgggatcagtgcatttatcattgaaaaaggaactccgggtttcaagccgggaaaaaaggaaaataagcttggcatgaggtcatcagaaactgctcctttgcactttgataattgcagggtacacaaaagtcagcttttggggaatgaaggcgaaggatttattcaggcgatgcaggttttggatggtggcaggatcagtattgcagctgtaggtctgggtatagccaaaggagcctatgaggcatccgtagcttatgccaatcagagggagcaatttggcaaacccatttccagttttcaggcgatcgcgttcaaactggctgatatggcgaccaaaatagaaacggcagaattgcttacgcgcaaagcagcctggttgaaggacagcggacagccattcaccaaaattgctgccatggcaaaatacaaggcttcagagatttcagttgaaatttcaaccgatgccattcaaatcttcggtggatatggatataccaaagattaccctgtagaaaaattttaccgcgacagtaaactattgaccatcggcgaaggtacctccgaaattcaaaaattagtgatttcaaggcatttaataaaataaaatatgtagttattagtataattcaaactaataataaagaaaaacccaatttgtatcttagaaattttgaggaaatcagagtgaaaaaggggttgcgtggttgcaaccccttaattttttaaaagatgtttaacaatgcgaatcaatagatttaatggataatttagcactgaatgttgtgtattccatagatatactaagcgggaaaatgaagtgatagtttggaattaggaatagggtaaagaccattttgattgatgatgctgacaaggttaacctaaaaatccgatggccataataagttttggcaaactttaatccataagtgaatgcagtggcgaaaattgtgacacactgagccttttagttttcgggattatttcaaaaacttagtttattgcattcaatagatttatattacttcttattttttgtctgatctatatacattcttcaacaaactgagaaaacattcagtatccataagtaatatttcaaaaaacaatgccatgaaatggaaaaatacaagattcacttacaaataggctgaaattatgaatctttatggagggagatatttattcctataaaaactgaccttttatagatttgaaatcatttttttttggtatcttaggccttgaaacaggatttggatataaacctggttgagaacatctgaatagtaaaccttttacctttttacctaataacccaattacccgaaaaggcaaaagaaaaaagacgaccggaggccgcctttgatgttttcacaacggaaaaatccttattgtgaattgcttcaatatgtggctgcaaaatacagtttttaatcataaataccaaataaatgaaaaaaattttagggcttgatcttggcgtaggaagtattggatgggctttggtgaatgaagcagaatttgaaaatgaacactcatctattattaaactgggtatcagagtaaaccctttaacaattgacgaaaccattaattttgaaaaaggaaaaagtatcactaccaatgctgacagaaccttaaaacgcagtatgcggagaaatctgcacagatataaactaagaagagaaaacttagtccaggttttaaaaaaatgtggaattatcaatgatgataccattttggcagagaattccaattattctaccttcgaaacttacagattgcgggcaaaggctgtcaatgaaaaaattagtttgcatgagtttgcaagggtgcttttgatgatcaataaaaaaaggggttacaaaagcagtagaaaagcgaagtcaacggatgaaggtcaactattggatggaatggatgtagcaattaaactgtatgaagagaatcttactccaggacaactctgtttacaaattttaaaatccggtaaaaaaagacttccggaattttaccggtctgacttgatgaatgagttgaacaagatatgggattttcaatcgaagttttatcctgatatattaattgatgattttaaaaaacagttagaaggcaaagggaaaaacgatgcctcaaagaattttcttgggcggtttggtatttatactgctgatttgaaaggtctcaataaaagaacagaactttttcaattaaggagtcatgcaccatcaaaacaattaacactcgaagaagttgctttagtcatcagtgaagtaaacgggaatatccattcttcaagcggatacctgggagatatcagcgacagaagtaaagaactttatttcaaaaaaataactgtcgggcaatatctgatccaaaaactggatgaaaaccctcatttcagtttaaaaaacaaggtcttttatcgtcaggattatttggatgaatttgagagaatatgggaaactcaggcaaaacatcatccaattttaactccggaattaaaatctgagatcagggatatcatcattttttatcaaagaaggttgaaaagtcagaaaggattgatcagtttctgtgagttcgaaagcgagatcattgaaattgaagaaaatggaaaaaagcgaaaagttaccataggcaacagggtttgtccacgttcttccccattgtttcaggagtttaaaatctggcagactttaaacaatgtaaagatcagttctggaaaagagcattgggagcgtgatcttgatgaagacgaaaagctcatgctggcagaagaacttaagttcagggatcaactcgttgacaaggatgtgatcaaaatgctttttccgggaagacaggatatctccataaatttcaaaaagctggatggaaataaaaccatttctgctctgtacaatgtatatgcaaagatcattgaaatgagtggtcacgatgaagtggatttttcaaaaactactttttctaaagttcatgattatgtgcaaaaggtattcaatggattgggcttcaatacccagattttgaattttgattttgaaggggatcaaatggatccggataaacatgaactgtatcgtttgtggcatttgctgtattcttatgaaggggacagcagtaaaaccggaaatgaaggtttgatcaatgcgatttcacgaagatatggatttgataaggaatacgctgcaatgatcgctaatgttgtgtttcaggacgatcatggaagtttaagtgcaaaagcaattcaaaaaattcttccttttctaaaaagtggatatgcatttgctggtagaaaggaaggaaaattgaaagaaagtgcatgtgaagaagcaggttataaacactcaatagattctttgacaaagcacgaaaatgaacaaaaggaattattgccaaaactggaaatccttcccaaaaacagtctcagaaaccctgtagttgaaaaaattctcaatcaaatggtcaatgtcatcaatgccatcatagatgaatacggtaaaccagatgaagtccgcatcgaacttgccagagaattgaaaagaagcgctaaggaaagggaatcgatgacctcgaacatcaataaatcaaatattgaacatgaaaggatccgttcattattgatcaatgaatttggactcaggcatgtgagccggaatgacatcatcaggtataaattgtatgaagaactggaattcactgttaataaaacgctgtattcaaatacatatatcccgcgagaaaaactttttagccacgagttcgatatagatcatatcatccctcaatccagattatttgacgactcattttcaaacaaaacgattgagttaaaggatgttaatataaaaaaaggtaatcaaacagctattgactttgttttacaggaatatggtgaacaggaattgggtcaataccatgcacgtttggacaacatgctgaagaacgggaaaatttcaccagtgaaatacaaaaagcttaagatgaagggtagtgaaattccccaggacttcatccaaagagatatccgggatactcaatacatcgctaaaaaagcaaaggccatgttggagaccatagtcagaagcgtggtatccaccacaggttccattacggacagactcagacaagactggcaactgatagatgtcatgaaagaactcaactggcagaaatatgataagctggggttgaccgaagtgtttgaaaatgaagaaggacaccagattcggagaataaaagactggaccaaaagaaatgatcaccggcatcatgccatggatgcattgacagtggcgtttacgaaaagaagtcatatacagtatttgaataatctgaatgccaggagcgataaatcttccagtatatatggaattgaagctaaagaattggacaggaatgaaaagggtaaactgctgttcaagccgcctataccggtaaaagaattcagggcagaagccaaaagtaacctcgaaagcattttggtttcgattaaggcaaaaaacaaggtcatgaccaataatgtcaacaagatcagaaaacatggcggtcatgagtcggtagttcaactcactcccagaggtcaattgcataatgaaacgatctatggaagcagactggaatacgtgactaagacggagaaagtgaatgccggatttgatatggaaaaaatacagtccgttgcgaacaaaaaatacagggaagccttgatgaaacgcttggaacaatttgaaaatgatccaaaacttgctttcacagggaaaaacagcattacaaaaaatcctgtttggatcgatgatatgcgaacaataagcgttcccgaaaaagtgaaacttgccactttggaaaacatgtatacgatcagaaaggaaatctcaaaagaccttaagatcgaaaaagtggtggataaaaaaatcagaaagattttacaggaaagactggataaatatcaaggtgatgccaataaagctttcagcaatctgaatttcgatccgatttggctgaatgaagaaaaagggatcagtatcaagcgcgttaccataagtggtgtctccaatgcagttgcgctcagggcgcgcaaagatcatctgggcaacaagatcatggatgaacagggattgagtttacctgttgattttgtgagtaccagcaataatcatcatgtagctatatttaaagacggtaatggtaatttgcaggaacatgttgtatccttttttgaggtggtggaaagagtcaggcaggacttgcctgtcatcgataaacactttaatgaagatgaaggatggcagtttttattttctatgaaacagaacgaatattttgtatttccgaatgagcaaaccggatttaatcctattgataaggatcttttggatgagaacaattatcctgcaatcagtcagaatttattcagggtgcaaaaaatatcaacaaaaaactatatgttcaatcaccatcttgagacaaaagcagttgatggggaaatgttaaagaataaaaagcagttagtagatattacttttaaatcaattagaacccctgcaaatttggagggaattgtaaagattcgaattaatcatattggtaaaattatttctgttggcgagtattaggttcatttttatttagattcagtacaaatatcacaaattcaatagtttaagggtcattattgattttcaggcaagcattttgctgtattaaaaaaggaagtaaaccttgcctgtgttatgatcaaacaaaccctttattttggtaacccggcttatttgagtctgaccaataagcaattggtctggaaatctgcggagaataatcaagataaaaaaattccggtatttctcaggcaggaaacggaaagaacgatcaatatcgaagatgttggttttattatactggatcacagtcagatcactttgacacaacggctgatgtctgaattgatggaatgcaatgttgtattaatgacctgtgatccatcgcatcaccccaatggattatttctggctttgaatggaaatacattgctgacagaacggcatcagacacaggtgaccgcttccattccattgaagaaaaatttatgggcacagatcattacccggaaaatatacaatcaggcttgttcgctgaagctttctaccgggctaacagatgaatacagatatctggctaaattgtcaaaaacggtcaaagcgggagatttgaccaacagagaagccatggccgcatctttctactggccacggttaatgcctgaacttggaggttttatccgtatgagagaaggttttcctccaaataattttttcaactatgcctatgccttgcttagggcttctgttgcaagagccattgtttccaccggtttgattccgagtttggggcttcatcataaaaataagtacaatgcattttgcctggcagatgatatgatggaagctttcaggccggcggtggatgccgaagtggttaaaatcatcagaaaacatggagctgatcgtgaattggatacagaactaaagaaagatttacttggtattttgacgatggatgtaaaaatggaaaaggataaaagtccgttgatggtcgcatgtacaagatctgtgaggtctttatacaactgttttgaaggcagtacgaggaaattattgttgccgggattgatcatggaataggttaattgaaatttttattcatttgaaatgcaagacaggataagcgcatacagggttatgtggttgatagttttatatgatttgccaaccaattccaaaaaggaaaggaaggatgcagccaggtttcgaaaagagatcatggcctatggtttcaaaatgtttcaattcagtgcatacatcagacacgtttcgagcagagaacatgcggatgcatgtaaaaaaagcatcagaaaaattcttccaaaggaaggatttatcggaatgttggagatcacggataagcaatttgaaaagatggaattattttatcaactggtgaaaaaaccggttcccaatgcaccaatccaactcactttattctaaatttcgttttcattcataggctaaatagaaataaaaaaatccttcattaagaaggatttttttatattgaataacggattttctatttcatttatcgtgttaaagcctttatttacaagggtttcagcatcatcagctagaaaaccctatttcaaagatacatactgaaagcaattcacaacttcccaaacaataaacctattaacgtatggctagaaaaccctatttcaaagatacatactgaaagcaattcacaactgcgaaagaaaagtacttaaaatggtacttgctagaaaaccctatttcaaagatacatactgaaagcaattcacaactttcttttacaagcctatgttttgcaataagctagaaaaccctatttcaaagatacatactgaaagcaattcacaacccacttacggtaattataacattgcaattggctagaaaaccctatttcaaagatacatactgaaagcaattcacaaccaacgggaagttgttgggtttaacctgcccgctagaaaaccctatttcaaagatacatactgaaagcaattcacaaccctttaggggaacacacattcaactatccgctagaaaaccctatttcaaagatacatactgaaagcaattcacaacaaagcgagatcgacagtcaggcattcagcggctagaaaaccctatttcaaagatacatactgaaagcaattcacaacccacacgctgacacagtagtcagttaccgtgctagaaaaccctatttcaaagatacatactgaaagcaattcacaacgaataaagggttctataaccaattgcaatagctagaaaaccctatttcaaagatacatactgaaagcaattcacaactgcgatgatgaatgttttgaatttgacccggctagaaaaccctatttcaaagatacatactgaaagcaattcacaaccgccagttgggtgttctgatcttcatatcagctagaaaaccctatttcaaagatacatattgaaagcaattcacaacagctgccagtgatgacattttactatttcagctagaaaaccctatttcaaagatacatactgaaagcaattcacaacgacgcaacttgactgttatatggaactttggctagaaaaccctatttcaaagatacatactgaaagcaattcacaaccatcttgtcgcctgtttgatttaatagtatgctagaaaaccctatttcaaagatacatactgaaagcaattcacaacttgcacaccgggcaatttgtagccgtttgagctagaaaaccctatttcaaagatacatactgaaagcaattcacaacagattgtgtcaaattagtggattggaacatgctagaaaaccctatttcaaagatacatactgaaagcaattcacaacttcaacaaagcgagtaaaagaaaaagacatgctagaaaaccctatttcaaagatacatactgaaagcaattcacaacaacttcgacagtaattaaatgatctgtatttttccattgagatatgttttgatctttatatggattggtttgagcgtttagcaaaaagaaaaagggttgcgtcaaagcaacccttattattttcagcattcgcttgtgctgatcacatatttttgacgatttcccgaccgaattcagagcaactcaatctggtcgctccatccataagtctttcaaagtcataggtaactcttttgcttttgatggcgccttccacacctttgaggatcaggtcggcagcttcattccagcccatgtatctgaacatcatttcgcctgaaaggatcacggaacttgggttgactttatcctgtcctgcatatttgggagcggtaccatgggtagcttcaaaaatagcaattccggtgtcataattgatatttgcacctggtgcgatcccgataccacctacctgtgcggccaaagcatcagaaatatagtctccgttaagattgagggtggcgatgacatcgtattctgccggcctggtaagaatttgctggaggaaggcatccgcgatcacatcttttatgatcaattcctggccattatgatggatgacctgccatggaccgccatccaggtctttacccccgtaggctttttttgccagcgcataaccccattccttgaatttaccttcagtaaatttcatgatattacctttatggacaagggttacagagcttttattttgtgccagtgcgtaatcaatggcggccctgacaatcctttcagttccttcctgtgacactggtttgatccctaaagatacggttccagggaaacggatgccagtaactcccatttcattgatcaggaatgatttaagcttttccagttcttctgttccatgcagatactcgataccggcataaatatcttctgtattttccctgaaaataatcatgtctaccaattcgggatttttgactggagaaggaaccccttcaaaccacatcaccggccgaacacatgcaaacagatctagtttttgcctgagtgttacattgagtgatctgaatccgcctccgacgggggttgtaagtggccctttgatcgcaacgagataattttcaatatcttccagcgttttttcagggagccattcacctgtttgctcaaatgctttttctcctgccaaaacttcgtgccaatggatttttctacttccgccataagccttttctacagcggcatccaacacatgaacagctgcagcccaaatatctgcacctgtgccatctccttcaataaatggaataatggggtcattcggtacctggatttttttgtttttaattgtgatttttgatcccgacatgttataagatttaatattaaaaaaaaagctacctggaataatccgggcagctttatcaataagttccgatgaagtaaatcaattactcagcgcttgctgcaccccatttcttttctctgtatgcagcgctcaaaatcatgtccctcctgactacagaaggtttggtgaattgtttcctccttctcaattctttgataactttagtggactgaaactttcttttgtatctttttaacgctctgtcgatcgtttcatcatcctttacattgataataagcatataatcagatatttttattttttaaattggttggcaaaggtaaaaatataattgtgaattttccaaaattttttttgaaaagatgtgaattaatcattgaattatcaaattcgagctttaaaattcaatttatccattcaattccgccatttaccagcttgattttttggcttttatataatgatccgacagcttttttgaaaacttttttgctcactccgaaggctgaatagatcaattcgggagaactattgtcattgaaagataaaaatccttcattttctattaatttttccaaaagaatttctgaaaaatcctttacggtaccataaccggatctgttcaggctgagatcaatttttaagtcttcccttagttttttaatataagctttggattcaaagccaattttcacatcggtgttgtaaacctcgctgctgtataacattcctgtgaaggagtgattgatgatcgctttccagcctagcggagtcagatcataaatcaaaatatccacctcatctccttcattgaattccggtggctccttggataaaaatttatggatcttttgtgatgctgccaaacggccgctttcttcgtcaaaatagacgaaaaatacataggattttcctaccatcaatggatttttctgctctttgaagggaacaaaaagatctttttctatattccatttgaggaatgatccgaacttgctgttggaagcgactgtaagcaatgcgaattccccaacctgcgctctgggtttcaatgtagtagcgatcagtcgttcttctgaatcgagatataagaagatgtctacttccgatcctatctcatggttgtcaggaacatactttgaaggcagcagtatttcacccaattcttcgccatcgaggtaaaccccgaaaggaacttctttgactatctttaaacggttgtaccgccctattccaatcatatttgttttttttgccgttagctattcaccggctttttgttttaatctggaaatctctttgttgagggattcgatcagcaattcctgcttttcattttcttccctgcaattgtccagcttggtttcaagggtttttaattccagttctttcaattccgcttcaccggaaaccacgttgtcagttttagattcagtggtaccgttttctgaaggctccacagcttctttggaatcatcatttccaatatgaaaaaaatcttttgcctgctgtatagggtcatgcccgttgtaataggaagctcccatatatgccaacggtgccgccaaaataaagaaaaagaaaaacttagcgcagcctgttagtttgtattttgttgccattgaattttgattttttgcaaagctaataaatagtgcttataatgaataatggacggtaaagggaattttaaatcaggatttacttttattaattcttttatgctaatcggagaaaaattgaattttcaaacacgatcatcttagtttttaaaaatactttagtttgagtctgctccgaaaagtattcatcgccacgaatgcacctatagatacatatccttcaaatacttgtagtcagcaatatagtatgttataaatttgaatctactccgaaaagtctttgccccctaaatccctgctgacgttttcagtctgtacatgccaaaagggaacttttaatttgttggttttcaatcgtttccctttagtcttgtgctgatctttgacgtcagtaggttggggtaaaaaacgattgaaaatcaacaaattggacttttatgagcagcctcaggattgtaatccaacccgaaaattgtaaaaaccaatttttaaagccttgtatctgatcaccagccgccgccggcgccaccaccgctgaatccaccgccaccgaatccgccgaatccgccgccaccaccaccgaatccgccactaccaccgccgaatccgccaccgaatccgccaaagcctccgagaccaccaacgccccaaccgcctcttctggttgttttatatttgccccggtctgtgtatcctccgcctgtttcgccacaatctccccgtttcacacatctgaacaatgcaatgatgataatgaagagtattataaaaaagatcacaaaagctaccacaagtcccggaccggggttgatgttttgtccgatacctagcccggtaaattcaccgctaccaagcgacatgatcgctgaacttgcttcatccagtgcctgatagtattgctgttgcctgaaattgggaacaatgatattttcaatgatccttttggccatagcatccggaagaaagccttcagttccacttccagtctgaataaagacctgtttgtcttcaaaagctacataaatcaggatcccgttgtctttgtctgactgtccgataccccatgtcttcgccatccggtaagtataatcaaagatctcttccccttctgtgctttgttcaatgacgacagcgatttgcgtggatgtagaatcattataggctaccagcttattttcaagttgttggatttctcccgcatccagtaaaccgatgaaatcgctcaccagtctgccagtgggttgaggcaattcttttgccatggtcaaatgagcaatgaagctcacaagcaccagcacgattgttttaagcatagctgatctcatccggtagttcatttatgtcgttatcctgatagggaaaatgctcctgaagcttcaacccgattttttctatattggaactcaatccttccacaatgtttccagacctgaaatgacctttcagatcttctacgatatcatcccaaaaattttcaggtaccacatcattgatccccttatctccaaggatcgcaaattgttttatgtccggtacaataaaaatcaacaccccgtttttcatggcggtttgatccagtttgagtgttttgaacgcctttagcgccgcatcgatcacaggaaccttgatctttttttggaaatggacacaaatctcacctgaagtattcaattcagctcgcctgatgctctcgatcaaccggttttcatcctctttttcaatgaattttctgggataaaacataatctagaattttacttcaggagctttttctgcaccttcagctgcttcaaaagtctgtttggaggagaaaccgaataatttggcaaaaagtacgcccgggaatctctttacagctttattatatatagttgcttcgttattgaattcatcacgggctactttgatcctgttttcagttccttccagttgagcctgcagttccagaaagttttgattggctttcagatcagggtatttttcaacggtaaccaacagccttgaaagtgcgctggtcaggccttgctgggcttcctgaaactgagccatattctcagcggtcatgttttcagcattgatcgttgtttgcgttgctttggcgcgggcgttgacaactgcttccagagtttcactttcgtgcgcagcataacccttcactgtgtttaccaggttagggatcaggtcagctcttcgctggtaagaactttcaactttagcccaggcattatttacattctcttctttatcaacgaagccgttataagaactgcagccctggaaaaaaatcaatattccgacaataatcaatacaatcgctgtggtgtttttcatatttaaaacatgttttagtgatcaataaaattaaatgctatttataaaagttacaaaaaatataattttcctttttttagagttcgttttgctatcaaaagttgctaaaaccgagttcaaaggtacactaaagattttaactttgcctgaacaggataatagtcaaaccttttttttgaattaataaatctgtatttagcataaaaagttcaaaaaattcagatattcgcgatgaatagatcttattattataccaatttattttttttcgggattaagccatgagtataacaggaagagtatctgaccgttttttatatctgcagggtcaacacctggtgctgaagagttgggtggtctcatctgtcctttttttaagtttatgcctacgtatgtacgggcaacagacttttcaaaattcgttgttttacctcgatccttatgatatgaaccctgcttacataggaatagatgatcggatcagtatggtggcaagataccgtcagcaatggatgggactggaaggaagtcccgggtttgccagattcaatatacatgttccgctccgggattatcatgcaggttttggtctaaaactggcaagcgaaagtataggtgtcatggaagattttacgctgagtttttcgggtaattattacgttgaaacttatttcggagccatttctgcgggtattcggggtggtttttcagggaaaaacatagatggttcaaaattggtaagtgcaaccgggatttacggatcagatccgattgatcatcaggacaattacctgtcagagatcagggcaggagaattttttcctgttttgggctttggtctgaattttttttcaaataaattggaaataggaacggtatttgattactatccggtggtgagtaaacggattgacaaatttctgtggaaaaatcagccgatgattaccttccatggaaaatattacttacctttggttcctcacttcaggatggaagcattctggatgttgaaatcggatctgatccaatatcaaaatgatgccggattgctggcagaatggagagatcagttttttgcagggttgactttaaaaggctttagcagactgataccggatgttctaagtatcagtgcaggtgcttacctgggtcattcaatcagcattgcatacaattatgaactgggtttttccaccttgaatcagtgggagaacggatcgcatgaaatcattgtcagatggagaattgacagtttttttggggcaaagaaaaaggaacccattattcacagtcccagattttatgaatagtatgatccgatcaaaaaaaggagatgcattcgcaaaatagcttttacttttttgcgttgtatatattatcgtagaagattaacaaaatttaagaaaaatttcactatttttttactttaaccgtgaatatgatatatttacggccttttaagtgcgtagacgaagattattaacagattgactatgaaaagaacagcgaatttactaatgggactagtattagtcaccttacttatcacatcttgtggtaagagagaaacaggccagttgacaggtgttcaagaccgtccggcctggaaaggaatcaacccttacggtatggtttatatcccttctggtcatttgcatgtagggcagaatgatcaggatatgttttcttcaaatatccaaaaacccaagtcagtttccgtagttggattttttatggacgataccgaaattaccaacaacgaataca

SEQ ID NO: 2228 - DNA, 24167 bp, synthetic construct
  misc_feature 1..24167: note = Synthetic
  source 1..24167: mol_type = other DNA
ctgtgattacaaaaactaatggaggtgccgataatacgtacaaacagaactgctatggcgttaatcttagcatgttaccactaaataaaaaacgcttattcgtttccttatctgcctcaataaataacttagaactaacatcgggaaacaaccaaacggtaagcgagtacgataaaaaactaggcaaattagaatttgcttataaaataagtaaaggatacaatatcaaattgcttggagaattaagcaaaggagatggaacagaatttaattacgatatatcgaaaaagtatcttttgaataaagcaaagaaatttacaaacattacccaatttcttcaattggcctttgcaggtgaaatgaatttaggttcgaaaaccaaggcgaattttatacttagctcagattaccacagtctggaggaaaaatatttaaaaataggcaatgcttcaatcaataataagaatatcaaaaacttatctattggttttttagcaaatgtgctaaggcaatatgagcagtctagcttgctattcaagttagaaactaattatagaaacaatttaagtaaggaattaaatgctggaagattagctgctgataaagccattgagcaattggtgatgcccaattatacattccaatcttccaatcgtttatttaccaatttactgattagatacgattattttatcaatgaaaagtacgcactctatctaaagggaaattttgcatatagtaaattcaatcagatagatacgggtgagaatgataatagggcgtacagcatagcaattggcttgtcattctaaatagtaaaagataacatctaaatagaacttattaagaactaacattttaaaataacacttatgcaacaagcgattgttgaatgcaaaaatttaactcattactacggcaaacgttgtatttatgagaatttaaattttgaaattcctcagggaagaattctgggactgttagggaaaaacggaactggaaaaaccacaaccattaacattttaaatggttatttaaaacctcgaagtggagaatgtttgatgtttggagagagctcagcaaatctatcttcagaaaccaaaagaaaggtaggtttactgattgaaggtcatgtgcagtattcattcatgaacatttcggagattgagaagttctactcggctttctatcccaaatggagaaaggatgcctactacgagttgatgaaattgttgaaaattgaccctaagcagaagatttcgcgcatgtcttgcggacagagatcgcaggtggctttgggattgattttggcgcaggatcctgaattgttaattcttgatgatttctccatgggtctggatcctggttacagaatgctttttgttgactacttaagtgagtatgcaaaggcagagaacaaaacggtgtttgtcacctctcatatcatacaggatatggagcgtttaatagacgattgcttaattatggattatggcaggattgtgatgcaaaagccggtaactgagcttttagaatcctttaagcgattcaagtttaattgtacaaatcctgaggctattaatgaaattagcgacatctataatccggtaaccataaaagggaacaccgaagtgtattcactattgaccaaagaggatttagagagtttaatgagaaaaaacaatgtgatgacaaacgaaattcaggaagaaagtttgagtttggaagaagcatttattggattaacgggaaaatattagagagatgacaagtgcattattatttaaagaatggaaaaagaccaagtggtttgcaattggagcttttgcagttggtctggctcttttaacttacatatttttaaaattaggacgatcgtttagaatggtcggattggaacatttgtgggatgtaatcgtaaatcgtgatcagtttttgtttcgcgatgtaaaatattttccattggcaacaggtttctgtctggctttggcacaatttgttcctgaaatgattcagaaaagaattaagctgagtttgcaccttcctctttcaaataggaaaattgtattctcaatgctaggattcggattacttgctctgttaagcatttttgttttacacctaattgtaattcttacattctcggtgttttactttccaatggagattattgaaagtatggtgtataccttgttgccatggtatgttgcaggattaacggcatatgcatttacatcgtggatttgtctggaaccaacatggaaacgaagaatttttaatgcattgctcatgtttgcaagcttacaattgtgtttcctttccgactttccagctgcttacagtctggttgtttcggcagttctattaattcctttgtatgtattgccttttggctatttctctgttcaacgttttaaagttggaattcaggattaacttattcgcttaattaaaaatgaaaaatataaaatatttaattattgttttgggaaccatgatactagcatggttattacccaaatcgtatcatttggtaacagataaagcttcaccaaatatatttacctattacagttcaattgataaagctttttgtgccatcgaatttgatgatgtaaaggggcatttgattcgaaaaaacgtaaagaccaataaagaatacagcgaagcagagtttgatagcattttgccaatgttttattctatgcaacttttttcggatggtagaatgcctaaaagcatcaatggcaaagatatcaatccaagagtggttaactcaaagaaattcttttttcgtgttaaaccagctgataaaaacaaaccacacatcccattgtacactttgtttgaatctatgtcgaaacgtgttagaatcgaaatgcctggcgatgtatttcgtttgaccgatagaattgagtttatcaatcctgaaaccaacgaaattaatgaggaaaaaagtgagcttttcaacgaacaatttgttaagaaaggttttcagtttcctgcgaaaatggcagcaggtaatccatcaacgcgaaaagcttacgaagaaggttactttattgtagacaataaggatcagatttttcatctgaaaatggtgaacgcaaaaccctttctgaagaaagtacctttacctgatggagtagttcctaactatttacagaccatggaacctgacgatagaagtttttatgcatttgtttttgacaccaataagaaacttcacattattacaaccaatgcctatagcttacaggaaattcctatgccagagtatgatgttgataaagatcaattattgatcatggcaaatcccttgtattggaatttaaatgtggtatcaggcaaaggaaaagaggtatgggctattaatgctgatacaaaagagtttgtagatacaaccagcattgttggtgttgaacaaggagtaaattacagcaagtattttcttccattttcggtaggatttacgagtgggaatacaagatatattaagccaattttttatttcggttcatacctcgttttgataaacaattttattttggctttggcctttgtaatgatcatcagatatcgcaaacaaaaaatacagatcctgcctgttgtttggatttcaataacagggatttatggatttattgcaagtataatatttaaccgctaaagaaagtaaaaatgaaaaagttattattcgttgcatttgcagctttaagtgttttggtttcatgtaatccagccaataaaaaacaagagaacaagcaagaagtagttaaagaaacacctactatgaaaagcattgctcaaatcatggaaatggcagaacaaaacgttggaaaagaagtgttttttaagggaatggttcaacatgtttgtgcacattcgggaagacgtgcatttttggttgatgagacaggaaagttttcgatgcgagttgaagcgaaaggggagattaatggttttaatcgtgaattatccggatcaaccattgctgtaaaagggacaattgcagagcaaagacttaccgaggaagagattaatacttatgaatctagggtaaaggccaaagaggatgctgaacaaggaggagagcattgttctgctgagatgacaaacattaccaaaatgcgtgattggatgaaagaaaacaagaaaaactattattcaatctattttgtaaatggaacttcttatgaaatggtggaataagaaagtttttaataaaagtatcaggtctcttcatcgtgaccttggttacttgtttattggattaactttaatttatgcgatatcaggtatcttgttggttctaaaaaaggatggacaaaatccttcttatcgtgaaattataatggagaaagaggctaaagcgaatttaaagccagatgaattaaaaacattctggaaagatcattttagtgatgctccaaaattaacacgcattattcctgctgaagatgtatacaatatatatgtaaaaggtggactgggtaagtattatccttataatggtcgaattgaatttacgatatttaagaagataccagtttacaaatttgtaaatgatatacactacaattctggacacaggtttacgtttttggcagtaatcttttcaatcgtgttagtattctttgccatatcaggtgctgttatggtaaagggaaaaaaaggatttaaaaagaggggagtttggttgatgatcattggtttcatcatacctgttcttttgtttttttatacttagtcttttttaagattagttgttatttttgattttaaggccttctgtagtggaaggtcttttttttctgaaagtcttcaaaatcttgatgaaatagataacggtactctgtacctaattattctttaaattatcaagttatctataaatgtcaagctgctctgcacctaagtaatactcaactcaaattcatcagaaaagtagtagagctgcgtaagatttatagtttgatcatctaagagtctatttaggtacaaagtaccgtaactttcatttttgatgattatccttttgttgtaaaagcaattgatttttagatattaagaatatcctcatttataaggattgattatgtgttggattaaattgaaatttaacaaataattcaaaatctcaataaaatggacatcattacaacaaaaacagcctacagtcaagtcaataacctattatttaaaagttacctccctaatattatttattctgccatagaagttggaatatttgaccaattggcaaaaggtcctaaatcttgtgtacaacttgccaaattattgaatgctgaggccaatattacggaatctttgttagaggtattacatgctattgattatctgaagcgaaaggattatacctactctttgacggatttggcaaaggaataccttacacaggaatcggaagtgaatcaaattacagcagtcaagcaatttacttcaacagaagggccctttgctaatttaactgctgctttaaaggggaaagtacctgaattcaatcagaatgcctggagttctgaagaagcaattagaagcattgaacaaggttcgaaagctggagcgttacagtatgtactgagctttgtaaaagatttacctgaatttataaaggcaaggaaaatgtgtgattttgccggtaattctggatactattcttatgcctttttaagcgaaaacagcaacttacaatcccatgtctacgatttaaaagaggtatgtaagatttcaaaaagaattaagaaggatgagaaaggttttaatcgtgtgagctatcattcttttgatttgaataataatgatgagtttggagaagcttatgatttcttttttagttcacattttctttacaaatatgatagttcgaaaaaattggttggcttattgaaaaagatcaataaatctatgaaaatgggagctttgtttgtttcaaatcatatgacaggtaaagccagcggtgaaaattaccttaccctatgcattgttgagctaatgacaagagctatgggatttcctactcattcggtagcagaagattttttaaaggatgctttaacagaagctggtttcgaatgccgttacgaaaatgctcctgatgaaagaatagcttatcctggaatgataatagctgcaatcaaagtaagtgaggtggaagatgaaactgtaccatcaaaagatttaagcgcaagtatgttgaagtaatcttttaaaatgatgaattcatagagcattacttataagaaggaataatggaaaaaataaagaatacactggaaaacaatattgctgaaaccttatatattacactttacatgaaggccttggagagtcaaaaatctgacccaatactatcggatccaatggcatgtgaaatgttaaggaccatcgattacgatttctcaaaatacgataaggccattcgttctgctattggtgttgtggtgcgttcaaagcatttcgatgatcaggttcgtgacttcataagcaggaatgtaaatcctgtggtagtaatacttggttgcgggttggatactcgctatcatcgattgaaagattgtaatgatgatgctgaattttatgagttggatatacctgaggtaattgctatgcgcagaaaatttatgcctgaatcttcaaaggatacctatatttcagcatcgatgttcgaaaccgactggatggatatgatacatgaaaaacacagcaatcaaccaatcatttttgtaattgaaggtgttttaatgtatttcgaggaggaatctgttaaagagttattttcagatctttcaaaacgattttctaaggcagaaatgcattttgatgtcgtaaataaatggttgtcccgtaattcgcacaagcacgacaccataaaaaattcggacgctagctttgtgtttggtttagatgatgattttctgattgaaaattgggggcaaaacctatctcatcggaagacatatttgtattctgattttccaggatggaaaaaagttggctttatgcaacgttttataatgtctgtagttccaaaatataaatatggaggaagattacttcattacgtattgaactaaaatcatcatttcttaggattgattactcatgacttgttagttaattttgaattgttctaaacaagttacaagtgaatgaatttcagtttaacgaaaaaataaattaacagtgagcaatacagctattatttacggttctactacaggaaatacagaaaatgttgctaatcaattagcgggattattaaatgcagatctatttgatgcatctacaaaacctactgaggcattaatcaaatacgataatcttattttaggtacttcaacatggggtgcaggtgatttacaggatgattgggaagactttatttctgaaatagataatgctaatctaagtgaaaaggtagtaggacttttcggtcttggagatgggtgcaacaatggagatacttttgtgggaggcatggcacaaatttacaatgtggtaaaggatagtgattgtaaaattgtaggaagtgtagatattgaaagttatgaattcgaagaatcggatgctgtagtagatgggaaatttataggattggctctggatgaagaaaatcaaggcgatttgtcggaagaaagaattaacaaatgggtggagcagatcagtaaagagttaaaataattaccaattcattggaatattttgaccgatttgctttctgcaagatcgattataaatattataaacaatgttggaacaccaaaaaatggtattgaatgctgttgccgatgaccctcttttgtttaaaaaagagttcgaaaagtcagcgcaatggctaagcattaaagaacaaaaggaactaagtaaatgggtacaattgaactttagtgcaaaagactacggattattatagatgtttataaatcaaaatcggtttagtgagttattatacttggctaaatcaaaacagcagaggatgtcctaaatagggcatccttttttggttctatatgattattagtagttgagttactaaatagtacttaaaatgtatggtataaacattacaatcattcatttaagctggtattaaataaactgataaaaaaaaatattgtactaatacttgaagtactccaagtattctaggcacttccgtagaaagtcatacagcacaaaagtaaaattggcttttctgtaaaattttaaaagataaattaggactgcctcaaataagagacagcccccttttttttgttaagatatgtggatcttaataaaaactattcgataggctctaaaacaactcgaaccacattcgatttcttgcctacttcttttccgtcgtaaatatagtaggcgtaatattctcttatttccacctctttattgctaattctgccacgagtatcatcaaaagaagaacgatttacagtagtttcaaaattgtattctccatcgttagttttagagtatagctttatgccgtccattggctttttctgatatgtaatacgaggtacaccagctattggttcaacttttaattttggacgtttgttgttggtttcctcagtctttttttcatttagcagacccaattctctttttacattttcaggaatagtagggtctgaatcgatctcatttttataattacgaagcgatttgttgcatgtacttttgctaccagtaagctcttggcgcttattgcgagcggtttgtaaacattcatttttctctttccgtaatcgttctacctcttgtagttccgcaattaaggcctcggtagcctctttgggtaagatgccctgttctacataagcgggagccttttcaatgaaattttctgttttttcagaatattcttcttccgatgaactgataaaacttttaatcgttgtaataattgtaagaataaaactcataatgatttcttttaaatttgtaaatattaagtgtctatattaaagctagaaaacttgccaagaaaaaacacaaaaaaatatattttttattgatcatcaggctgtaaggctagtgtttccaatgctttcagaaatcattaaattattaatgtatgattgatattaggatgaatttgaatttacaaactcaaaaatattgattaagtttaataataaaaaagcctaaaataagagatacacaaggatttaactctagtacaagattgggtaatgtacagattgttagttattaaagtgtattgagtgggaagctgtcaaaaattaaggtttagtttgataaataattttatggctatataatatacaaggagtaaaatgctgtatgatacaaatagtaggcaaattaaaaagttttgtattctgttacaatagttatgcatgtaaatagaaatcgattaaaatctaacaatttagagtttgtaaacagcccatatcagtttttaaattgctcatattagtttgtaaatcgcccatatcagttaaaaaacaggccaaatcagttttaaaacagctcaaatcagttaaaaaacagcccatattagtttgtaaattgctcatattggtttgtaaattatccaaattaaactgtttctacatcagaatgaactgttttgcttggccaaaaatttaaccgtgaaagaataaaaaatggtgctaatatcgaaccaggtttatccagaataattactgtttacttctgaataatttttttatatttacatactgttcattccattaagaacaaaattattctactatatgaccaatacttcgcataattacatcggttttcttcacgaaacagcttggatcgtagccatggaaacttatatctaaaagaaactttggaaaatgtaaagcataaaaaagccccgaatagaaagtcgaggcggcttaaatgttttcacaacggaataatccttattgtgatttgcttacagaatgtactccaaaaatagaaacaataaattaaacatacaactcttcttatgaaaaaaatattaggtttagatcttggaactacctctattggttgggctttggtaaacgaagctgagaatgaatacgaacaatcagaaataattaaattgggtgtacgcgttaatccattaacgacagatgagcaaaccgattttgaaaaaggtaacccattatcggtgaatgctgatagaactttgaagcgtggtgcaagaagaaacttgcagcgttataaattgagacgtaagaacctaatggatctacttacgaagagtggaattattaccaaggatacagtattgaccgaagatggaagtttcaccactcatgagacctggcgtttacgttccttatcagcaagtgataaaatagaaaaagaagagtttgcacgcgttttattcgccatcaacaagaaaagaggttatagaagtagcagaaaagccaaaaatgaagaggaaggaagtgtgattgacggaatggctatagcaaaagaattatacgataaacgattgactccgggacagtatgtattgagcctgttaaatgatggtagaaagtatattccagaattttatcgttctgatttaaaatcagagttcgatgcaatatggaattatcagaaacagtatcatccggatatacttacggaagagttttacagaaaacttgaagggcaagggcaacaaaatactcgaaaattgtttttagcagtacacaagatatacactgctgaaaacaagggtaaacgtgagcaagtaaaattgcaacattatcaatggagagtagatgctctccagcagcagttaccgatagaagttattgcttacgtattggtcgaaattaataataacctaaataaatcaagtggctacctgggagctattagcgatagaagtaaggaactgtattttgaaaaggaaactataggacagaatctttatcgccaattacaggagaattttcatggtagtttaaagaacaaagttttttatcgtcaggattatttagatgagtttgagaagatatgggaaacacaagctcagcactatagagagttaactccagaactgaaagaagaagtgcgcgatgttgttatcttttatcagcgtaagttgaaatcgcagaaacacttaattagtaattgtgagtttgaaccgaaacataaagctataccaaagtcatcacctttgtttcaagagtttaaaatttggtgcttggtaaataatgtagagcttcaaaaccagaaaagtaaagagcagagaaaacttgatgaaacggaaaggcaacttttgttcgaagagttgaatgtaagaggagatttgagtcacgatcaggtattgaagtgtttggaactaccgaaaaaagaatggaaactgaactataaggaagggctttcaggtaatacaacaaatcagcagctatatgaagtttatcaactggttgcagagtatgagggttatggattcgattgggctaagaaatcagcaagagaaattaatgaggagttgaaagcaatctttccagagattggtttatctgaagatttacttcgttttgatgccgatattaaaggaaatgaatttgataagcaagcagcatatcagttatggcatttgatttattctgttgaagatgatgagaagattagtgaggaagatcagtttgtttatggaaattcggcagtagcattaaagaaaaagttgcacaaaggttttggttttcaacctcaatatgcagctatgttggctaatttaaatttgcagcaggattacggacaattgagtgctcgtgccataaaaaagatatatccatatttgaaaaagggatttctgtattccgaagcctgcaatgcggctggttataatcattcacactctttgaatgcagaagaattggcaagtagggagctaaaagatcagttaaatttattgcctaaaaacagtttgcgcaatcctgtggttgaaaagattttgaatcaaatggtgaatttggtaaatcaggtaattgaggtatatggaaaaccagatgaagttagggttgaattggctcgtgagttgaaaaagtcggctgatgagcgaaagaggatgacccaaggaattaatgatgccaagaaaagaaatgaagagattgtaaaaattctacgtaatgctccatataacctaactaatcctacaagaaatgatattacaaaatatcgtttgtatcaggaactaagtgaaataggttataagacgattttcaccaataggtatatttcaccgtctgaattattttcaaaaaatattgatatagaacatatcattcctaaagcaaaattgtttgatgattcgtttaccaataaaacgcttgcttatcgagaagtgaatttggaaaaagacgattctacagcgctggattttataagtgaaaagtatcattctgatttacgggattataaggatagagtggaaagtttgtatgcagcctggttaaaaacacataataccaagcaagtaaaaggaattagtaaagctaagtatgaaaaactactgatgaaggaagtggatttgcctaatgattttattgagcgtgatcttaggaacagccagtatatagccaaaaaagcaaagcaaatgctaatggaggtaattcgaactgtaaatactacttcgggaagtgtgacagatcgtttgcgtgaagattggggattggtgaatgtaatgaaggaattgaatttaccgaaatataagggattaggcttaacagaagagcaggagagaaaagataataaaaaagtattggtgattaaagattggaccaaacgtaacgaccatcgtcatcatgctatggatgcattaacggttgcttttacttctcattcacatgtacagtacctaaataatttacatgcttcacgcaatattcaaagtgaattacacggtattagaaagaaaataactgaattacaggcaacaaagtctggtaacagtaagcgtgtatttaaagccccaatacctaatttcagacaggaggctaaaaatcatctggaacaaatactgatttcatttaaagctaaaaataaggtagtaacgcagaatgtaaattattacaaaaaatctggtgaaacctataaaaaagtacaacttacacctcgcggacagctacataaagaaacagtttatggaaggataatagagcagggggtaaaagaggaaaaattaggtgccaaaatgacttttgaaacagcacttaaagtatgcaaaccaaaatacaaggatgccattttaaggcgcttggctgaatttgggaacgatgcaaagaaggcatttacaggaacaaattcggttgcaaagaatccagtttataccgatgctgtaaaacaagaacaagtgcctgaaaaggtaaaaattcatgtcgcagaagagaattataccattagaaaggaaataggacccgatttaaaattggataagataatagatgaaggtgtaaaaagaattttgagtgccagactggaagagtttggaggcaatgctaaggaagctttctcaaatcttgataaaaatccaatttggttgaatgaaaaggctggaattgcaatgaaacgtgttaaaatttctggtgtaaaaaatgcagaagctttacatgatcagaaagatcgcaatggcaatttaataatggatgctgaaggcaaaaccaaaccagtagattttgtaagtacaggaaacaaccatcatgtggctatttatagagaccacaaaggcaaattgcaagaacaggttgtttctttttatgaggctgttgccagggtaaatgcgggagtttctgtaattgattacgactataagaagaaggaagggtggcagtttttgtttaccatgaaacaaaatgaaatgtttgttttccctgccgaaggttttgatccaaatgatgtggatttattggatgcgaaaaatgcaaaagtagtttcgaagcatttatatagagtacagaagatagggacaaaagattattggtttaggcatcatttagaaacgatgattaatgatattaaagaattgagtgatattggatataaacgtaaaaggaatccagaatcaataaaggatattgtgaaggtgagaataaatcacttgggagaaattgttcatgtaggagaagaagttcaacaaaaacaggaagtagaaatgagtatttaaaaatgtaatcatgattaaacgcacattgtattttggaaatcctgcctatttgcgtagacaggacaaacaattgaaagtattaaagccagaacaaagaaaggaggtcgccagcattcccatagaagacataggagtagtggtattggatcatccgcaggtaacgataagccaggctttgctttcggaattggtgctaaacaatgtggccgttttatcctgtaacgagaaacatcaccctgtgggtttgttcatgcctttggctggcaactccttgcaatcggagcgttttagaatacaaatagcggcatcggagcctttaaaaaagaacttgtgggctcaaacggttgcagctaaggtatccaatcaggctgatattttagaacaaatgggaaaggaggccaaaagactgcatgctttagttccgcaaattaagtcgggcgattcggataatatagaggggcgagctgccagagtatattgggatttgcttttgggtgatgatgattttgttcgcgagcgtttcgggaaagctcccaatccgcagttgaattatgcttatgctttaatacgtgcagcggtagcacgtgctttggtgagtagtggtatgctgcctactttgggcattttccaccgcaataaatacaatgcctattgtttggccgatgatattatggaaccttatcgtccgttttgcgaccaattggtattgcccatgtattacaatggagagtttacatcggaggacttaactaccgatcaaaaagcgaagttattaagtgtactgacttgcgatgtattaattggaggtaaaaaaagtcctttaatgacagccattagccgaaccacaaactccttgttcgaatgttttgccggagaacgacgtaaaatactctatcccgatttttatgagtcacgaagccttaagccaatatcgtagcatgtgggtgctggtgtttttcgatttgcctaccgataccaaaaaggagaggaaggcagcaggccgatttcgaaaggaattgttgaaagatggttttaccatgtttcagttttccatttacatgcgaacctgtccatctcgcgaaaatgccgatgttcatgccaaacgtgtaaagcatttgttgcccgaacacggtcatgtcgggatcttgaaaataaccgataaacaatttgctgccatggaattgttttatagcagggaaaccgctgataaacctgatgtagtgcagcaattgcaacttttttgatgtcgttacgctgaattactcattgttttggatggtcattatgtgctaaaggcagaatataagatttgtcatttcgaagaaggaaggactgagaaatctgttttaatctagagagattgattttcatttttagttatacaagaatagggtaatctcaggccaaaagatacagatccttcactttgttcctgcgttcaggatgactatataacagtgtcatttcgcaaaggaacagtctgttctgacttattttagaacaaagcaatctgtcaatttttgcagtaaacagaattcaaaaaatctccataacaagaaaacccgaagctttttggcttcgggtttttcatttctaatgtgttttacaactttcttattgtgagactctttcccttgataggttgtaattcaacacatcaaagatacattctgcaagcaaatcacaactcgggagcattgaatgattggaccggaggcgttgtaattcaacacatcaaagatacattctgcaagcaaatcacaaccgaaatcaggataatggatgaaggcaagagttgtaattcaacacatcaaagatacattctgcaagcaaatcacaacggcagatatggagcgtcttattttatcgctgttgtaattcaacacatcaaagatacattctgcaagcaaatcacaacaagtgttaagaagttttattaaatactgtgttgtaattcaacacatcaaagatacattctgcaagcaaatcacaactattgagagaaaatatgttttcaatactgagttgtaattcaacacatcaaagatacattctgcaagcaaatcacaactactttctgctgatgatgttcgtaggattagttgtaattcaacacatcaaagatacattctgcaagcaaatcacaactttggataccaaggtgcatcggatctattagttgtaattcaacacatcaaagatacattctgcaagcaaatcacaactatccatcagtacttcaataaagattttcagttgtaattcaacacatcaaagatacattctgcaagcaaatcacaaccaaagcaataaatttaaatcgggtgcgtccgttgtaattcaacacatcaaagatacattctgcaagcaaatcacaactatccatcagtacttcaataaagattttcagttgtaattcaacacatcaaagatacattctgcaagcaaatcacaacaatggtccatgtgtaaaattaaaagaagtagttgtaattcaacacatcaaagatacattctgcaagcaaatcacaaccaaagcaataaatttaaatcgggtgcgtccgttgtaattcaacacatcaaagatacattctgcaagcaaatcacaactaacagccactatattagccctgtaagcgtgttgtaattcaacacatcaaagatacattctgcaagcaaatcacaaccagtgtcactttgaaatcttcatctattaggttgtaattcaacacatcaaagatacattctgcaagcaaatcacaactgcattcaggagaggttattaaaacatccgttgtaattcaacacatcaaagatacattctgcaagcaaatcacaacacactcgtgcaaaacttattgtaacaaaaagttgtaattcaacacatcaaagatacattctgcaagcaaatcacaacattttggaagaggtggcaggaatgttcatggttgtaattcaacacatcaaagatacattctgcaagcaaatcacaacgggaccactgttccttcagcatcaatatagttgtaattcaacacatcaaagatacattctgcaagcaaatcacaacacatcagaaccaccggtaattgtaagatatgttgtaattcaacacatcaaagatacattctgcaagcaaatcacaacttatgaggcggcgcagattgatggtttcaagttgtaattcaacacatcaaagatacattctgcaagcaaatcacaaccagtgtcactttgaaatcttcatctattaggttgtaattcaacacatcaaagatacattctgcaagcaaatcacaactcctcggtatttcagtatccgcccagaatgttgtaattcaacacatcaaagatacattctgcaagcaaatcacaacgagggctaacgataaggttactgccgatatgttgtaattcaacacatcaaagatacatgcatgattcataattttatataaaggtatcatgaaacatgttactgcaagcaaatcacaacccaacattcaattgcatcaaattgtgttcagttgtaattcaacacatctatgatacatgcatgattcataattttatataaaggtatcatgaaacatgttactgaaagcaaatcattcatcggcttcgctcagggtaaacttgttccttgtgctgagcgctagtcgaagagaacacactaaagatagaaaaggggtttgtattatgaaacattattttattaaaaaaaaactaaaggatatggaattaattggggtgcaaaaaaaggctatttcaatcaattgaaatagcctcttactttaaataaaatatgatgttggtagtatgttattcagcatcttcaaggtggtccatccagattttgttaatctcgttgtaatcgcctaaacctttcattaccgtattaacagtgtaaccttttccttctaatctttctttccaagattgttctgcaggatcagtttcaccagtgttaccattcatatcgttatttgcatgatcaccagcaatagacattaatggagtaatggtaactttggtcgcttttggagaaagtttatccaattcagctagaataccaccaattgaagttgttccagcatcaaaacctataccttcaacagtacccacaaagaagttagcattgattttttgaagctcgctctgaagttttaagtattgagcatccgctgcatgtggagtaccgtgacccataaacaatactggaccttcagtaatttcagtggcaaatttatcagccataatttcagcaacagctttaatatcagcatcgctatctaacaatggacgaccaactttaaccgttacaccttcatatttggctttaaattcagcaattgcctcttctaattcatcaaattcttcacctgggatcacatgtaaagattgtacatcgaatttagaaaaaccatctttaaacatgatttccaatgcttcttctggagtatcattgtcgataattttaccattcaatgatccttcaccattaccttgacgcaatttgttgatgataaggtctgaggtataaccccatttgatagttttatcagcaaatctttttttagctacattgtcaatgttcttgaatgtttcttgtgggtcaggaaaagaagatccaaaagttaccaataggataccatctttgtcacctagggtgttcttgtcatcattgtcgtcgtcactacatccagtgaataccattgctaatgcgcataaagcgatagctgatttcttgattagattcatttttcttttgtttttgttaatttgattttattgataattcccaaaggaattttagcttatttgctaaagtttacattcaatcctacaaagattgttcttcctggatttaaggttccgtaatgtgaaccatagggtctgtcatccacataatcaaacaggttgtcgattcctgcagtgatgcgaattttgaagttctcccatttgttaatgcttaggctcgaggagagtttccatagttggtaagcatcagcataacttctctccaaatcttcttccaaatagaaacgatctgatttgtaaatgccagataaattgatgtttagtttcttcttgttccatctttctgtccaggataatttccaagtggcgctatgttctgatattccatttaatctgatgtcctgtgttaggttctttgcactcacatagctgtagctaccattgaataatagttgagaaaataccggaaagctaaaatgccaatcagcccctatagttcttgcatcatctatattgtaacgctttttggtttcctcaattcctctacgtgcatgatcgtatgtggttggaatgatcttataatcgattttgtcgtagattctattcagatatatatttaggcctgttttaaacttgttggccttaaactcacttgatatagaaaagtagtgtgatttctgagctttcaagtcttcattaccaagatataggcgatacatgcccatgcggttgctttcgtagtaatagtataactcttttaaagtaggacttttaaaaccattagagtaggtgaatctatgagtgaatttagattctttgtacatcatgcttagttttggagttgctgagaatcctgttttatcatggtaaagagctctaagaccagctaccaaatctaattttttacttagcttcatttcatcctgaacatacaaagagtatgtataggcattaactttaggtgtggttaacctgtatcttgcttcaagatattcgcctctaatctcagttccaaagcttagtttgttcttattgttgatgttaaagaccccttttacctgcgaaattacatttaccacatccgaatttttaaatcggtcacccggataataggttttcttaattacatcggtactggtaatataggtttcgttgtatttgtatggatattcagtgtagtacaagtaattgtttacatcaaaattgaaacttaagaagtttttattttttaacttgtattggccaccaaatgaaattgccctgttattgtaatagtaattgtgcatttgtgctctgaaaggaaaatacaaggttttttcgtaccaggacaaatccatatttaaacttaacttttggttcacctcatattctaaaaactggctaatcgtatatgccttacttttatttacaggcttgtagtaggtatgaaccaaaaatggcaaatcgtgattggattcccacttgttattaaacttcatggaattcaattggtatccggctttttgcttgtagttgaaagtagttttgccagatagtttccctttactgaatgtgaaagagttaagctgtttaaaatctccataagcacccaaacgagaactgctgtttgcagatagtttcccttttacttttttggtgatgatattgattactccagctatggcatcggatccgtatagagtagaggaagctccttttaccacctcaatttgctcaatgtctgctgagttgatcctgtttaaatcagcatatccaccaacaccgccagttaatcttttaccattcaaaaggatcaatacatagtctttgcccaaaccattaattttgatattggaacccatggtgcttgtggtataatcaatagaagaggagatacccgaaatgatttcttctacatttctgcccgaaatatcagcaatgtcctgctttgtaatgatttctgtttgaacaggtacattatcaattttgtaatgggttccggtacccgtaacaacgataggagaaatggtaaaagattttggctgcaatccaatattgaaatttttggaagcatttaactcaatttcctggctgaacttttcgtatccaagaacggaaacacaaaggcggtatttgccttttgcaatgttggttaaggaatactgcccactattttgtgtagttgttgtgtttagactatcgagatagacgtaagcaaaatcaattccttccttggtgtttttgttgtacaccttgccatttaggctaaacttttgtgagaatgcagaaaaacatacaacctgcattaacaacatgcaaaaaatcttatgcatagtaaaaacatactaatgcattcctggaatatgtgaggtgaatgaaatcagaaaatatactcaaatcatcattaacttcttttcccggaagcaataattaaacaatatctcctggcaggtttcctgactttctcgattctcaactccttcccatccaaaggacagtggatctcgactgttgagaacaaattaatatccacgggatattaacgagatttacagtagcgggtactgttccggatttacaccggattcccttttaactccttttgctgaatgcaaactgagcaccaaaagctccgcaaatgtattcttttttgttgattataaaatgtagcaattcgttttgtacgtatgttaatcaacatatttggaatcggaaaatgttcattattgcattaagcttttgttaatcagtatttttctaaatctcataattgtcaggtaaattgatgggaagtgattgctttgataggatcatatgttatctaatgaatttagagtcctctcaatggactcatttataatatttatcaaaatccattctaaacattacttttgtactcaattttttcgcaacagatatggttttctgtttgtaagtgattgtgagttaataagttttttgttttaaataatcttggatcaatgaattttcataacaagtctatcatttgggttggttccattattgttattgcgtttgcaataacggcctattttattggtgaaaagatgactcaatccactcgaaagatgagtgtggacttggctttagctaaggcgaataatagcttgctaattgttgaaactgaaattgaaaaaagttgcaggcaagctgaactttttaccgatgcagtagaagaatttgcttatggacaggaaatatcattgattaaggagatactggaatcagatttaattgaaagttcagaaatatctgctcgttggtttattagggtagatgagaatgataatcttagtggaattgttttggaaaaatctgctgattctattctggtaaaatctacttctccaattcatgaaaaaatactttgggatcagctgaaaaatttaaaaggtacggttttaactcagccatacaaaaacgatcatggtaaagaactcatcagcattttaacaccggtaattgtaaactcatacattcacggaatcataggttttgatatagatctgagaaagtttcagcaagtgttctatgataataaatcgctaaggagagcatatgtcagtatcatttcgaaaaatggtatatgtattactcaccctgatgaaaatttgattggaaagcaggtagcaaatcatcaggattcaagtgttatgcacctggctttgcgttcgggagaaaagcaacagaaggaagtaatatcagaatatttaaaccttcctgtaatgagggtatataaaccaattcgaattgcaaatggagatgattattggctgataacggttagtgttcctttgtttaacgtgaaggaatcggttgttgaaatgcgcaatttggtttatctaattggtttggttttagctcttttattgatggtttttctttatttttctcaacgccgttggctttacgagtctaccaaaaggcgaagagcggaaagacgccatttgaatgaggtaagcaaactttcctccattatggagagtaccgatcaaattatgattttttcagtaggacatgattacaagtatactagttttaataccgtgcataaagaagaggtactgaaatttgaaaatgaaatcattaaggaagggaagagtattttggatgcgtactatggagattttcgcatcaaaatgaaaatgtatttggatagggctttaggaggagaacactttttggtagaataccagcgtcatggaatagattatcagcaaatattcaatgccatttcggatgcggatggcaaggtggttggtgtagcaagttttagagtagatataagtgaaaccttacaattgaggaaaaaagcacaggaggaagaagaggagaaggtaaaggctcagttaaagaatatcaaaaatcaaataaatcctcatttcctattcaattccttaaactcactctatgctttggtagatggggagcctaaattggctcgtaaatttattgtgaatttatcaaaggtatatcgatatctgcttgatagtaataacagtaatttgattcagctacaacaggaaatggattttataaagcaatacgtttttttgcaaagaatacgttttggggaaaatctaatattggaatatgatatccccgatgatgcgatgcattataaattgccatctgtaagtattcaatcgctggttgagaatgccatcaaacacaatgttattaccagcgataaaccacttactattcgaataaagcttactaatgacaattgtttgttggttgaaaatccttatcagccacgtaccgatataaatcattcgcctggtacaggattgaaaaaccttgatgccttgtactccttccttggcgatagaaaaccgtattacggcattgagaaggaacactttattgcaatcttgcctttgttttagcaaagtaatttattgcctgtattccgttcataccatttttatagtctttcactccccaatatttcggattcactcctttctttttccttgtgagttcgaaataattcacttttgttccgaattcttgcttggagctgctttggcagtagcaataaagaatgcgaaacaacaaatatgaggaggtcatcaagctttggttgatctctttgaaacaaatcattataaatgaatttaaatacaattacacctactaagtcgattgggaagctgatgataatagcttgcattctggggggcatgcatgctaaatctttagcatcagagatccaatcgatttctcctgaaga

SEQ ID NO: 2229 - DNA, 24167 bp, synthetic construct
  misc_feature 1..24167: note = Synthetic
  source 1..24167: mol_type = other DNA
ggtttatgtattgtttattattaacgtttaataaaagagaccaatttttgaacagcagctgtccagaatttgatcattccctgttcaatttttgatcagcaagggtatcaaatctgaacatgttcacaactgagcctatttttgggctactagagggatggtattggagatacccccaatgtttaagctctcgaactaacttatgatacgttgtccgggagcgtattttagccaatccccttacctgctgactattgatcatcaaattccggggaaaatgcttttgattccacagctcaaaaaaggccaggtataagctacgatgtgatacgccgatgcgatcatcttttgcaaatctccgaagcacggcattaagatgtcttatataatttacctcactcatttcttttgaatttctgtggtaataatcgtcttcacttcccggtatattttctgaaaattcgattccaattcttcctgacttacttcatgtttaggagtaggcagttcttttgaccattggggagctgcgaatttcacttttcgatctttgccatctgagaaggtcacaaactgtcccggtttcaatcgaaagaaaagatctgccctgattttagccacttcacgttcacttttggtagttcgggtatcaaaattcagattatcacttttactcacgctaatactcttacgctttacaatctcaaagaaactttcgtagtatttcgcggtttccggatcattcacctttccgaaaaattggtaagacagattactcagaatagcttttcctgcctccctaccgtagaggatatcattctggatcttatcctggatcacataaacggtcgaaatattatagcttcttagggtggcgggaatacgttgcatattcaacagccggatcgtagaagcctcttccacaagaataaaagatcccaggcgatcatgcacactcatttgtttggtgatactatgaataacggtggcgatgatgggcgaataggccgattcaaattttggattattcactacggagatcactcccggattttctgcattattaatatccaggggaatttcatcttcagaaagcaccataaagatccgttgggtactaatctttttaaaagcattagaaagggtactttttaccgctgcggtctggctttccggctctaccccattaataaaggcattggccatcgcctttgatgtaaaattagaactcaacaattctatcagttcataggtggtacattgttggaatatggcaatcatatgaggaagggtacaataatgaggataatcggtttttagtttccagatcagccctccgatgattccttccgcagcatcattaaaaaacttggaactgcctgaataaccactttcttttttctccaataaattttccagaagcacccttgaaatctcattgacgctttcttcatccagcatataccgcggagcaataggattcactttatgaaatacccgatcaaaagaaatcaggtaaaaagggagcttactttctttaaataaaggataggcaattctggagagttcaaaatttttatagtcatggataattccactaaagctatgacggctaaaatgtttaagaaattgcgccaccacactttcagtctttccacttccagccgcaccgataatggacaccccgcgacgaatatcttttaatttcatggaaccagaagaaagaggcatccgaaaagcatattgtttttccggttttcctgtcccaacctggaataataattcatataggagtgcatttatgatcattaggggcattactatacgcgagcccaccagcactagcatatcaaaatcaaaaccttttgaaaagctaattaataacagggtaaaaatatagccgagattaatcgcatttccccatggcgtatttttaagcgagaagtagaagataatcgctgatccagcgataaaaaaaataaggatatataaattaacaaccataacagataggttttaatagccgatagaactagcttttataccggcttcgattatttttttaagttgtttatatgcaaaccccactttactttggggcagatgcaaagcaggcaattgcattcctgcttgtcggatcattttaaaggcaatttttttctcgttaagcctgagacgccttaaggacaaaaagtattgtttaggatttttactcagtagttttcgcgctgagtagctttccacataatttcgattgtacttaaacatcttatcaaaagccatttccgaatgctgaaaaaaccgatcccgttcaaatccccgtttcaccaatttcccatgcatctttacttcggaagccttatacttactccccggagacaagctataggagttggaggcatctttacgacttacgataatatggatatggctttgcaggccttcctttttcattcccggttccaccatctgtcccctaatcttatagggagcctcccggatcagcttttgaatctcattctcaattttttgagtatttccggaaatctctccgcgtgctacttttcgaagctcatttttaagatgtgctatttgttttgcatagggtttattctcccgaatggcaatatcattagtcttgtaagatcgttcctgttcaattttcgcgaaatacttaatatcatcaatagaaaccgggcgaccgtttatttcccgatgaaaagaactcgcatattctttcatggcttcccgaacaaaagctttaagtttttcaggattgctgtgaatatgttgtaattcataacggctgggattaatagtaatcgaataatatttaggctctttcaactttagtttatctgtattcccatcaatctctttaatcacctggaaaggtttgatcccatcctcgtgctgattaaagaaaaactctttttccgatagatcttttccctggttttctttttccagatagttcacaaaatcccctgcactttgagaaaaagcgccaccaagtttttgaggggagatggtgatatacatatcaaaagcttcttaagatttccgtttaatggctattttaaattgttcaaattccgttctggggatatttaatttcagataatccgctccaaaggcgttgcctttaatttccacttgttgaagcaggtattccaaatctttctgggtggcttttaaggcctcctgcaaccgggagatttccaattccaattgttcccggctttgctcacccgttgcagtttttttatttttttctttgattgatgctgctggtaagttgcgaccttccaataataattccagcatcaggaatcccggttttgtttgggtcttttcaatatttttcaggatagcgatcaccgcatcaattcttttcttgataagttgttcaaggctcactttggagggcactagagtttcaaaaggcgagaggttatttttctcaaaaaagtctaggatcaaatccaaagtttgggactgattcgagttatttttctttgaaaactcccgaaacctattcgcggtatgagctttcacttgaagtctggattttgcggtcatggctactctttttagttttagtggctatcctcttcctgtattttcgggggttttaagagtattgtatccattggggtggctacttttctgctttaaaattttccaacacaccgaaaaacgggcttttgacgcctaataaatcgaacaacaccgtgaaacgtgttaccctcttgctattcgatttcgtcccgaacacgggacaaaattttcatacgtattggtttgcaccaagcgcattcttggaatagcattgaaaaattccccggccaattatgatccggggaatacaaaaaaagtgaaagtcaaatctgaagattaatgctgccgacaaaaaaacaggatatcaacactttaatttacaaaatatataaattcatataacatgaattcaacatttgatttactatgaattggtgctatttgtagtaaaatcagggaaatctgagaaattcaaaaaattacggcggcagattttcagtgttcagcaagcaatacccgatcaaaattgaacatcaattcaagaatttcaattcatcaaaatacctcaaaaagatcaattgttttttcaaaaagatttactcttatgtccagtaccttttacttttttaatgcaccatcttttataacatcctaattgataaaatttaaaaagtgaaggcttctgaagtgcaagatcttttccaaaggactatcaaaatttcctatgaagatcggatatctataagaagtagaattttgatcaagcggacgtcatcaaaaaatttctaatgcaatgtagcctttcgatttttcatcggggagcgcaatggaggtctaaatttcttcgatggggtccaagttttttatagtgaagcgcttttcccgaaatgaagcttttgcgaaatgtagtgggaatgtgctgcccccctccaggtttattgtttttaatagatccggcataataactagaaacttagttattttaatagtaaatcttacgcttataaaaactaaaattttagttttgttgcacctaatcattatttcgttaatttgtattagcctacaaaaatggaataattcaaaaagggagctttacggctccctttatttttcttaagtaatttagtattataaaattccttcatccgcaaaactcaggtaatttccttcgctgttaatgatcaggtgatccagtagtttaatatccagaaaatcacaagctttttgaattttggaggtcagttttttatcgacctgactggcctgtaatttcccggaggggtgattatggcaaacaataatcgcggtggaaagacttttcagaattagtgcaaacataattcgtatatctactaaggtcgcgttaattcccccggtggagatctgacaaatccctttaacgatattagaattattaaggagcattactttaaaagattcctgtagttgaatttcatttttatcccaattcgaatagtaaatattcgctgcatcctggcagcaggtaattttgggacagttagaaattgttatccggtctttgtaacatagttttatttcgttaactttcataatgataagttttaatattaggggtgtacattctggttaggatacaccccttttttaatgatattgattaaatttatagatctaagctttaggcttaagattatctctcataaaacaaggattagaaagacttcttgtccttgtttttctaagccttttattaatccttactacctaagagtagaatttcactgactaaaatttcggtcacatagcgtttattaccttccttatcttcgtaggatctggaaatcagtttcccctcgatagcaatttcctttccttttggcacatagttttcgataagctcggcctgtttattccaagcaacaaggctatgccattgggtatcctgaacggattcccctttttggtttctgtaatggtcattggtagcaagacttaaacgcgccacttttttggaggattcaagattggtaatttcaggagtgtttcccacatttccgatgaactgaactttgtttctaatagtactcataataaaaagatttaggagtctaccccaaggcagacggttacacataaattgaactagtttgaaaaaaatgatttacttattatatccggaagcgtttttctttcttttgattttttagttttctttccgaatagatatgtagctgttgatttcatattgaacttttttgatttacttcccatagtgccgtatagctgttatctttttttgatgcttacacgattcaatattttggattgataagtacttataaaagcgagtgtagtgagcggcttatgcagtgcggttcaactccaaaatattggtgttttgcaacccaaaaaaagaacgctaagggcaactgaagtgaattaaaaaccgggtaggaagaaacagtaacatagacggaagtgaaattaaatggaattgaagcattcctatattaaatctcattacataatactaaaattctaatcctgtaagaatcatcgaaaaaacagagataagaccgtaaagaattgataataaaataaatacttatctttagagaagcacctccactttttataacactgtagtcttagtcattgggtatggaactcactttccttcttatcatttttatggtctttttcgtaggttctgactttgtcatgaatgtggccattccaagaatgaaaggaaattatggagaaagaagagttgccgcaaaacttcgaagacttcataaaagggattatattgtgctaaacaatattcttctacaaactggggatagcagttcccaaatagaccatatcgttatttgttcttcaggtatttttgtcattgaaacaaaacattataaaggttggattcacggacatcaaaaatctgattattggagccagaccattttcaagcatcataccaagtttaaaaatcccattcgacaaaattggactcatgtatttgctttaaaaaagtttcatccgaactttcagaaactaaaatactatcctattgttgttttttctggacgtgcccgtttgagaaatgtaacgtcagaactgcctgtattatatcggtggcaacttatacgatacattagaacagaaaataatcagaatcgattatcaccagaccaaaggctatggatcgcagaaaccattaaatccaaaaatttaaaaagaagaaaagatcggaaaaatcataaccgcaaggttaaaagggggattaaagaccgtaaaatcaaggcacatttaaacatctgtccaaggtgtcaaggtgatttattgttaaaagaagggcgctatggtaacttctacgggtgttctaattaccccaactgcacttacaccaaaagccttagatcgtagttgattttcaatgaccaagcctaaatatttctgttcatcataattccagttgtcttcatccttcatacctcaatgcctaaaaaaagggaaggtttttgttgtatatgctgcctgcatttagtgagtgccattgagacctcaccttacgggtgtacaagcaccctcatttttaattttaatccacgataagttcaattccggctttttcggccttgtattttattttggtcatcagctcataataattccaattccttaaaacaaatccgtcttctttggcgatttccattttatcttcctgatttaataaaataagtgtcccggcttcatgtttaatacaaaaatcaataagctttcggctgtatacatgcaagcggttactaacatagtttttttctttttcgtgaaatctctctactgcttttgttttgcgtttacgaccttttcctgatctacaataggcagtagcattttgcgccctttttaaagcagcctgtatggctagtcttctatataaaaactcttcccgactgccgatactaagtgttgcttttctggattttactataataggatgttcaagggataaggaagcttctgcaatgacttctggttttaggttatgcttttctttcgcgacttcaaatacggccaaccaataaatttttcctttattcaactgaattttagaagtacatagctttatgtttccggctactacctgttccagcaagcttcgtttatcagtataatcctttcctaaataggttttaaaagggatggaaaatagacgaaagcaaaatgcttttttttcttttttataggataatccatgaatacctatcgttccaaatggaaaaggaatatcccttctaaaatttgcaagcgagcgctctcccctcctatattgtaccaagtttttactaaaattattcatgatattataattcatattggctaaaatgttggttgggacctcacctttaaaacgatcagataccacccggtaggtacaattgctctttgaacgattgagtatgccgtcttcagcttttttttcatccaccagcctatatcttataccttccgataaataaaaaaagtccttaatcatttcctgaatatactggtgggtaacaataaggttacccgccctatagcttcggttttgccaacggtatagggtatcaagagcctcttttctttcttctttgttaggcgcatccaccagtagctggatctttcgggtgagttttatagtttcttttcccatgattaagcagattgttgttgtttatgtttgctttgtaaaagcttataagcagtcataaattccttgtggacttccttttgggatagttgcaattcttctgcaatagccgcaaaagaatagtgcatttcattccgtagctgtaagactttttcttgttccctggttattctagtatttttctttacttgaatttgatcaggttttgaacccaaattgctcccttggtgaataatctttttaatatcgtcaatcgctctttttacctcattgctggtataggtagtgcttgttcccataagctcagcaatatttttatactgaaaaccgtattttaagcagagttcaattagatatcttctttccggcctgagtaaaggaaaaacacactttattcggtcaagagctttttggttggcttcctgatcttttagatgctcatcttctgactccgggtcatagccatgtatatattcctggtagttctcgtaattatccaagctgttgatgttccggtgaaaattattcctgggtcggatatagtaatagctacaatcccgtttcatcacatgaagaaggaagtagagcatatgtttaggatcttctatatgatctcttttctcccataattttaggaacgtatcctgaagaatgctctcaataacaaattcatccttaattaactgcttccccatccaaaagagcttatgctgatatcgggcataaataaactccatggcatcaggatgcccttcttttaaaagtttaaactcacgttccatagccaacagtttttaatgttggatgggattttcgaataggtactgtactaataaatagtaagagtatagcggtgtggagtatagttttcataatttgctgtggttttggttgtctttaattagtttatgaaaccataggccttcccgaaaaagccgttaaacttagggaaaggcttatgcttgagggaaggctttctggcttctagcctagactaaatggctaattcattaaacggtggtttgtttcttcttataggtttggttttaaatctcaaagaattttacatgataaattcaattatgaaattatggtttaacgtaaaaggctgtacttgtagttgttggataaagatataaataatttcttttttgttgtaatatacaccaacaatatttttgatttttttactcatcttaggtgtagaaagggctaagatgcaaaacgagaaagataaagttgattttttaatccaatttggttctaattttggtaaaattagaaaaatgaaaaacttaagttttagggctctttcccaaaaatgtgatttagactacgctgatcttaataaaattgagaaaggaaaaaggaatattactcttactactatagctgaactagcaagaggactcaatgtacatcctaaagaattattcgattttgatttcacgccttaattatggcataaaaattattgaataatattaaagcaatcttgagtaacaattttaaaatcccgcctaccccttcatctaaaaatcaaaatctccttctagttcttaaaatataactgctataaaaaaggtgacaaaaatgaatctgccaccttgaatgttttcacaacggaataatccttattgtgaattgctttcagaattataaaccaaatatacaaaacttttctaaaggcatttatgggaaaccgtaatccaactaaaaattttattgttaaatttaaaatgttaaaaaattaagagaatgaaaagaattcttggattggatttgggtacgaactccattggctgggcattggtaaatgaagcagaaaacgaaaaagaaatttcaaaaatcataaagcttggggtacgcgttaatcccttgacaattgatgaaaaaaccaattttgaaaaaggtcgcccgttatcaaccaatgcagaccggacattaaaacgaggagctcgccgtaatttgcaacgctataaattaagaagagaaaatcttattgaaattctaatagataatcacattattactaaagagacgccgcttaccgaaataggaaaaggcacaacataccaaacactctctttaagagctaaggctgtaagagagcgaattgatttagaagattttgcaaaagtccttttagccatcaataaaaaaagggggtataaaagtagtagaaaggctagtaatgatgaagaaggacaagcaattgatggaatggcaatagcaaaagaactctacgagcgaggtattacaccaggacaatacgttcttgaattgcttgaaaatgatagaaaatatatcccggatttttatcgctcagatttaaaacaagaattcaataagatttggaacaatcaaaaaacattttaccctgaaattttaacggatgaattatttaaagaattagatggcaaaaataaatctcaaacttgggcgatttgccaaaaaccttttaatataaagggaatcaagcgtattacaaaaggaagagaaaaaactatcgaaaactatcattggagagtaaaaggattgtcgggtaagttaaatttagaaaaactagccattatcttacaagaaatcaacaacgatataaatcaatcaagtggttatttagggggtatttcagataaaagtaaaaagctataccttaataaagaaactgtaggagaattcctttataaacaaatagcaaaaaatccgcacacctcactcaaaaatcaggttttctatcgtcatgactatttagatgaatttgaacaaatttggaaaacccaatcaaatttcaatgccaatttaacagatgaattaaaacaagaaataagagatgttattattttctatcaacgcaaaataaaatctcaaaaatcactgataagcttctgccagtttgaaagttgggaacaagaatattttgataaagaaacagggaaaactaaaacaagaaccgtgggtagacgtgttatccctaaatcttcacccctatttcaagaattcaagatatggcagaatctaaatcatttagtatttacaaatagtgaaaccgatgaaaagattgaaattaaagaagtggaacaagaaatacgaaaagaacttttcgaggaactgaatctacggggagacttaaacccaaatgatctccttaaaatcttaagatctcaattcaaaattggtaagctaagtaattggaaatgcaattttgaaaagattgaagggaatagaacaaatgcggcacttttcaatatctatcaaaaaatatcagattttgaaggctatggaattgattggaataaatcaaacgcaaaaaaaattagaaaggaattaaaagctacttttcccgaaataggaatagatgcttctattttagaatttgatgcttacaaaaaacaacttaccaaccaatccagctatgaattgtggcatttattatattcggctgaagaagattttaaaatttccgaacaggataaattaatatacggaaattctagtgtttcattaaagaaaaagcttcacctaaagtttggcttcaatccagaatatgcaaaaatgctggctaatttatctctgatgtcggactacggaaacttatctgctaaggccattaaaaaaattctcccttatttagaagatggtcatctatattctgaagcttgtaggttagccggttataatcattctaaaagtttgacagcagaagagttagaaaaatttgagccaaaagctaaactcgatttacttaaaaagaatagtcttcgcaatcctgttgtcgagaaaattttaaaccaaatggtgaacgtcgtaaatcaagttattgatacctatggaaaaccagatggcgttaggatagaattagctagagaattgaaaaaatcagcaaaagaaagagctgaaatgactaaagggattgcagatggtactagaagaaatgaggaaatcaaaaagatcataactcaaaaatttggaatcccaaatcctacgaagtcagatttagtacgttatcgactatggcaggaactagaatctagagggtataaagacatatttaccgacaaatatataagcccagataaaatattttcaagcgaaatagatatagagcatatcattccaaaagcattgctttttgatgactcattttcaaataaaacattatcctttaggaatgttaacctaaaaaaagcaaaccgtactgctttagactttatcacacaagattatcagtcaaatgtagaagcatacaaagaacgtgtggaaacttggaataaggataaccatatttcaaaaggcaagagaaataaactactaatgtctctcaaagatattcctgatggatttatagagcgtgatctaagaaatagccaatatatagcccgcaaagcgaaaaggatgctttatgaagtattcccaaatgaagttttagctacttctggaagtattaccgataagttaagaagtgactgggatttaatcaatgtaatgaaagagttgaacctgcccaaatataaagcactggggttaacggaatatgaagaacggcttgataagggaacggaagaactatttaaacacgaagtaataaaagattggacaaaacgtaatgaccacaggcatcacgctatggatgcattagcagttgctttcaccacacataatcatattcaatatataaataacctcaatgccagaaaggatattactcaggacaatcatcctattataaaaaatattgaaaatcttattacagaggtaaattcaaaaggaaaacgtgttttcaaagcacctatgagtagttttcgtgaaagcgcaaaagaacaaattgaagctatactagtaagttttaaaaataaaaataaggttgtaactaaaaatataaaccaaactaaaaaagaaggaggatttaattaccaaaatgccaaaactcccagaggtcaattgcacaaagagaccatatatggaaagtcaaaacaaccactagaaaaacctgtaaaaataaataataggttttgcaagaagcaggtaggtttaataattaattttaaagagcaagaagctgtattgcaccaccttaaaaaatacgataataacgaaaaaatagcctttagcaataaaacccttaaaagtgatcctatccaagttaatggaagtcctcttagagaagtgaagatttttgaagagatcttcacgattcgtaaagatataaatccagataattttaaaactcaaaaacatctagataaaattattgataaaggcattaaagaggtaatgaagaagcgtttagaagaatacaatggtgactttaaaacagctttttcagatttagataaaaatcctatttggttaaatcaatctaaaggcataaccatcaaaagagctacaatttcaggagttaccaatgcagaacctttacatcaagccaaagatcatttaggaaatataattttggacgataacggaaaagaaattcctattgattatgtaagtacaggtaataatcatcatgtagccatttatcaagatgagagtggtaatcttcaagaagaagtagtttctttttatgaggctgttatacgtaaaaatcaagaccagccaattataaaaaaacggcatccaaaagggtggaaatttttgttcacgatgaagcaaaacgaaatgtttgttttttcttcagaaaattttaatccgagtgagattgatctattggatgaaaaaaatgctgctattataagccctaacttatttagggttcaaaaaattgcaacaaaaaattatatgtttaggcatcacctagaaacagaggtcaccaataatttagattttacgtatagacatttccaagcaaccgaatggctaagaaatttgtgtaaagttagaatagatcatattggcagaattgtacaaataggagaatattaaaaagtaatgattaaacgcacgttgtttttcggtaatccggcttatttaagtaccaaaaatgagcaattagtagttaattttcctgaagaggaaaagcaagaaaaaacaatccctattgaagatttgggctttgtagtattagaaaatcaacaaattaccctaaccagtggtttgctaatgaagcttgtgcaaaataaaacggccgtcatcacctgcgataaacaacacctgccctgctctttgttacaacccttagtagggcataccgaacaaacagtgcgctaccggcatcaattggatgccagcattcccctaaaaaaacaattgtggcaacaaacagtagcttcaaaaattagcaatcaagctgcccatttaaagtttttaggcaaatacagtctaaaactggaacgctggagtaaagaggtaaaaagcggagatacccaaaatcacgaagccattgctgctgcccattattttcagaatcttttcgatattaaaggttttagccgaaatcaaaaaggcattcctcctaacaatctattaaactatggttatgctattttaagggctgttgcagcaagagcactggtagctagcggtatgcttccttcgattgggatttttcatcataacaaatacaatccgttttctttagctgatgatgttatggaaccttatcgcccttacgtagatcttatggtcaatcagatcgtaaacaccggagcaaatcttgaagaattaaatacgaatattaaatctgagcttttaacaatacctgctatggatgtgagtatcgatggcaaaaaaagtccgttaatgaatgcgatgagccgtactactaatagtttatacgaatgtttttatggaagtagccggaaaatattataccccgagttcggttagccgtagcggtggctgagtgattgtgacgaaggaacaattgtatcgaagccatagcagatgaaaaagcgaagttaatgataaaaggatatacctatattttatgttgcaatgatggaagttactatactggtagtaccaaagatcttgaaaaaagattaagtgagcataataatggaacgggagctaattatacggctaaacggttaccggttactttactttattacgaagaatatagcagaattgatcaggcattttacagagagaaacaactacaaggttggagcagaaagaaaaaggaagccttaatgagtggagcaagcgaattgttaccgggattagcaaaaaagatttacataaagaaaaatagttaaccggccggacacttcgatacgtttgctcaatgcaaacactccgtgacctacatagcagcggcggctgagtgattgcgacaaaggagcaattatatcgaagccaaagcgaaaccggacacttcgatacgattttttcaaaatcactcagtgacctaagatagagtggcgactgagtgaaattcggtagaatcgaagccaaagcggatttaaataaataataaataaactaaaaacgatgcttgaaagccgtttttccagattaaaccaatatcgatgtatgtgggttcttgttttttttgatctaccaactgaaactcgtagtgaacgtaaagcagctacacgttttaggaaacaattattggatgatggctttgggatgtttcaattttctatttattccaggttctgcgccagtcgggaaaatgccgcggtacatataaaaagaacaaaaaacaatcttccaaaaaaaggaaaagtcgcagtaatgcagattaccgataaacagtttggaatgatagaactttttcatggtcagaaagaaactcttccagagattccggaccagcaattagaacttttttaaatgctaggattcatattgctagaatttaaccttatttaaaaagataaaagacctgctttttttaattctaaaaaagcatttaaaacacaggataccaggtttttaaacctggtatcctgtgaatccagtactaaaagtacaattctgaaagcaattcacaaccactaatttccgccaattcacacaacatcgcctgtgaatccagtactaaaagtacaattctgaaagcaattcacaactataccgcccattacggaatctaataacatcctgtgaatccagtactaaaagtacaattctgaaagcaattcacaacagggtaaaagatattaatacaaaaaactggcctgtgaatccagtactaaaagtacaattctgaaagcaattcacaaccggaaggagcaagtaaaacggctgcatcaacctgtgaatccagtactaaaagtacaattctgaaagcaattcacaacttctttagtgatatacatgttaccagcaatcctgtgaatccagtactaaaagtacaattctgaaagcaattcacaacacgggatttacgaagttcagcttaccgtgacctgtgaatccagtactaaaagtacaattctgaaagcaattcacaactaggcactcccattgctttgcatatgttccctgtgaatccagtactaaaagtacaattctgaaagcaattcacaacaagccctttataaaacttacctcccgaagcctgtgaatccagtactaaaagtacaattctgaaagcaattcacaactttgagaaaggtctttgtttaattctcttcctgtgaatccagtactaaaagtacaattctgaaagcaattcacaacttactatgaaccgttccatagcatccgggacctgtgaatccagtactaaaagtacaattctgaaagcaattcacaactaggttttcatccaaacacttacgagcatcctgtgaatccagtactaaaagtacaattctgaaagcaattcacaaccaagccagaccaatccaatgatgatgaggacctgtgaatccagtactaaaagtacaattctgaaagcaattcacaacaagggatgctgttgtacagaaagctttggtcctgtgaatccagtactaaaagtacaattctgaaagcaattcacaacattatcatattcatattcacctttcctgtgaatccagtactaaaagtacaattctgaaagcaattcacaacattatcatattcatattcatattcacctttcctgtgaatccagtactaaaagtacaattctgaaagcaattcacaactagaaagcgttgagaaatggagagtgatatcctgtgaatccagtactaaaagtacaattctgaaagcaattcacaacacctagagacccgatgtttgagcgtttcggcctgtgaatccagtactaaaagtacaattctgaaagcaattcacaacttatactccttttgctaatatctctatctccctgtgaatccagtactaaaagtacaattctgaaagcaattcacaactactaattcatcttagtgacagcaatagcccctgtgaatccagtactaaaagtacaattctgaaagcaattcacaactacccgacctgagccaaaattcagatgatccctgtgaatccagtactaaaagtacaattctgaaagcaattcacaactaaactatcgaagggcccgggatggactacctgtgaatccagtactaaaagtacaattctgaaagcaattcacaaccagattttgatagaagtctaaaaattgtagcctgtgaatccagtactaaaagtacaattctgaaagcaattcacaactcaatccctttatccttacgcgggtttgatcctgtgaatccagtactaaaagtacaattctgaaagcaattcacaacgcaacctgagctgcaaaaccaataagtaaacctgtgaatccagtactaaaagtacaattctgaaagcaattcacaaccggtaaaaaagcaaaaagaatatttcaatgcctgtgaatccagtactaaaagtacaattctgaaagcaattcacaacaggcagtccaacgcccatcttagtagcatccctgtgaatccagtactaaaagtacaattctgaaagcaattcacaaccaaagctgaatatacttatcgatgatcgtgcctgtgaatccagtactaaaagtacaattctgaaagcaattcacaactgtctcttagggctagagcatggaaattcacaacaacataccacggatcaatctcaaaagttgggtgtataagttacaataaaaaagcctttcatttctgaaaggctttttgcaatcttgcggtctggacgagactcgaactcgcgaccccctgcgtgacaggcaggtattctaaccaactgaactaccagaccgttgcgttattgcgagggcaaatatactgcagtttttcaatcacacaaactttttttctcctttttttaatctttttttgaccttgttaagcaagcttttgtctttcaacaaaataggattgcaaaatttgattaaaatttttgttgatatctacgggaacataactaatacggtactttgcacattccaactttagatttttaaagtaattttcgatcgcatttttataattttcctgaatattttctgaatacaaatcgatttcatccccggtttctacatcaaaaaatcgttttggggtattcgaaaaaccaaaacctaactctttttcactatctaaaacatgaaataaaaccacctcatgcttattatattttaaatgacgtaaggcttcaaagagtgctgtttcctccttatcgctttgaaacatatcagtaaataaaaatactaaagaccttctgtttaatttctctgcaatctggtgcagataagtgtaagtctgcgttcctttttttgttccctcagcatttaccgcattttctaaggcattaagtagtaaatgatgatgccgttccccggctctttccggtgcataaaattcaaattcgtcactataaacacttaaacccactgcatcgcgctgtcgctttagcatattcataatacaggccgaggccagcgccgaaaaaccaattttattcaattttaagagactttgtttcttaagggaagggtaatgcatggaagccgaattatcgatgattaaatggcatcttaaattggtttcctcttcatatcgcttggtatacagtttatcggtcttggcataaagcttccaatcgatatgcttggtactttctccctgattgtaaattttatgctcagcaaattccgcagaaaaaccgtgaaacggactcttatgcatcccggaaatatagccttctacaatttgccgggccagaatttcaagatttagaaatccctccgtttgatgtacctcttgctgtagtttcaaattaaaaagttttgttgctggaagatacgaaaacgagttgaaagtttatagcctacctttagcaataagtagtgagtagtgagcagtgagcagtgagtagtgagtagtgaatggtgaacagaaaaattttcagtgaaaagcaattcagaattcaacattttataataattatcttgtctcttttctatattctatgttctaacagccaagcgatttctatactaactaataaattcaaaaaagatttctccgcaaggtcgaaatgacgatagcgttcaaagttgaaaagtttaaggtttaaaagtcgctgtatcacgaagtctgttttcagtatacagtttacatcaaagctttcagcgcaaaaaaattcaacattcaacattaaaatttcaacactttctcatggctcttgattcctgatactataatctatattctaacagccaagtgatctcgatactaactaataaattcaaaaaagatctctccgcagggtcgaaatgacgatagcgttcaaagttgaaaagtttaaggtttaaaagttgctgtgtcaagaagtctgttttcaatatacagcttatagtatacagtttacatcatgaccttgcctgaataaggttgccttttttcaagttaataatttattttaaatactggtctttgttcagtagctaagcgctgaacaaagtttaaaaattcttgtggtttcctatttttcagtgaaccatgtggccgctcaaaattatataaataaatggcctcttctaccaacttttgagcttgtttaagtgatatattcatattttcgaaattgatatactcattcttaagtatcccatttatagactctgcatgggcattctcccaggctttccctcccatgctaggggtggttgaatagtgcttatggagttgttccattttgtctgaaccatactggctgcccctgtctgaatgaaaaataagttttttgcgttcttgattgtctagacctgctacagccatcttaaaggctggaacaacggtgtcctctgtggtcatgttggccgataagctccatcctgtaatcattcggctataaacatctagcaccagggtaagatagtaatggcatcctatataaaccgatatataagttatgtcactcaccaagagcctgttttctttctttattgtagtgccacttatcaggtttggataccaccgcttacctgcataggtcgtacggtgatggctttttatacgtgctaccctaaatccattggcgagaaggattgcttcaaacctatccctgcctatcctctcgggcttgatctgatcataaagcttgcgacaccccatattcctatgtttcttacggatttcttgagcagatgcaattacttcctgagcaatccctgacaagtgagcctgttgtttaacccgcttatagtgagcctgcttggttatccctagcatgttatataatgctgtcatggaaccattaaaacttgacttgttcattcggaaatattctaggacagccgtttgttctttttttcgatatcctccccagaacgttccgaagcaaattcaacgaccttctccaggtaatcaattcgcatctgtttctgaccaagggcttgctcaagtttcttgatctgatcttgcagttctttgttctttttgctcatacttttttgttccactataaccctggtttcgctgcggtaaagatcggaatattttctgagccatttgtaaacggcggtacgactcactccgtaaacattggtgacatccaaaccccggaggtcaccctgttcgatttttttcactaaatcaagttttagctcaacactaaaaacccggcgttgtttacctttttccattgtttaaaagtttaagaaaaagggcaacttatttcagtcttagtcatcaaagcttttagcacaaaaaattcaacattcaacattaaaaattaatagttctgcttcaattccgctgtcatttcgagcgcaatggaatgaagccgagaaatctcaaccaaataaaaggtttctccagtttaccactatggcttcgatacgattgctccttcgttgcaatcactcagccgtcgctaaatacttcaaggttcaaaagatgttgtatcgagaagctttctttagtacattatacagtataaagccattcaacattcaacattaaaatttcaacactttctcatggttcttgaatcctgattctctactctatattctaaaagacaagtgatctcgatactaaccaataactactaaattcaaaaaacaaaaaacccggcaaaagccgggttccgtattattcaaaaatcgttttgattataaaagctcgtttaaagcatcagcatatgtgtttttaggagcaacacctacctgacgtcctactacttctccgttttggaaaataagtacggtagggatatttctaactccgtatttagcagcaaactcctgattggcatctacatcaagttttcctaccactgcttttccttcatactcaccgctaagctcttcgattaccggtcctaccattctacaaggcccgcaccatgctgcccaaaaatctaccattaccggtttatcactttttaaaactgtttcttcaaagtttgcgtctgttatttcaatagccataatcgttatttttctagtaatttaaaatcaatacgtaaaagtagtcatttattttcggaaaccttacatccccaatattggatttcgttatacgctgattgtcaataattatctggcgggctctttcccttcgattacatcttcgggaatgaccgggcttttcgcgctacacggtagcttgctgcaatccctgcccgattgttacaggcttgcattaatttaacttataaaccacctgctgcgcttccaggttttccagtaattccggacaaatttttactttttggcgcttgctgggcatatgtagctttaattgctctttcatttcatataccacaaaattcagtttatgatccccgcgataacttctaaaaatatcttttaaaacctcgattttctcgtccttgagttcgttgatatctaattgaatcgtaagttttttggcataagtatccatgatatcatgcaacaactggaaactattaaactgaatcctgggttctccttttttgcccgtatctttattggtccagccttctttgataaaagctttaatatgcacaaatgaattaggcactaaaaaatgccggtttttaagatactcttccccaaacattctaaattcgtaagattcgttataatcttctaccgtaaacatcgcccagccttttcccattttagacatcctgtgttgcacatcactaataaccccaccaaaagagatctcacgatttaccactttttcaagcgctctaaaatctgataaactaccgttacagaaatactggatttctttcttaaaatcatctagcgggtgcccggaaatataaatccctaccacttctttctctcgtcgtaatttctccatcgttccccattcttcacagggtggcacactgggctccggaatttgaacttcgctggcttcaccaaataaactaacctgagatgaattctcattttcctgaaatttagccgcaaatttcaccactttctccaaaaaactcataccatctccttcatcatgaaaatattgcgcccggtgggtttctttaaaacaatcaaaacctcctgccagggcaaggttttcaaaagcttttttattcgcagctcttaaatcgatacgcttagccatatcgaatatcgaacggtatggcccggcttccccttttcggttttctacgattgtggctaccgcaccggcaccaacccctttaatcgctcccattccaaatcgaaccgcataatctttatttaccgagaatttatagtaagattcatttacatctggaccaagtacattaagcttcattcgcttacattcttccataaagaaggtcacctgcttaatatcattcatattattggataatactgccgccatatattccgcaggataatgtgcttttaaataggcggtttggtaagcaatccaggcataacaggtagaatgcgacttgttaaatgcatacgaagcaaaagcttcccagtctttccagattttctctaaaacttcagtagggtgtcctttagcttccccacctccaataaatttcggttttaattgcgctaaaagggctactaattttttacccatcgctttacgaagcatatcggcttcacctttggtaaacccagccagtttttgcgagagtaacatcacctgctcctgatagaccgtaattccatacgtctcttttagatattcttccatatccggaaggtcatagctaatctcctcgtccccatgctttctggcaataaagcttggaatatactccattggcccagggcgatataatgcattcatcgcaattaaatcgtcaaaaaccgttggttttaaggcctgcatgtgtttctgcattccgggagattcatactgaaatatccctaccgtttccccacgttggaaaagtttataggtctcttcatcatccagcggaaactcatcaggaacaaggtcaatattgtgtctgcctttaacgattttgatggtatccttgatcagggttaatgtttttaaccccagaaagtccattt

SEQ ID NO: 2230 - DNA, 24167 bp, synthetic construct
  source 1..24167: mol_type = other DNA
  misc_feature 1..24167: note = Synthetic
tatacatgtgcattaattactggagcaccattttttaaagttattgtacctgtaatagtgctggtttgtgagtatactagagcagaaaataaaaagaaaacaaagctaaaaaaacgaatcatttattatgtttgaggcgttaaaacgctgcaaagttaagtctatttagaattaatccaaataaaaactaaacataataattgatttttgtatctgtgatttttttaactgtttattagttgatttgttagttatagatactataaaatagggagttcttataaaattaatgtttttataagtatagtaaaaagtgggagtgaattatctgtttaaatatttcaacttattgagcttatcaagtaattttatagctctatattcagaaatgtcactggttgcagaatctgtttgacgtaagttgtaggcttgttcaataagttgcttgtagcgaatttgcaactttagctggtgcttttttattttggataaatctttcattcctacagctttagagtattaaatatattcaaaaaaaagttaatcggcaacttaaagtttaaaattgttaataaaaaaatcgaccctaggagcaggtcgatttttcaaactaacttttctaatttaattttagtgaaggatattctcttttgctaacactgcaaagatgcggcttaatctaaagactaatgttatgttaatattaggtttggattaagaatcatttaataaatttaaaagaactaaaactctcactatgaaacaactactgctttttttaatacttgtcttttctccggtttatataaacgcacaaaacaatgcgtgtaattgctgtaccgaaaagcatacagagtttgatttttggattggtaattgggaagtgacaaaacctgatggaacacctgctggcacaaatgttatagataaaatacaagacaattgtattttacgagaaaactggacaagtgcaacaaaagggtatacaggtactagcaataacttttataacactacagccaaacaatgggaacaactttggattgataaccaaggacagagtttgcacttaaaagggaatagggtaggaaaccaaatgattttaaaatcggatgttgctacaaacaaagctggtcaaccttattaccatcgtgtgacttggactgctaatgacgacggaaccgttaggcaattatgggaaactattaccaatgacaattcagtaaccgttgcttttgatggtttgtataaaaaggtaaaataagtgctttaagaattgcttagtcttgtaaagcgaatacttttttaagcaaatcagttgtacgtgatgacactttatttctgatttctttttcctcaacagcaatcattgtgtaaacaccttttagtgcttcgcctgtaacataatcggttaaatcagggtttacgttattagtaaaaggaatactgttgtatttattaataagatttgcccaaatttggtcagcaccaactttagtaaacgaattattaattacagggtgaaacttgtcgtacaatgcagtttgggttttacctgttagatattgagtagcagcatcgtcattaccaagtaaaatgtttttagcgtcattaaaggtaatgtctttaactgcactcacaaaaataggagttgcttcgctaaccgcatcttcagcagctctgtttaatacttttaagccttcatcagcaagattatctaaaccaatatcacgtaaggctttatctactttttgaagttcttcaggtaatacaatttttaccaactcatttttgaaaaaaccgtctttttgagtcaatttacttacttgtttgtcgataccttggtctagcgcttctcgtaatccagatgcgatatcagcattactaagtacactgccatcttgaggaagttggtcaattacgttttgtaattcggcacaagagttaagagtaaaaattgcaagtaaaacaaaaagtgactttttcataggtgtgatttttggtcaaatttacaaaagcagttttttataatacaagtattattgaaaatattaacataccaaatatttagtagtcatttaattaaaatgaaaaaatataattaaaacactattttagcacaatagttgttatgacactagtgttatattgttacttactatgaaaattgattatttatttaaaccttttttactcgcttttgttttcttaccattttttggttttgggcaaataaatgtttcagaaaaagttcaactctcaaaatcggcaaagagttctgaaaatacactgtattttattgatttttgggcaacttggtgtggaccatgtgtgtatgctaaagagtatttgggcgtgcttcaaaagcaataccctaatgatttttatgtggtttctatttcgcaagaaaaccctgaattggttaggaaatatctaaaaaaacgtccaactgatttagcagtttttgtggattatgaaggagaaacatttaaaactcataatataaagctattgcctcacggaattcttatgaatgcagatggagatgtgttgtgggaaggtagtcctgccgattttaaagcatctgatttaacaaggtttttacgtagtaacacaaagaaaaagcatatagacaagttctttaaggaaaaaaatattaaagttgaaaaagtagacgctgaatatcagcctaatgcagcctttgaaattaaaagattaaaaaatgaatctttctattttttacaaatacaagaacacgcagagtatgttgagtttaagggaagtatcagagctatcatggcttacaatttaaaagttcatgaaagtcaactgaaattgcctgatgatttaggtggtcaatttcaagtgtacgtatcaaaaagtaacagcccttatggcaatcatataactgaaattatagatgctttagacttagagataagctattccgaagtgaaaggtgaagctatggtgtttgatatagaagctatcaggttttgggatgttaatcagatagattggggaagagatacagctaaatatttaatcgatgagcatcaaatacaagcagataatgtaacttttaaggaggtgttgtaccaactatcacaggttttagagatgccagttgtaacggttcaagatattgctgatactgctgagcacgattggtctattcattacaagttttatgatttaatgcaatctgatttgttagataattatgggattaaagctgaagcaaaaacaactagttataagttatatacgctaacaaaaaaagctccttaaaggagctttttttatttctataaaaaagaaattagttgttaattactctaaactcagtacgtctgtttctttggtgttcagcttctgaacaatcaacaccattagaacaacggttagtaagtctagactctccaaaacctcttgctgttaatcggcttctagaaatacccttagagactaaatagtttactacagagtttgcacgttgctgtgataaagatctgttgtagtcatcgttacctctagagtcagtgtgcgacataatttctatgcttacgttagagtcgtttagtaatggtaataatgtttcgtctattacttttttagatgcaggtgttaaacgagcacttgcaagttcataaaatattggtaaaacagttgggtttaataattcacattcaacttcttcccaagttgtaataccaccttttttagctaaaactgttctggttactgtttcgtatttagcaggcacagttacgctagttgttgtagctggagtttcaactacttgacgtgtaatagttgtgtattccgctggaatttcaatttcgtccattcttgcaggagtcttaatcacacgctttttgtaagttgttgattgctcatcaacaggaattccgttagtagttgcgtcactagctaaagtagtaaaaggcacatctctaaactgtgcaggatactccacaaaacaagcagcaacacagtcttctttgttaactgaagggcaatcctctagtattttgtattcccatcctgaagtttttgggtaaacctcatatgtgttagagtcttttccaaaggttgctggtacaactcttaaatcagttcttccttccttttttacataaggaacttcaacggtttcataaactgctggtgtgtaaacatacttttttgatgcttctttaaccaatacagtttcttcaacaattttgtaaacagctggaacaacttgtaatgtagtgtaagcaggataaacttgtagcgtttcttctacttctttaaattcgtccttagtgatacacttaacgtagcatttacctggttcaggattttctggtaggccttgtgcctgagaaaagcttatacctgctaaaaggaataagcctaataataataatttttgtttcatagaataaaaattagttaatggttatagtttaatttttacggttttttaatgaccgcatttattagacccataaataactgatgcgtcacttttttaaatcactaattatctatttttgtaacttttaattgattattaatcatatttaatgttaaattgtttaattaaatttaatgaatatttgtttttgatggtttttaattaaaaaattatcagaagtgttaaaaaatattttttatgcaattgtaaatcaattggttgcttttgtattaaaattctcactagactctagttttaaatggagtgtaattgtaaaagcttgtcatttactgagttaaggatttgttgttttgatgtgataagtgatttgatgattttctagaacgaagactttaaaaaggcctcttaattcattttcttgacgctattgatgattgtatgctgacttttaatttttgtattagatattttggtataaatcgagtatttttttgaatattccgtaaatttgtgcctcttataattagattttttgtcaatgaaacaaattccgccatataaaccaaagtataaagtacgtattgtcaccgcagcctctttatttgatggacatgatgcctcaataaatatcatgcgtcgtattatccaatctacaggtgttgaggttattcatcttggacatgacagaagtgttgaagaagtagtaaatacagctattcaagaagatgccaatgctatttgtttaacttcctaccaaggaggtcacaatgaatattttaaatatatgtatgacttgcttaaagagcgaggagcagaacatattaaaatctttggaggtggaggaggagtaatccttccttcagaaattaaagagttaatggattacgggattgctagaatctactcgcctgatgatggtcgtgaaatgggacttcaagggatgattaacgatttggtacaacaatctgactttgctattggtgaccaacttaatggtgaagtagcgactttagaagagaaaaacccaaaagctattgcacgtgtgatttcgtctgctgaaaacttcccagaagttgctaaagaagctttagatgaaattcatgagaaaaataaaacgtctaaaacgcctgtattaggaattacaggaactggtggtgccggaaaatctagtttggtagatgagttggtgcgtcgttttttaattgacttcccagaaaaaaccataggtattgtttcggtagacccatcaaaacgtaaaacaggtggcgcgcttttaggtgatagaattcgtatgaatgctattaattcaccacgtgtatacatgcgtagtttggcaacgcgtcaatctaatttagcgctatcaaaatatgtaaacgaagctgttgaagtattaaaagcagcgcactacgatatcattattttagaaacgtctggtattgggcaaagtgataccgaaattttagagcatagcgatgtatccttgtatgtgatgacaccagaatttggtgcagctacacagctggaaaaaattgatatgttagactttgcagacttggttgcgattaacaaatttgataagcgtggtgcattggatgcgcttcgcgatgtgaaaaaacagtacatgcgtaaccaccaattgtgggataccaatcaagatgatttacctgtttttggaacgattgcttcgcagtttaacgatccaggaatgaacacgctttacaaagcgataatggataaggtggttgaaaaaacggatgctgacctgaactcgacttttgaaatttcaaaagaaatgagtgagaaaatctttgtaattccaccaaacagaacacgttacttatcagagattgcagaaaacaatcgtgcgtatgataaaacagctaacgagcaagttgaggtcgctcaaaaactatatggtatttataagactatttgctctgttgctaatgtcacttcgagcgcagtcgagaagtcttttcttgataaaaatggaattgaccaagatgagattctgaaacaagctcagaatgacaaaaccgattttttaaaattactcattgcagagtttgatagagtaaaactaaatttagatccttacaactgggaagttgtaataggttggaatgagaaggtcaacaaatacaaaaatcctgtttatacatttaaagtaagagacaaagacattaaaatagacacgcataccgagtctttatcacatacacaaattccaaaagtcgctttgccaaagtatcaagcttggggcgatattttacgatggacacttcaagagaatgtacctggagagtttccgtatacatcaggattgtatccttttaaacgaacaggagaagatcctgcgcgtatgtttgcaggagaaggtggtccagagcgtaccaacaagcgatttcattatgtgagtcaaggtatgccagcaaaacgactatcaacagcttttgatagtgtaacactttacggtaacgatccagacttacgtcctgatatttatggtaaaataggaaacgcaggtgtatctatttgctgtttagacgatgctaaaaaactttactctggttttaacctagccgatgtgatgacttcggtaagtatgactattaatggtcctgcgccaatgttgttaggtttctttatgaatgctgctatagatcaacaatgtgaactttacatcaaagaaaacggtctagaaaaagaggttgaagcaaagattgccaaaatatacaaggaaaaaggcgtagagcgtcctaaatataatggtgagctaccagaaggaaatgatggtttaggcttgtttttattaggcgttactggtgatcaagtattaccacaggatgtttaccatgatataaaaacacgtaccattgcacaagttcgtggtactgtacaagctgatattttaaaagaagatcaagcgcaaaatacgtgtattttctctacggaatttgcactgcgtttaatgggagatgtacaagagtattttattgaaaataatgtgcgtaacttctattcggtgtctatttctggatatcatattgcagaagcaggagccaaccctattacgcaattggcattgacattatctaatggttttacttacgtggaatattacttgagtagaggtatggatattaataagtttggaccaaacttatcgttctttttctctaatggtatcgatcctgaatatgctgttattggtcgtgtggcacgtaaaatttgggcaaaagccttaaagcataagtatggtgccaatccaagagcgcagatgttgaaataccatatacaaacttcgggtcgtagtttgcatgcccaagaaattgactttaacgatattcgtacgacacttcaagcattatatgctatttatgataactgtaactcgttgcatacaaatgcgtatgatgaagcaattactacgccaaccgaagagagtgtgcgtcgcgcaatggctattcagttgattattaataaggagttaggacttgctaaaaacgaaaacccaatacaaggatcgttcattatagaagaacttaccgatttggttgaagaagctgtattgctagagtttgatagaattacagaacgtggtggcgtacttggtgctatggaaaccatgtaccaacgtagtaaaatccaggaggaaagcttgtattatgagactttaaagcacaatggtgattttccaattattggtgtaaacaccttcttgagtagtaaagggtcgccaacggtacaacctgctgaagttataagagctacagaagaggagaagcaataccaaatacaaactcttgagaatttacataagagcaatgatactaaggcattgttaaaagcgcttcagcataaagcgattcataacgaaaatatttttgaagccttaatggatgtttgtaaagtgtgttctttagggcaaattactgaagccttatttgaagtgggcggacagtatagacgtaatatgtagtgtgtttttgcaccttaagctataagaatcccgagtgtttgctcgggattttttatggagttactatatatctaagtcggtataaagtcggcatatagttggtataaatatggcttaaaatgaaggtatttatttgtttttcattatattagctatttggtaacctaaattaattattagtattatggcaaaacaacgcggaattatattttttgaaggtactctgggaggtattaatttttactacagaaagggtgttcctattgctcgagtagctggaggaggttttactagaaaggcgattaaaacaggtgctaatatggtgcgtgttagggagagtaataatgaatttgcaggctgctcgcaagtgaataaggtttttaagcaagcgctacgcccttttttgatagggtataaggatggcacgttgcatagtaggttgatgcagttatttttaaaggttaaagattgtgattctgtttcggtacgtggaaagcgagaagttgctgttggtattacttcagagcatggaaaacagttattagagggttttgtgtttacgcctatacgatcgcgtttattgccttgtcgttatgggtttgattgggatactttaacgtttagcgttaacgattttagtactgctatggctgggtttcctgaggatgctagctatatggaggtgttggtgggtgtaattcggtttgattttgaaacgaacacttatactcaggttattgaaacgcctttggttgttgagcgtgattttagtggcacaagtttttctgttgtggtttcgggactgccttcaggtgatggtgtgttgtttgctgttgctcgtgttgggttttatcaggacgtgaatggtgaggggtatttgttgtctggtggtggtgcttttggtattgaggtgttgggtgtgagtggtgtttagtgttttgtttttactgttggtaggcatttcgcttgacagcgaaccacacccaaaactttgtgggtatgcccaccaattggctcgctccttcgctaaaatgatccactggatcatttttaaacgctcgcctctgaattcgaagcttttgtgttatttggatacacttctctatactatttgctatcactgatgtgataccaaatcactcgaagtgacttgattcttgtttttgctagtaatgttttgatttttttctatttttactgtacttccctaaaaaaattgatagcattttaactctgacctttagttggtaatgggtagggtttttattgttggactctagcgtatattgtgtagatggtttgaagcttcagaagcatttggtataaagcctcaatgaattagaagtcgaagcggcttaaatgttttagttcgcatgatgtttgttttataaatggttgatcgataaacatttaaataaaaaaaaggcgatactaattaaagtaccaccttgaatgttttcacaacggaataatccttattgtgaattgctttcagagtataaagataagtaaagttttgaatattacaattgaggatttccgtaatgcctataaaagtgaaagaagtaattttattaaaaagtaatttataaatgaaaaaaatattaggattggatttgggcaccagtagtattggttgggctttagtaaatgaagccgagaatgatgatgaatcatcagaaatagtaaagcttggagttcgtgtaaaccctttgactgttgatgagaagacaaattttgaaaaagggagaccactaacaacaaatgccgatagaacactaaaaagaggagcgaggagaaacttgcaacgctacaagcaaagaaggaaaaacctaatagaaattttaaagcgtgaagggtttatagataatgattcatctttaacagaagtaggaaaaaagacgacacacgaaaccttaaagttacgtgctaatgccgcaagaaaaaaaattgaacttgaagatttagcaaaagttttattggcgattaataaaaagcgtggctacaagagcagtagaaaagtcaataatgatggagatggacaagcgattgatggaatggctgttgcgaaggctctctatgaccaaaatcttactcctggtgcatatgcattaaagctgttgcgggaagacagaaagtatttgccagatttttaccgttcggatttaaaagatgagcttaaagctgtttgggaagcacagaaaaacttctacccagaaatacttacggatgccctttatgtagaacttcaagaaaaaaacaaaagccaaacttgggctatatgccaaaaaccatttgatattgtaggtattaaacaaaaaggaaacgctattgaaaaacgtttagaacgctacaagtggcgtgtagatgccttgactaataaacttgatttagagcaccttgcaattgtattacaagatattaataacgaaataaacaagtctagtggctatcttggagctataagtgataggagtaaagagctttattttaacaaagaaaccgtaggagaaaatttatatcggcaaattttaaaaaatcctcatacttctttaaaaaaccaagtgttttacaggcaagactatttagatgaatttgaacagatttgggaaacacaaagtaaatactattctgaattaactgatgagttaaaagaagaagttcgggatgttgttatattttatcaacgaaagctgaaatctcaaaaaggactgattagtttttgtcagtttgaaagttgggaacaaatatatgtagaacaaaatacaggtaaacaaaaatccagattagtaggcagacgagttgttcctaaatcttcacctctgtttcaagagtttaagatatggcaaaacctaaatcatttagagtttacaaataaagtaaagcaattgaacattgtttttaaggatttagatgatgaggttaaacaagaggtttttgaagaattaaatttaagaggtgacttaaagtttaaagacttgcttaaagtattgtctaaacatttggatgttggtaaagtatcagaatggcaatgtaattttgataagatagaaggtaacagaacgaatgaaaaactttttaatatttatcaagtaattgctgaaaatgaaggttatggatttgattggtctaaaaagactgctagggaaattgtagaggagcttcatgctgtttttcaacagttagaaatcgatgcttctatcttaaactttgatacagataagcatgagtttgataaacaagccagttatcagttatggcaattattgtattcggcagaagaagatgataaggttttggaagctgataaacttgtttatggcaattcaagtgttgccataaaaaagcgattacatcttaaatatggttttaagcctcaatatgcaaaaatgttagcaagtataacgttacagcctgattatggtaacctttcatcaaaagctattagaaaagtcttaccctatttacgtgaaggccatactttttctgaagcttgtggtatggcaggctataatcattctaatagtttaacagctgaagaattagctaatcgtgaattacaacctaaactagagttgcttaaaaagaatagtttacgaaacccagtagttgagaagatactcaatcaaatggtaaatgttgtcaaccaaataattgctgtttatggtaaaccggatgaagttcgtatagaattggcacgtgagcttaaaaaatctgcaaaagaacgagccgacatgacgaaaggtattgcggatgctacaagacttaataatgatataaagaaaaccatcacaaaagattttggtgttcccaacccaacccgaaatgatgttattcgttatagattgtggttagagttagaatccagaggatacaaagatttgtttacagatactcaaattaagcctcaagatttattcagtagtaaaatagatattgaacacataataccaaaagctttattgtttgatgattcattttccaataaaacgttagcctttaaaaaagataatttaaagaaagcaaatcgaacggcttatgattttatttatcaagattatgcaagtaacatagaagcatttgttgaacgtgttgaaagcctgtatagtgatggaaaaatatcaagaggtaaacgcaataaattattaatgccacagagtaagttgccagatggctttatagaacgcgatttacgtaatagtcaatatatagctaaaaaagcaaaacaaatgctttttgaagtgtttagaacagtgacggcaacatcaggtagtataactgataagttaagatcggattgggatttgattaacgttatgaaagagttaagcatgcccaaatacaaagctttagggttgacagaaaccataacacgatgggatagtgggcaagagaaggaaaaagaaatagaggtcattgaagattggagcaaacgaaacgatcatcgccatcacgctatggatgcattaacagttgcttttactacttatagtcatatccagtatttaaatcatttaaatgctaggagagatgaaagccataaaaagcattctaatatcatggctattgaaaacacaataacagaaagaaatagtaatggcaagcgtaaattttcacccccaatgcctcgctttagaacccaagcaaaagaccatatagagtcaattttggtttcctttaaaaacaagaataaggttgttactaataatataaacaaaactaaacgcaaagggaacgttaagttcaacactaaaatacagcttacaccacgaggacagctacataaagaaaccgtttatggaaaaattaaacaaccacaaacaaaacctactaaactaaacaaacgttttactattgagcaagccgaattaataatagataagtcacagagagatttggtgctttctcatttggcacaatttaataacaatggtgaacaagcttttgatagcaaggtgctaaagaaacaacctttgttttttaatgatgaacctttaaaagacgtgctgtgttttgaagaaatttacaccatccggaaagaagtgtctcctgaccttaaaatagacaaggtaattgatgaaagaataaaagctgttttatatgaacgattaagagcttttaataataaaccaaaagaagccttttctgatttagagaagaaccccatttggttaaataaatccaaaggcatccaaataaagcgtgttaccattaaaggtgtgagtaatgcagaacctttacatgtggctaaaaatcatttaggagagaatattttggacaataaagataaagttgttcctgtcgattatgtaagtacaggtaataaccatcacgttgctatttatgaagataaacaagggaagttacaagagcatgtggtctcgttttacgaagcagttgcaagagtaaatgaaggactaaccattgtagataaagattttaattcggaactagattggacttttaagtttacaatgaaacaaaatgaaatgtttgtgtttcctgatgaagaaagtggatttaatcccagtgaactggatttgttagatcaaaataatttcaaaacaatttctagaaacttgtttagggttcaaaagattggaaataaagactattggtttagacatcaccttgaaacaactgttacaaatgacattgagtttacatataaacgattacgaaatccgaatgctttatcaaatgctacaaaagtaagactaaatcatattgggcaaattgtccaagttggtgaatattaagttttaatttatgataaaacgcaccttgttttttggcaatcccgcttatttaagtaccagaaaccaacaattggtagtcaactttcctgaagcggataaaaaagaagcgaccattcctatagaggatttgggttatgtggttcttgaagatccacagattaccattaccaatgggttgcttttaaaattggtgcaaaacaaaacagcggtgataacctgtgataaacagcatttgccttgtagttttttacaacctttggtagggcatagtgagcaaacggagcggatgcgttaccaattgaacgctagtgtaccattaaaaaagcagttgtggcaacaaaccgtcactgcaaaaattgagaatcaggctgaccattttttgtctagaggcaaaaatggcttacgtttgaaacgttatgccaaggctgtgaagagtggtgattttggtaaccaagaggctttggctgctgctttttattttcagaacctatttgatattgacgactttagtcgtaatcaaaagggcgtgcctcccaataacctgttgaactatggctatgccattttgcgagctgtagctgccagggctttggtaagtagtgggttgttgccttcggtaggtatttttcatagtaacaagtacaatgctttttgtttggcggatgatgttatggaaccttataggccttttgtggatgccttggtgtatgatattgtggaaacgggttgtagtttggatgaattgaccaaaaggataaaagctgatttattaatgattcctgctttggatgtggttattgatggaaagcagagtcccttgatggttgccatgagccgtaccacgaacagtttgtatgagtgctttgccggtattagtagacgtgttttgtacccggagtttgtatagtgggtttttagagaatgcggttttgagagcacttcgacaagctcagtgtgacaatttatataattgttttgacatttcgagagcctcaatgtaacaccttagacattggtttgggagtgctttgagagtttcaatgacggttgtgttatgttgattgtttttgggttttttagacaaaccctctgtctagaacttttttgaccgttctagctacctccctttaactaaagggaagcacttgcagtaaaattataatagtgattgcttattatgggaaacgataggtttttacgattgaatcaatatagaagtatgtgggtactggtgttttttgatttgccaacagaaaccttaaccgagcgtaaggttgctacccgttttcgtaaaaatttattggatgatggttttgccatgttccagtttagtatttatatgcgtttttgtgcgagtcgcgaaaatgctgcggtacatattaagcgtaccaaaaacgcattgcccaaaaaagggaaggtctgtattatgcaaataacggataaacagtttgggatgatggagttgtttcatgggcaaaaggaggtggagcctgaaccaccgagtcagcaattggagttgttttaggatggagaatttggtttttgattgaggtctcgactgcgctcgatctgacaattggcaattctatttaatttgtaaataacaggataccagtttgttatggctagtatcctgtgaatggtctactaatttagtaatctgaaagcaattcacaacactcccacatatatacttacaggagatgaacctgtgaatggtctactaatttagtaatctgaaagcaattcacaaccctaaagctaaactattagagcgtaagaaccctgtgaatggtctactaatttagtaatctgaaagcaattcacaacacagcaactatgactcacaacgtaaacgacctgtgaatggtctactaatttagtaatctgaaagcaattcacaacagctttaaaattatagcaatctgacatctccctgtgaatggtctactaatttagtaatctgaaagcaattcacaacttctgttggctcaacatctttccattcattcctgtgaatggtctactaatttagtaatctgaaagcaattcacaacaaaaggtattgatataaataagtacgaaaacctgtgaatggtctactaatttagtaatctgaaagcaattcacaactgatgaagtcatcatttacccaaccaatctcctgtgaatggtctactaatttagtaatctgaaagcaattcacaacgtagaggttgttcaagatgctaccacatcacctgtgaatggtctactaatttagtaatctgaaagcaattcacaacgacctaagcacttcttggagaatatagatacctgtgaatggtctactaatttagtaatctgaaagcaattcacaacaaggtaaaaatgaaggtaaaaaagtatactcctgtgaatggtctactaatttagtaatctgaaagcaattcacaactagaatgtgcaggaatattattaagtacagcctgtgaatggtctactaatttagtaatctgaaagcaattcacaacgaccaagcaatttctttgattgaagataagcctgtgaatggtctactaatttagtaatctgaaagcaattcacaacatagtaatgaatgagcaactttaaattgcgcctgtgaatggtctactaatttagtaatctgaaagcaattcacaacgtgttatacctggtgttagtgatatgataccctgtgaatggtctactaatttagtaatctgaaagcaattcacaactatagtctaggatatacaaaaaatgcgctacctgtgaatggtctactaatttagtaatctgaaagcaattcacaacgaaattacagaagataatttagaccaatttcctgtgaatggtctactaatttagtaatctgaaagcaattcacaactgaagctgttaagtttttgatgaacgaagacctgtgaatggtctactaatttagtaatctgaaagcaattcacaacgaaaatacttttctcattttgtaaggttttcctgtgaatggtctactaatttagtaatctgaaagcaattcacaactataaaatcctgcgccttctccaccatcacctgtgaatggtctactaatttagtaatctgaaagcaattcacaactcacgtaaacaaacagcatcatcaacatcgcctgtgaatggtctactaatttagtaatctgaaagcaattcacaacgcatctgtataataaatgtttaacgtttctcctgtgaatggtctactaatttagtaatctgaaagcaattcacaaccttccaacctcttttaacttccataattaacctgtgaatggtctactaatttagtaatctgaaagcaattcacaactaagcgtctgttttagtattataactaaaacctgtgaatggtctactaatttagtaatctgaaagcaattcacaactcctccacctgcgactgaataaagttctgcctgtgaatggtctactaatttagtaatctgaaagcaattcacaacgtgctttttttttacaatttaatgagcgaccctgtgaatggtctactaatttagtaatctgaaagcaattcacaacagtaattcaaaaccgtttcttatttgctagcctgtgaatggtctactaatttagtaatctgaaagcaattcacaactcctccacctgtaactgtataaagttctggcctgtgaatggtctactaatttagtaatctgaaagcaattcacaacaccgctacaatgactcacaacgtaaacgatcctgtgaatggtctactaatttagtaatctgaaagcaattcacaacatatattagaatatccacatgcaggtaagcctgtgaatgtggtatatttttcggtaaatgtgaagtatgtgtttaatattatcgacgaactactacaacgtcatcatccaagaacgttgcaactttttaaaagctctaatttcacctcgtagaataggtaaataatcttttccattacttctagaacgctctaatcttctacaattactgtacaatttgcttgtaagacgctctaagctttcaagatgtttatgcttcttaattctacaattttcacgctctgcattgatgatttctggtgcaagatttgaagattgttgaacaatatcacctgaaaaataaatgtcattatcttcagtgccatcttcatttaagtaagatagatcgtgatttaaataggtagatatgctgcgagacaacataataatatccatagccttttgatatataggcaattctgatagatgagatggtaaatgaggtaacatagtatataatagcaatttatatcaaaattaagcacaagaaatgagattctacttttgatattaaagcaatatgttatatttgctttaaatattaagttattttttaatttctctttaaatgagtatagatagattaaactggaagattttaaagtgtttgcaggacaatgcaagacagtctaacgctgaaattggtaggcaagttggtattacttcgccagcagtttcggagcgtataaaaaagatggaagatgcaggtattattgaagactattacacatcagtttcttattttgaagcaggttatcaattaaaggctattattaccttacgcgcttttatgggaaagctaaagcctttttttgagaaggtaaaaacctatgatgaggtgttgaactgttatcgtattacaggaaacgaaaatattgtaatggaagtggtacttaaaaaccaaaagcatttagaaacctttattgaccagttgattatatatggagaaaccaaaacgcaaatagtgctttcgcaagtggtaaagaatggagcgataaagccattgaagtaatgaccttatcgttatagattggtttccatatgctcagcaattagcttagcgtgtattcttgagttttcaataaaccatttgtgggtttcggttccgccacaaattacacctgcaaggtagagtccttgtacgttgctttccatggtgtcaggattgtactgcggaaagaaatttccatcattagacaaggtaactcctgcttgttccaaaaactgaaagttaggttggtagcctgtgagagccactacatagtcgttagcaatggtttccgtgcctttaggtgtggaaatgatcacctgatgtggtgtaatttctttaatttcggaattaaaataggctttaatgctaccttcttcaattctgttaatgatatcaggtcttacccaatattttacacgttcgccaatagctcctttacgtactaccatagtaacgtttccacctttacgccaaatttcaagcgcagcatcaactgcagaattgctagcaccaaccacaataacatcttgcaaactaaaaggatgcgcttctttgtagtagtgcgataccttaggtaaggactcaccaggaacatttaaaagttttgggatgtcgtaaaaccctgtggcaatcactactttttttgcactgtagctggttttgtttgaggtaacttgaaattggttgttttgcttttgtatggctgttacttcttcatagaggtttatgttgagcgtgttagatgttgctacacgacggtaatattccaaggcttcgtctctatttggttttgggttattgcttataaatggaatgttgtcgatttccaaacgctcggaagtggaaaaaaaggtcatgtttaaagggtagttaaacaaagagttggttagtgcgcctttttcgagcacgatatagttccaacctcttttctcacattccaaagcgcaggcaattccaataggacctgctccaataattagtatatctgtttgtgtcattaatattgtgtttctactaaattaaggttattcttctattttttgaaatctcattttacgctttaacattaaaagtatggcaatacatattaccatcactaaagacacaatgtaccatgtgttggtaaagcctaccaattccaccatgtgcattcctgaattgtgtccaaagatatgtgctatagcaaacgccatactgtataaagccatgtattcgccttggttgccttgttttgcacgttttaaggcaaaagcattagaaaatgggaaggcaatcatttcgccaatggtcataaataacatgccaataaccaatacaccaacccaagcagtaacattaagcacaataaagcttataagtgttaatacagctccaaaggctactaaacctgttttggtgtatttaggagattcaagccattttactagaggcatttcaaatacagcaattaataaaccgttcattcccatgagtaaccctattttaaactctgataatacatgtacgtctttgtagtacagtggcattgttgagaagtactgaagaaaggcaatactaaataataccatagcaactaaaaagataatgtactttccgtctttataagccgatttagggttttgagaaacgatgttatcctgaactttggcagttttagggttgagtaccttgagtaataggaaacctgcagctatacaagtaataccatctacccaaaacaaaccaccataacccaatgtagcaataattaatccgccaatggcaggaccagcagaaaatccaaggttaatagccaaacgaataagtgttactgaacgtgttttgttttcaggtttactgtaagcacttaatgctacaaacattgcaggacgaaacatatcggctacagcaaggagtaaaaatatacctagcatgataccatagtaggtgcttataaattgtaagccaatgaatagaagccctgacaatactaaactaattaccattactttgtaatacccaattttgtcggtgagtttgccaccaagccaagacccaactaccgaaccagcaccaaaagcactcataatcataccaacatcagaaaggctaaagtctaagcttttattgagatataatgataaaaacggaataaccatggtgccagccctgttaatgagtgtaatgagcgataaccaccatacttctttagacaacccactaaatgtgtttaggtagggttgtaataacttgttgtttaaaaaataaataaatttcattgtttgattgattgttataaaagtaaaaagtccgacgctagcgtcggacttttctatattgattaattgtattcaactatcactacaatatatagcaagcccgacttcgttgagaagaggtatatttttgttttacaattgtattacagttgaacatgattttttctttattgctcttcaaagctaggtaaaaaaagtttaagttgtatttttgaattgaaaaaattaacccaaatgagaaaagttattgcatttttagtgatggtattagtcttaggttgtcatcaaggaaaagaaccgattgttggtgagaccgagtttcaaaagaagatgaatgctgattttagagatgcaacaagttcgccacttaaaggaagagctaaaaagaattttaagggacttgatttttttaagtttgactcagcttatgtagttactgctcaattaaaacgtacaccagactctaagtggtttaatatgaaaacgaatactgaccgtttatctagagagcgtgtttatggtgttttgacgtttgagttacaagggcaaacttatcagttgaatgtataccaaggcgaagattctattactagcgaagatcagcaagattatttgtttttaccttttttagacaacacaaatggagagacgacctatggaggcggacgttatattgatttgaaaattcctgaaggcgacactattgtggttgattttaacaaagcttataacccttattgtgcttacaatgagaactactcttgcccaattgtgccaagagtgaattacttagataccaacatacaagcaggtgtgaaggcctataaaaaataaaagcgccattttaaacgacgcttttatttaagattattgttttattattcgtttggagagtgctccactactggtttttaattgtaatagatatactccattggaaaacgagctgcaatcgattttagtgagcgactcttgagagtgaaatataagtcttcctttcatgtcaatcacttcaatactttctatagtaatatgattaggtagttttatatttattagattggaagttgggttaggatagatacttattttggataattcttcagtttcgatacccaatgtaccacttacttcaaaatattgcttgtcgtaaagtgaccaagtgccatctgcgttttgtactctcacgtacacataatgatcaccttgagctaaactgccagatgttgcaacaacaacattttcgtcaatactatcaccagatgttgtgattgggtttccgttgccttctccaggatctacgtcaataaaatattcagcagctacaatagatgcgttattgaaaaacgtaggtgttcttacagaaaatactgtatgtgtgtaaacactatagttgccagtagtattaccaacacgtataaataatctgtggcttcctgtaggtaaacctgttgtaggaatagcaagattttggtctacggtttcagtatcagtgattgttacttgattgcctaaacctatgccaggatcagcgtcaaaataatattctatgctgttaatatctgctgtattaatctctgctagtggtacaacagaaaatactacatggtcatataaagaccatacatcatttgtattttttactcttacaaaggctctatggctaccttgcggtaatgtgtttgtaagaaatgctaaattctcatccaaggtttcgcctgtaggtattgtaattgctgttgcatttccagttcctgggtcagtaccaaaatagtattcagcagctgtaatatcataattgtttaatacatcaggactatggttaatgctaaaagctacattgtcatatgcgccataagttccatcgctattttttactctaatgaataatttatgactaccagaacttaaagcagctgttggaatattgaacgattggtcaatagtctccatagcagctacagataattgtgtgccgttgccaataccaggatctgtatcaacataatattcaaaaccatcaatgtttgctgtgttaaaggttgcattagctgctttaacactaaagctttgcgaatagtaatagctagtgctgccatcatcttttacagcgcgtacaaatagtttgtggttgccagcagataatcctgttgtaggaatactgaagttttgattaagtacttcagcatctggatcaatatctatacttgtgccattgccaatacctggatcggtgtcaaagtaatattctatttcagaaatatcaccttgagcaaacgataggtaagcggtaagcaaaaaagttatgtgaataagtcgtttcataatcagtttattttttgattattaattagacttattagcgtttgcctttatgtttacgttgatgttttcaccagcttcaattaagttgttgctgatagtaaagcttgttaagtatggtaattcggttgggtaaccacgcatatcaaaatcataatcaccattgtaaatacctatgtcatttccgtcagaaccagcatttagaccaggagaacttggggaaagcgtgaaatcatcttcaggagccatatcaaaagccgatgatgctacactagtaaaaaatgggttttggttgtcaaagtttccagtaccaggcattgttagagataatgtgcctccagttgacatatagctaatagagttattaagagttagtgttctgcctgtagttggagtaaataaagtgtttattccgtttgagataaatatattattgaaagcagttacatcaccagtcatgtttgggaaaatatttgtgtttccccatgtatggttaattctaacaacgttattgttaaaaatggttgtgtcgttaaagtatcgtaaggcgtaactagcagttgcattaccgtttaataatgtaatgtg

SEQ ID NO: 2231 - DNA, 24164 bp, synthetic construct
  source 1..24164: mol_type = other DNA
  misc_feature 1..24164: note = Synthetic
ctgaggaacgaagcatctatctacgctataattgtttgaaggatgatccgctttcgctcagcatgacaagatgtaattacctttcgtatatagaaggcatcaggccgctacttcttcgctatcctgtaaaatttaccgctatcggttaagccgtacagggcgccgtccttgccggtaaccaatgcccgccagcgttcgtttttatcgcgcagcaaacgctcctcgcctaccactttattgttcctgatcaccaggcgcgcgatgtgcgagccgcttaagccgcctacaaacaggttgctcttccactcggcgatattcccggtgtaaaaagtaatgccaccgggcgatatggtagggtcccaataataaatgggctgcgtcatgccttctttttgctgtataccatcgcccaccttttcgccgctgtactcaataccgtaggtaattaccggccagccgtaattatggccgggcctaataatattgatctcgtcgccgccgcgggggccaaattccgcttcccacaggtcgccggttgccgggttccaggccaggccgtcggggttgcgtaacccataagcatatatttcgggtaaagcacctgccttacccgcaaacggcccaccgggtaccgccttacctgttttggtgatatggatgatcttacctatacccgccccaaggtcctgcgctttcatgcggatatctgcgccgctgcgctcgcctgtgctcacaaacaaatcacctttcttatcaaaaacaatacggcagccgtattgcagcgtgcccttgtaagccggctcggcccggtaaattacctgtacattttccagttttgtttcgtcagccgataacttgcctttggcgatggccagcagcgagccgccgggggcttcttcggcataaccccagtaaaccatgcggttattagcaaaagcagggtcgatagttacatccagcaaaccaccctgcgctttaaacaataccggcgggaaaccggtgatctgtttgtcaaaagcaccgttggcctttaatatccgcatggagcccgctttctccgtgatcaggaaccgcccgtcgggcagtacgtgtatgccccaggggttcttcaattcgttgttgatcaccgttgccgtataaggcgtttttgttttgatcccgcgtatgcgtgtttgcccgcgaaaggccggtttgtaattggtattgggcttttgcgtttcaaccggggccagggcggtatcgcgttgcagatcatgggcattagcgccggcgcagcacacggcaaggcctgctgccataaataatttttttgatagcgtaaacataagtagttggtaatgtatgcggtacttgttgcttctatggggtaatagaagcaatattaaaaaattaatatttgtttgcaccgcctgttaaaaaacaaattagccgtcactttgtataactctcaatttaccgcgtaattgccgcataaacacaccggcggcacaacaattttacgctgcatcaatactgctttttgtaacattgcacaaattttaatagttgacagtagccgctaaaaagatattctcgtacctgttaaaggcatcaatacttgttttaacggtattatttgtctaccataaactgcttagtaagaacgatagcctgcagcagtttaaaaaccttacttcggttatcagccgggccgaggtggtgtataccatgggcgccgttgtagtactcatggtggttaactgggcgctggaaagcttaaaatggcaatacctggctaaaaagctcacacgcctgagtgtatggcaggccgttgaagcggtattttgcggccttagctgggccatatttacccctaaccgtattggcgaatatggcgggcgggtaatgtttctgccaaaccgcaagcgcatacatggcgtattcgctatggctgtaggcgcgtttgctcaaaatgtgatcaccaacctggtgggcattatggcttctctatggtttatttaccattttctgcatttaaatacctggctatttcttggcatcacgctgttgtctgtcgcgtttttagcattgttcctgctgctgtattttcgcataggcctgctggtaaaatggctggacaggatcagtttcctcaaaaatttccgcaggttctttgatattatgggccgttacagccagcgcgagctactgatagtttttgcctacagcctggcgcggtttttcgttttttcgttccagtactacctggtcattcacctgctgctgccgcaactgcccatgttcagcatgatcatgacggtactggtgttcatcttcatccaatcggccatgccctcgcttgacctgctcgatataggcgtacgcagttttacggccatgcatttatttttatacattaccaaccagcaaatagctataattgcagcggtatcatctatctggctcatcaacctgatcataccggccattatcggctctgtatttgtttttaaactgagattctttgatcgcactgcatagtattatttcgttattgcttaccggcctttacctgctggtggttggctaccttattaaaggctgggcggcgctcaagcgcgcgaggcttacacaaagcacgtttattacaccggtaaccatattgatagccgcccgcaacgaggccgagcgtattcaccttaccattgaggatatcctggcgcaggactaccccaaacatcttaccgaaattattattgttgacgaccactctaccgatgataccgccaacattatacgcggctatgccggcaggggtgttaagctactacagctcaatgaggataagcccctcaattcctataaaaagaaggccattgccgaagccataggcatggcaaccggtgagttaatggtttgtactgatgccgattgccgcatggggacccaatggctttcgtcagtagttagctgttatgaaaccctgaaaccggtcatgatctcgtcgccggtaacctactttgaagaacgctctttgtttgaacgcctgcaaacgctggagttctcttaccttattggcattggcgccgcctttattggcaatggcagggcatcaacctgtaacggggctaactttgcctatcgcaaggatgtattttacgaggtaggtggctttaaaggtattgacgacctggcatccggcgatgatgagctgctgctgcaaaaggtggccgaagtatatccacaccggatagctttccttaaaaaccgcgatgctgtggtatatacgcatgccaaacataccttgcaggagtttttgcaacaaaggcgcaggtgggcctccaaatcaacccggtataaggataaaaaggtagttgccctggcagtttgcatttggctgtttaacctttcgttactggtaaatgccgcgctgggcttttacagtattacttttcttgagcttttccttgtgcagtttctgttgaaatatttgatcgaagtagcttttcttctccctattaccgccttctttaaaaggccggggctggtgagcctgttaattatattgggacctatacacattatttattttgtgtacgtaggtttactgggcaatacccgcaagtacgcctggaaaggccgcgtggtacgttaatcgttgatataaatacgcatttacattattttataaaataacttccttgcgcactattaaacagattatttatctattttaggctgcctgttaccaaagtaatgcaaaactatcatgaaaactccggcgaggatgagctgatacggttgcttttaaagcgacagtcggaacttaactccctactggaagttacccgtgccatcaacaagaacacacctaccactacactgttccagatgctggaggtgatcctgaaaagctacctgcaaataggcaagttcaggttcatgatagaaaagggtggcaattttagctgcatatctaaatttggcggcattgccgaatcgcccatcgttttaaacaacacctggaaacacttaagcaagatcaaatcgccctcgccacttaacggtcacgccgacaagatcttaagcacctataactattttattcctatctatcataagaacaaggcgctggccttcgccctcattggcgactttgataccagcagcgccatgctcaataacgacctcaactttatacaaacccttattaatgtaattgtagtggctttggagaacaagcggctttttcgcgaacgcctccttgccgaacgtatgcagcgggaaatggaacttgccgtggaagtgcagaacatgctggttccgctgcgcgaataccgtgaggacgggatagaagtagacgccaagtacctgccgcaccaggacatcggcggcgattactttgactttttcaggctcaacgagaacgaatttttatggtgtgtggccgatgtatcgggaaaggggatatcggcagcgctgctgatggctaatttccaggccagcctgcatggcctggtagccattgaggacgacctgaccaccgtagttgagcgcctcaataaaattgtgatacgcaacactaagggcgagcgctttattacactcttcctggctaaatacaaccagaaaacgcgccgccttaattatatcaatgccgggcacaaccccactattttatgtgccgatggcgaagccgtacaactaaaactgggcactaccatgatcggcgcgtttgacgagctgccatttttaaatgagggcgaaattgacgtagagcccggaagcctgctttttaattatactgacggcttaatggatattgaggcgcagaacagtaaaaactggaacgaagaaaaaatggtggaatacgtagtgtttaacggtgataaaacccccgaccagtttaacgaagaattgatgcaccacattaataacgtggtaaaaggccgcctgatagacgatatcaccctccttaccctgcgcctgtactaacccttagccaaatagtaaggtaaatacctcttcgatacgacctaccggccttacatctatagcataccgtgtgagatccagcttcgctttgtctttagctgctgatggcatattgtatttggagataaatatctgctcaaaacccagtttctgcgcctcggctatgcgctgctccacacggttaaccgcgcgtatctcgcctgacaggcctatttcaccggcaaagcaggttttggcagaaatagggatatcctcgtgcgaagatataatggctacagccaggccaaggtcaatagccgggtcctccacgcgtataccgccggtaatattcaggaaaacatcctgtgtgcccagcctgaaaccgcagcgcttttccagcacggccagcagcatgctcatacgtttggtatcaaaaccggtagcgctgcgttgcggcgtgccgtaaggcgaggggctaaccaacgcctgagtttctatcagcatagggcgcataccttccagcgtggccgaaatggtgataccgcttaaaccatcctcccgctgcgacaacaggatctccgaagggttagatacctcccgcaagccttcgcccagcatctcgtaaatacccagttcagacgatgagccaaaacggttttttatcgtgcgcaaaatacggtaaacatggtggcgatcgccctcaaattgcagtacggtatctaccatatgctccagtatctttggcccggctatcatgccgtccttagtaatatggccgatcaggaataccggcgttgatgtttccttggcaaaacgtaacagttccgcggtacattcccgcacctgcgatacacttcccggagtcgattccacgtgcgccgagtgcagggtttggatagagtcgatcaccagcacatcgggctgcagttcctctatttgcttaaatatgttttgggtagaagtttccgtaaggatatagcatgccccttcgcttcctgaaggttgtgtagaagcaccttgcttattaaaagctcccccttcagggggttggggggttaatctttccgcccgcatctttatctggtggtcgctttcctcgcccgatacgtagagtacttttacattaggcatgttaagcgccagttgcagcatcagggttgatttaccgatacccggctcgccgcctatcagcaccaacgaacccggtaccacgccaccgcctaaaacccggttaaattctttatcgggcgtaagcaggcgctgctcctcccggtaggtgatatccgccacctcaaccggcttgttggcccgctgcatggaggtagaagcgctggctttccagttaggtacactggcattacctttttccagtatctcctcaacaaaagtattccattgctggcagcttgggcatttgcccagccatttaggcgactcatagccacagctctggcagaaataagcgatcttggttttagccattattcagatatgcagattacagatgtgcaaatatgcagattttttgctattaaaattagcaaatattaacagataacctttaacttatcttgatatcttgggagttctttgacaactgatatttgggacaacttcctttttgtgtagcccagattgccatttgttgtgatttgctttcaattctttgacaactgatatttgggacaacttttattgtttacatcaaaaagaactctacgttgtgatttgctttcaattctttgacaactgatatttgggacaacgaccacaaaacggatcgatacgaattatttgttgtgatttgctttcaattctttgacaactgatatttgggacaaccattagttacgtttgcctttaagaatagcggttgtgatttgctttcaattctttgacaactgatatttgggacaacggtatgccatgggatttagaagtgttaatagttgtgatttgctttcaattctttgacaactgatatttgggacaacgtgcggaatgaagcctgaatattgcgaatggttgtgatttgctttcaattctttgacaactgatatttgggacaactttatcgtattcatccccgttaggtaccgcgttgtgatttgctttcaattctttgacaactgatatttgggacaacaaggccatgaaccctaatgctactccggaggttgtgatttgctttcaattctttgacaactgatatttgggacaactcgttaacgttacggccaacaacggtgcctgttgtgatttgctttcaattctttgacaactgatatttgggacaactcgctaacaccagtatttgtatcagtttctgttgtgatttgctttcaattctttgacaactgatatttgggacaacgtaaaaaagcccgataatgtaacactaccgttgtgatttgctttcaattctttgacaactgatatttgggacaactttgataccaatggcattagaggatgatatgttgtgatttgctttcaattctttgacaactgatatttgggacaactagataatttgcgatcaaccaataagattagttgtgatttgctttcaattctttgacaactgatatttgggacaacgatctgttcgttatggcgggtggctgaatagttgtgatttgctttcaattctttgacaactgatatttgggacaacgcgggcaaggtaaagggcttttcgattgagttgtgatttgctttcaattctttgacaactgatatttgggacaactgatcttagccgcagcgtctcggtagtattgttgtgatttgctttcaattctttgacaactgatatttgggacaactatatttcgttgtttacaactcatcagacgttgtgatttgctttcaattctttgacaactgatatttgggacaacccactggttttagtgatgataaccttatgcgttgtgatttgctttcaattctttgacaactgatatttgggacaacgcgtttgttgcccttaccagtgaggggggcgttgtgatttgctttcaattctttgacaactgatatttgggacaacataccccaaattaattaacacaatatcaatcagttgcacccaattttagaattaaaaaaatccggatgctcaaacatccggatttaaattctaaaataattctaattgctgcggcgtttccggaagcggtttttcttctttaccgtaatataattccatcatgccaaattgcttatcggtaatggtcatgatacctacatgcccctttgcaggcaatatctttttcacccttttaatatgcacatcggcgttttcgcggctgctgcaatgccgcaggtatatcgaaaactggaacataccgaagccatccttcataatattcttacgaaatgtggcatatatcttcctgtcctttttcgtttcggtaggtaaatcaaaaaacactaatatccacaaggtccggtattcatttaaacgcattcgttaaaaaggtaattcatcatcctcatcatttgggttgcgtgtataatccccctgttcttctgccgcgtcggccaggaaactttcatccgcagtttggtaaaacatgccctttttctggttaaagttcttcatcagcggataaaccagtttcctgctacggccttcgtagcaacgtgccagcgaagcggttgtactttgcaggccaaccattagcgggctgcggcctttctcaaactgcacatcaaccgtggcaatacccaaaagctgcgctttaatagaattccccagttccaggaaattttctccgttatcaacaatccgcaacactattttatctacataaggccggtatggctccatcatatcatcggcaaggcagtaagcattgtacttattacggtggtggatacccagtgtgggcagcaggcccgagcaaaccaggctgcgcgccacaatagcccggagtatggcatacccatagttcagtaaattattaggcgggttaccctcccggttcctgaagaacactactttaggtgggaacacgtttttccaataataggcagcggcccggccttcataattatcggggtcgccggagcgtaccgatttagcccaatacaacatattatcatgctcaatgccacgctcggcaagcacggcggcctggtttagtattttggcctgcacggtttgctgccatagctgcttttttaaaggttgcgaagcattgatctggtgcctgaaacgctcgctttgggtatcgttaccatccagaggaagcagcatccctgtagggtggtggctgctatcacaggtaataatagcggcattgttatccagcagcgctgccatacagccatgcgtaatggtaatttgctgatgatcgagcaccaccacacctatatcttctatagcggcgtacttttttgattcctcatcgcctaaaacctttaaatggggcaaatcaatcaccatctggccgtttttaaggctcagataggcggggttgctaaagtgcagtgttcgtttgatcataactatctgcttgtaattgaccaatcaatccgcagaatagtaacctttacaccaccatagctcacatgtagccatccctttgctcaatacccatccaccttgcataacattgaaaaggcacccttaaaaaaacatgacctaataagtgctttacccgtatgcaattgccggtacacttttaagaaaaataaaaagacctggtgatgatgtttgctttttctctgttgtatttgattgataaagtttagttaatcaagtatatacaatttttctgaaaaagaaaagaagtttaattgacgggtagcggcccaaataagggcaaaaaaaatgccccgtatggtaagacgaggcgcttaatgtttacacaacggaataatccttattgtgatttgctttttctttgaactcaaatttataattttttaaattaaatccaaacaagtaataaaaaatcccgccatcaatagttgtagcaaaaagctaaaatttgtagttttagaaacaccgctttcaatttaaaccttttacaaaatgaagagaatccttggcgttgatcttggcactacctcaattggctgggcgtacgtgcatgaagcagaaaccaaacaagaacaatcctgcatcataaaattaggcgtacgggtaaacccgctgactaccgatgaaaaagacgattttagtaagggcaagccggtatctgtaaacgctgaccgcacgctcaaacgtaccgcgcgccgcaacctgcagcgttacaagctgcgcaggcaaaacctgattgagttactgctacaggccgggcttatacagccgggcacacccctggccgaaactgacgaaggctctactcaccaaacctacgccctaagggccagggctgctaccgaacggatagaaaaagaagagttggcccgtgtgctgctcatgataaataaaaaacgcggctacaaaagcagccgtaaagccaaaaacgaggacgaagggcagctgatagatggtatggaaatagccaaaaggctgtaccatgaaaatttaacaccggggcaactggcttaccggttattacaagagggcaaaaaaagccttccggatttttaccggtctgacctaatggccgagtttgataaagtttggcggttacaggctacgttttaccccgaaatatttactaacgaatttcggaaagatattgagggcaaagggcagcgggcaacatcggccgccttctggaccaggtatggctttaacaccgccgaaaataaaggcaactggcacgagcgtaagctaagagcctaccagtggcgtgccgcggccaccggcacccggcttacagaagccgaagccgcttacgtaatagccgagatcaataacaacatcagtaactccagcggctaccttggcgaaattagcgaccgcagcaaagagctgtactttaacaaccaaaccgttggccaatatctttatcatcagttacagcaaaacccgcatgcaaataccaaaaacaaggtattttaccggcagtattatttaaacgagtttgaaaccatatggcaaacgcaggccgtttaccacagcgagttaacacccgagcttaaaaatgaggtaagggacgtggtgatcttttaccagcgtaagctgaaatcacagaaagacctggtaaacttttgcgagtttgaaagcaaaatagtggagtatgaaaaggatggcaaaaaggttaagtaccagatgggtgctaaagctatcccaaaatcttcgcccttgttccaggagtttaaaatatggcaaaacctgggcaacctgcaggtgcagcataaaaagctcaggcagcccgaatttctgtcaaccgaagccaaagagctgctgtttgccgagctaaatattaaaggcaacctgcccaaagaggagatattgaaactgctggagcttaaccccaaagaatgggagcttaactttaccaccgttgaaggcaaccgcaccaacctggcattttatgccgccttttttaaggccatggaaaacgagggacacgatgaaacagactggcttaagctgcccgcggcggagattaaaaatagcattaccgatttttttaattcgcagggtattgatgcccgcatacttgattttgatggcttacaactcaacacccctgccgagcaacaaccggcctacctgttttggcatttgctgtatgcctacgagggcgacgattctccaacaggcaacgaaaagctgtaccaattgctacaaagcaaatttggctttaaaagagattttgctcaaatactggcccgggtgggtttacaggccgattatgccagcctgagcgccaaggctattaaaaaaatattcccttacatacgcgagaataagtacagcgaggcctgcatgttagccggctacaaccactcgcattcgcaaacggccgaagaaaatgccaaccgcccgctaaaagagcagcttgacctgctgccacgcaacagcctgcgtaacccggtggttgagaagatacttaaccaaatggtaaatgtggttaacgccataattgccgacccggaactgggccggcctgatgagatacggattgaacttgcccgcgaccttaaaaagaacgctaaagagcgggctgccgcaacactgcagatcaacaaaaccaaagccgagcatgatgccatcagggccttgctcattaaggagtttggcctcaaaaaccccacccgtaatgatattatacgctataaactttatgaggaactgaagtttaacggctataaggatatctacaccaatgattatatatcaagggaggagctgtttacacacaagtatgatattgagcacatcatcccgcagtcgcgcctgtttgatgatagcttctccaacaaaacagtggtattgcgaagcatcaacctcaggaaagggaatgctaccgccatagattttattaaggacacctatggcgaggcggccttaagcgagtacaaaacgcgcctggatgcctatattaaattttaccccgagcgtaaagccaaatacaacaaactacagttgcatggggcggccataggcgaagggtttattgagcgcgacatacgcgatacgcaatatatagccaaaaaagcgaaagccatgctgcagcagattgtacgtaatgtagtgactaccacaggcagtattaccgaccgcttgcgcgatgattgggggctggtgaacattatgcaggaactaagcctcgaaaaataccgcatgcgcggccttacagaaatgcaggaaacaaaagatggcaacctgaaagaacgtattattgactggagcaaacggcatgatcaccggcaccatgccatggatgctttaaccatagcgtttacccggcatagctatatccagtaccttaaccaccttaacgcccgtagccacgaagacgagtttacagaaacggtactacgcatacaggcaaaggaaacaaaagtaggtacggatggtaagcggcgctttaacctgccggtgcctcatttcagggagcaggcccggcaacacctcgaggctacactggtttctattaaagccaaaaacaaggtggtcaccaaaaataaaaacaaaattaagaccgccactggcgaaaaagtgcaaattgcgcttacaccacgcgggcagatgcacaaagaaaccgtatatggcaaagtgcgccgccaggtaacagccgaagaaaaggtaagcaccaaatttacagcggaagtgatagcgcaggtaaccaacccggcatatcgagcggcactgctaaaccgccttaaccaaaacggtaacgacccgctaaaggccttcggtggtaaaaatgccctgaccaaaaacccactgtatatagatgaaagtaaaaagataccgatacccgaaaaggtaaagctaagctggctggaggatgactacaccatcaggaaagatataacgcccgataacttcaaggataaaaaaagcattgagaaggtgctggatggcgcggcaaggaacattatgctgcagcgtttggaagagtttaacaacaatgctaaagatgctttttctaacctggataagaaccctatatggcttaaccgggaaaagggcatcagcataaaacgggtaacgataagcggtgttaaaaatgccgaagccctgcattttaagaaagaccatttgggcaaacttatattgcaaaatggcaaaccagtacctgccgatttcattagtacaggcaacaaccaccatgcggctatctttcgcgacgaagatggcaacctgcaggacgaggtagtatcactgcataaggtaattacagagcgcgtaaacgtaggcctgcctataatagacagaacttacaaccagcacctgggctggcgtttcctgttctctattaaacaaaacgaatactttgttttcccctcggcagattttgacccatcagagatagacctgtttgatccggccaattacgcgctcatcagcaagcatctttaccgggtgcaaaaattctcgaaattaacttacggtaattcggcagtgcgcgagtatgtattccgccatcacctggaaacctccgtggatgataagaaggagctcaaagaccttacctacaaaagtgttaaaagcctgccttacctggaaaacattgttaaagtaagaataaaccaccttggtaaaattgtaaaggttggtgagtattaacttgtaaaacgtttactgctaaaagcccgggcctctaaaaaacccgggcttttatatgaataacgaatgcttaacattgaaccaagaggatgcgtttactaccttatcccgcccaaccctctctgtccaaactgcggaagtggatggcttcggcaaggtgctccagttgtatatcttcactgccggcgagatcggctatggtgcgggctactttcaggatacggtcataggcccgggcggacagcccaagtttttccattgcttttttgagcagcatttggccggccgcgtttattttacaaatatcccttaccatttgcgggctcatctgcgcgttggcatgcagatcgggccgctcaccaaaccttgccgactgtacttcacgcgcttttaccacccgctcgcgtatctggtcgcttttctcggccagcctttcggatgacagttcgctgaagttaacaggcgttacctccacatgcaggtcgatacgatcaagcagcgggcccgatattttgctcaggtacttttgtaccatacccggcgggcatatacattctttttcggggtggttgtagtaaccgcaggggcaagggttcatgctggctaccagcataaagctgctggggtaatcaaccgtgaacttggcgcgcgatatggtcacgcgacgttcttccagcggctggcgcattacctcaagggcggtacgtttaaactcgggcagctcatccagaaacagcacaccgttatgggcaagcgatatttcgcccggttgcgggttactgccaccgcctactaaagccacatcgctaatggtgtggtgcggcgaccggaatgggcgggtggttaccagcgcgtcggccgcggaaagcttgccggccaccgaatgtatcttggtggtctctaatgattcatgtaaacttagcggcggcaatatagagggcagcctgcgcgccagcatggttttcccggcgccgggcgggcctattaaaattacattatgcccgcctgccgcggctatttccaaagcacgcttaatgttttcctggccgcgtacatcgctaaagtcgctgtcgtaattggcaaggctgtcgtaaaactcctcgcgggtatttactacctcaggcttgaggctttggtcgccgttgaaaaagtcggccacctgtttaatgttctctacaccgtaaacctccagttcgttcacaatagccgcctcacgcgcgttttgcttcggcaggataaagcctttgaaaccctctttgcgggcctgtatagctataggcagcgcgccttttataggctgcaagccgccatccagtgatagttcgcccatgatgaggtaacggtcaagatcggtagcctctatctggcccgatgccgccaatacgccggtagcgatagtgaggtcatacgccgagccttcctttttaatatcggcaggagccatatttactaccacctgctggcgcggcatacgatagccgcaattcttcagcgccgattctatccggaaataactttccttaacggcaacatcgggcaaacccacaataaaatatttggtgccggcggcaatattcacttcaatggtaatggtgatagcctgtatcccataaactgcgcttccaaaggttttaactaacacgtgacaggttatttttaagcgaaagatagacattttaacctatcggagatataagcgtacacaatttgctacccgataaggcatctttattaagcagattataatttggaagtacggatgtaaccgcttacatttgggcttatttataattagtcttaataataactacatgtcgccacttaaaaagtttatccttttctgccaccgctggctgggttttatcaccgggataattgtttttatagtgagcattacaggttgtatattctgtttccaggacgagatacaggacgccatacatagctacaggaacgtgacggtgcaaaacaagccctacttaacaccgtcaaaactggaagcctttgttaaagccaaccaccccggcgccgacccgtcctacatttattattacggtaaagaccgacccgcggtagcactaagcaatataggaaaggagggcttttacagcacttacctgaatccctataccggccaggtaacccacgaagaacggctgcaaagcaacttttttgtaattgtagaatatatacacctttacttactgcttccgccggctattggcggtgtggtggtaggtacatcagttttgctttttgtggtgatcatgatcacggggatcatcctgtggtggcctaaacgcaaaaccgaccgcaaacgcagttttaccattaaatggaacggccgctggcgaagggtaaattacgacctccacaatgtacttggcttttatgctaccgctattgcacttatactggcgataaccggcttgtccatatcttttgactgggtacgcaaagggatttataacacgggtaatttgggcaggcaatacgctcatgaaaagcagatcgtaaaatcagattcactgcaaaagggttttacaagcagcattcctgtagccgaccgcgcgctggccatcgcacaacaacgttcgccaaacgcgcaaatgtttttggtttacatggataaggtaagcgccgcaggcactatcggcgttaccgcgtatgccaaaacactgcacttctacaacagcgacacctacacctttgataaatataccggtaaattactacactacctgccccagcaaaagaaaagccccgggctaaagctcaacgaaatgaactacgatatacacgtagggcaaattggcgggttaaccggcaagatcatcgcttttttggccagtttgatctgcgccagcctgcccgtcacaggccttattatctggctgggtaaacgcaataaatcaaaaggtaaaaagatacggacagcagtgcatcacaaaacacataaaaggcaaacacgggtgccggcttaacgcgttgttaaactataggctatttccacatcatcggttagggcatgccctgtgcaggtgagtattaaacccctggcaatatcctcattggtaagtacttcgttcttcaccatttcaaccttgcccgttttacagaaggccacacaggccgagcatataccgctgcggcaactgtagggcagcattaccttattttgcagcgcggcctgtaatatcgactggttttcgcccgccattacatcatgcaccttaccgcctatatgaattcggatcttttgcggcggataaacggtttggcttcccgtaaccggtacggtttccaatacaaaattttccttgcgtatgttacggtcgggtatgcccatatagtgcagggtaagcctgatggtacgcatgtagctgaaagggccgcaaagataaaacagcgctttttgcttatcaccggccagttgctggttcaccaggcgctctaccaccgcgttgctcatacggcggccttcgtcacttatgaggtaggtgatgtccaggcgcaaagcatattcgctttgcagtcggttaagctcatcataaaaaagcacgtcgcggcgagagcggttgctgtagattaaatgaagcttgcccgttccggggtggttgagcagatatttcagcaaagcaaataccggcgtaatgccgctgcccgccgcgaaaaatactacatcggcttcaccggcacgattatcaactgtaaaaacgccggcaggatccgccgaatagataatatcccccacgtttaccttacttaataaaaagcgcgagatctcgccattggctacccgtttaacagtaatagccagcaaaggctcgtccggagaggagcttaacgagtaggaacgcctgatctcctcctgatgatgattaaaaataagcgttaagaattgccccgccttgtaagctatacgcttaccattacgctccgccaggtaaaacgtagcggcatcgggcagttctctaacaatacgttcaaccctgagttcaagcatttaccaatacaattttaccaaactgctttgaagcgcccattttttcaaaagccgttttagcatcggcaagcggcagtacctcgtcaacaaccggtactattttgtgctcattgatgaattgcagcatagctttaaactcttcctgcgtgcccatggtgctgcccagcaactgcagctgcttccagaacaatggcctggcgttaagctcggggatattccctgccgtgccgccaaagaaaacgatacggccaccggggttacacaggtcgggtatctttgcaaaatcggggcccagcgcgctgtccacaacaatatcaaagccaccggcaaggtgctttaattcctgtgcccaatcctgcgccttgtaatctacacccgctgccgcgcccagttgcctggcccgctcaattttctcactgctgcccgaggttacaaacacctgcgccccggctgctacggcccattgcaacaaaaaggtgccggtgcctgcgccaaccccaacaatcaaaaccttatcgcccctttttaaatgcgctttgctaaacaatgcacggtaagccgttaaacccgccaaagggatggccgccgcctgctcccaattcaaatgcgttggtttgggatacaagtattccgtctttaccaaaacatattcggccagggtaccatcatcaggcaagcctaatatcttaaaatccttaccctgatattccgggtgatcgccccagttgtgcgaaggattgatgatcacctctttacccatccagctttcagcgccttcgcccgcttcggccacaatgccggcgccatcggctcctaaaatggtaggatatttaatgcccgcatacttgccttgcgttatccaccagtcgcggcggtttaaggccgctgcttttatttgcaccaatacctctcctgcgcccggcaccggtttggcaacttctttaacaactatcgggttctctgccgattcaagtacgactgctttcattggaataaaaatgatttttgcctcaccctgccctctccaggggagagggttctataacaacatccttgtaaagtcctctcctctggagaggatttaggtgaggcctatactactaaataaaaaagcggcagattgtttacctgccgcttttttatttaagccttctcctttggagaaggtttggatgaggctttatgctatcgctttagcatatagttcagaaacgtggttccagttgatcacgttccagatagcggctaaataatcagggcgacggttttgatattttaagtagtaagcatgttcccaaacgtcgatacccaggataggtgtacctttaacttcggcaatatccattaatgggttgtcctggttaggtgttgaggttacggccagttttttatcggcaccaacaattaaccatgcccagccagaaccaaaacgggttgcgccggcttcagatactttagttttaaagtcggcgaaagaaccaaaagtgctttttatcgcgtcagccaacgggcctgtaggctcgccgccgccgcttggagataacagtgtccaaaacagggagtggttatagtggccaccaccattgttgcgcacagcagccgggtatttagagatattttttatgatatcctctatcttggcatccgcctctggcttgccttccaatgctttgttaaggttggttacgtaagcctggtggtgtttgccatgatgaatttccatggtagctttatcaatatgcggttcaagagcatcagtagcgtatggtaacgccggtagtgtaaatgccataatatttcaaatttattggttaaacaatttatatgtgacgtagcaaatataagcgcagatattactttttgttctaatgaaatgtcatttaatcatatgttaataccgggctgttgccaatctcattagtactgccccactgaaagcagaaccagcgtacaggcataatcggtttcaatgccgttatctgcagccatgcgtcgcagttcctcgttctcggtgcccgggttaaaaattatccgtttgggttttgtttttaaaatgtagtcgtacaatggtggctggttttgcggcccaatgtataaagtaacggtatctatatccgtgtggacgttttccggtttctcaataggcacaccggccacctcaccggttttaatgcctacattcacaatgctgtgcccatggctcaccaggcggttagcggcaaggtaggcataacgcgaagggtcgggcgtggcgcctaatatcagtgttttcttatctgccatatgtatataacgtgcaagttataaaaatgatttattggcaggcttaatgctccggtaattacattcaaatggaatttacgttacctttggctatccacaccggtgggataaaatagaaaatgtcatcacaccacgttatccgcgaaaagcaggaaccagcattactggtaattagcctaattaacttcagcgatgaactgctgggccagctactggaatggagccctacggttgttgcgctgccgcacacggccgaagaattaaacagccttggcattaaagtagacgtggtggttgggcatgaagtaaccgctcatttacaagagcatgtaaagcttattttcacaggagcagaaaatcctatcgccgcggcattaaactacctggcaaacgagggttacccggcagtgaatgtagtgacggacgatgtggaaataaaccaatacgaacaatttattgagcgcattaacctggtaatttacagcggcacccaaaaaatttatcccgtaagtagcgggtttagtaaatggaagcccgcgggcgaacgggtaaggatattatcgttatgtgccgacctgcaaactacaggccttttagcacagcccgatggagatcatatcacccttgccgatggcttattttcgcttactttcaccgggccatacctgtttattgccgaggagctttaaaaataattacggcctgctttttgtataaaaataatttattaaggattaaaccgttaggatttttttcagtcatacatacaattcagcgcgaaagcgctggcgctttattactttcaagatgaaaacagcatataaaaaattattaacagtggccctcagcggaatgatgttcctgggtatgggcctcaacgctgatgcacaacggggcgctcgtggcggtggcggtggcggatttagtggcggcggtggccgtgggtttagcggtggtggcggaggcggtttcagcaggccatcaggaggctctttcagccggccttcgggcagctttagccagccatcaaatggatttggcaggggctcggcaggcgcgttcagtcgcccatcaggtagctttagcaggccaaacggcactgcgatagccccaaacagtaatggttttggccggggttcggtaggcgtagccggaggcaggggctatggttacagcaaccgtggcgcttttgccggcagcccgtactctggctttaaccgcggcagcggctatacaagaggttattatggcggccgttacggctatggttatggcaggccttatgcaaggcagtattatggcccgcgttattttggctatggctattataaccaccttggctactataattcatattacttgccacgcattggtttcagcataggtgtattgcctttcggttactatccgttctggtggaacaactaccaatactactacgccgatggcttgtattatcagtataatgataaccaatatactgtagtagaaccaccagtgggcgcggcagtaaattcattgccatcaaaagcacagcctatcactattaatggcgagcagttctatgagtcaaacggtgtatattaccgtgcggtaacccgcgatgacggtactgtagtgtacgaagtagccggtaaagacggtgaactgaataccagtaacggcggttctgacgatggcagctaccaggcttaccaggtaggcgacatcctgacctcgttgcctgaagatagccgcaagattaaagtaaatggcgaaaagctttgggtatctcctgacgggacttatttccaggagcagcgcgatgagaataataaaaaagtttaccgtgttgttggaacagccgacgaggaccaggctgatgataacaataaccagtaatagggtttaaaaattagcttcataaaagcgggggttgtaaaaagcctccgcttttttttatgcctgctccgcaacctaaggcattttaaatttaccgaaacatttttaactccagcgtattgatatagtataactaatatcaaataccatggaaaatcatgatcatacagcattaattgcaaaactactggcctgtgtagccgcttgtgaaaattgcgccacagcctgccttaatgaagatgaagtaaaaccgatggtgcgctgcattagcctggacagggattgcgccgatatttgcgctcaggctgcaaggatgttgcaacggcaatcagaaattgcccaccagtacctggtactttgcgaggaaatatgccgcatgtgcgccgaggaatgtggcatgcacgagcatgagcattgccagcagtgcgcccgggcctgccgcgaatgcgccgatgcgtgccatgcccaccaccaacctattacgcaggattaatacattatgaaagcattagtgctcaactgcacactcaaaccttcgcccgaaacttccaataccgaagcgctggccaaagaaatgatcagtgagatggaaaggctgggcgtacaaaccaaaatgatacgtgcggccgaccaccatatcatcaccggtataaaatccgaccttggcgaaggtgatgaatggccggccattttggatgaattgctggcatcagatatcttgatatttgctacgccaacctgggtaggcaccatgtcaagcatggcgcttaaagttcttgagcgcattaatggcctttaccctgcccgcgacgagcaaaaccggcccgttacctttaataaagtagccggctttgtagttaccggcgaagaggatggtgccaggcatgtggtaacagaaatagcgggggctttaatggatgtaggctttaccattgcgccgcaatcatacacctactggaacaacggccccggccccggcggcaagtatctggagagcgattatcgtaaagattggtcggtacaaacggctaaggccgcagctaacaacgtagtagctgttgccagagcattacggcaaacccccatacccggcagtgcctgataatggcgatgatattattacctttgcgccatgattgatgttgtacttaaaaaaggcaaggaaaaagcggttttacaaaggcacccctgggtattttcgggcgctattgaacaggtaaagggcaagcccgccaacggcgaggttgtgcgcctgcttgatggtaagaaaacctttatggcctatggcttttacaacaatcaatcgcgcgtggccgtacggctgctggagtgggacgaaaatatcgccattgacgacgactggttccgcgataaggtaaggatggccgttgcaggtcgtgccgatgtacttgagagcggtgaaacagatacctgccgtcttgtcttcagcgaatctgattatttaccggggctcatagtggacaagtatgccgatcacctggccgtgcaggtactcacctcgggtatacaaaacgtattgccggtaattattgatgaactcaataacctgttaaaaccggccagcatatttgataaaagcgacgctgcctcccgcgcgcacgaagggctggaaacttctaacaccttgcttgccggcacgctcccgccggagctggtaatggtaaaagaaaatggcattacctatggcatcaacatcgccgaaggccaaaaatcgggcttttactgcgaccagcgcgataaccgacgcatactggcccattacgccaaaaaccgcaaggtgctcgattgcttttgctacaccgggggctt

SEQ ID NO: 2232 - DNA, 24161 bp, synthetic construct
  source 1..24161: mol_type = other DNA
  misc_feature 1..24161: note = Synthetic
aaaatgagaaaaatgatgttatggacttttatcgtaatactttatcaaaaaacaaaaccttaaacgagattgacctacaaaattttcctactctttggacaacaataaggaaactaaacggtgaatttatattatatcaaagatgtgatggaatcgacaaaagaatagaaatcacaaaaaatgcaatctatttttacggtccactagaatctcatgctgatgcaataaatcaattaataagattatctgatgaggacataaaaattgaattaaaagctaaaaggcaaaatggcgaaaaaaatgcgatgttttcaattaccaaaacagaacatgagaacatctattatttacaatattacagcgaaaacggtttgtttcaagagttaattattccaacaaataaagcgtccgaatttgatttaatagtaaacaattgtgttcaaatgaaacgaacagaatttaagggattcgatagaattgaatacaatgaataaaaaacggtgtacaacattgtgtataattcattgcttggtctgtgtgtaattggaaaatcctcacggattttctattcggtttttatttgctaaattacgtgcttaaaccaacgcaacaaaccatacacagagacgttagcggtcattgaaaagaacatttcaattaacctttaatataaaacacagaaaaactattcaactgacattttattatatttatttctatattcaattggagtaagaccagtaatttttttgaaaatggttcgaaatgcttttgtatctgagtaacccacgtcatacatcacttcattaatattttttcgactggtttcaaaaaatcgtttggcagtttcaatcttaactctattaatatattgcaataccgaattacttgtagcgattttaaaacgtctttcaaaacttcgtctgcccaatgagaccaaatcggccagctggtcaatcgtgattctttcttgaatgttagcttcaatatattcttgaactaatttaatagattcatcagtatggtttttttgaccttgaaacatggcaaaagtagcttgactatccctgtcaatatcaatggcaaaatattttgaagccaatattgccgtttccctatccgtatatttttcggttaaataaagtaataaattccaatacgagtttgcgccaccgctagaataaagtcgttcttcttcggttataatatgcccttctacgacttcaacttcagggaacatttcacgaaattcattttgaaaaccccaatgtgtcgaacattttttaccgtttagtaaacctgtagaagccaacagaaatgcacccacgcatagcgaggctacttctgtaccttttttatactggtcctttatccaaggtagaagtttgctattggatgcaatagcggttttcatatcaccgaatagtgcggggattattattaaatctgttgtctcaatatcctttaagagttgagaagtgtttacagaaaacaaaccttcgtttaattttacttgcctttttaaaccaactaattgcacatcaaacaatggctttctaccactcacaaccataaattgattgactgccgaaaatagatattgtggatctgctatggcctgcataacagaattttcagggacaaggatgctaactcgcttcatttttcaacctattttaagtaaaattacaaatacaagtttaaaacatgtcgtaaatcaccctttagttgtcattattctacatcatctatttttaaagaacggtgcatctttgtattattaattttaaaaataaatataatgagcaattcaaaaattaaagttacagaaatcattgacgcagaaataaacaaagtttgggattattacaatgagccgagtcatattgtaaactggaactttgcagacccaagttggctttgcccatctgcagaaaacaatttgagtgtaggtggtacatataaagccagaatggaggccaaagatggtagttatggttttgactttgaagcagtttatactgaaatttcaaaacgcaagagctttacttatgagtttgggggaagaactgctactgtagaatttaacgatatgggagaacagacagaagtcataataacttttgaccctgaagaagaaaaccctatagaaatgcaaagagaaggttggcaggctatcttaacaaatttcaagaattatacagaaaacaattaataatgaaaatcaattcttatctcacattcgatggcaattgccgcgaagcgatgacgttctataaagaatgtttgggtggtgacttaatgctacaacctgtagaaagttcaccaatggcaaacaaaatgccacaggaaatgaaaaaatgtattttgcattccactctcacaactgatgcgtttgtaattatgggttctgatatgacaccagaaacaggacttgttaaaggcaatgcaacttctatggtaattaattgcggcagtgaagcagaaatcagaaacacttttgaaaagctgtcaagagaaggagtagcacatcataaaattgaaactactttttggggagctttgtttggcgacctaacagataaatacggcaacaattggatgttaaactatgatgagaaaaatcaatgtaatagcctaaaaaatgaaaaaaaataaaataatattttggacagcgacaataatcatcgctttatttgagggagtaatgcccgcattgacttcgcaaacagaattagcgaaagaaggaataagacatttagggtatcctgaatattttggaatggcattagttatctttaaaattttaggcgtattggcgttaataattccacaggttcctaaaagattgaaagaatgggcttatgcaggttttacttttaacttcctctttgcaaccataagtaacggagcagttgatgggttgagtggacagaccttttttccattagttatactagcaattttagtcgtttcttatatttactatcataaactaaatacaaatttaaattagatatcatgtcatttctagcataaacacacaatataaaaaccaagaaaggaaagacgtctggagattttaaaaaatttgcatagcaaaatgagcttgttatagacagaaaacttaatcctaaaacgaaagcacagaaattacgaattgactcagaggatttgaattaggacacggacacccaatggtaatttatgaaacattcaaaggtaaaatagaataacaagagaaacaacgaaccgctaacattgtatataaaaaattgctattttgtgcttaaccaatgtgagttgctttgattgcttgcatctgattttccttcggaaaatcctcgtactcaaacacgcaacatttcatatacgtaaccgttagctgtaatggtaaaaaaggtccgtgcaatcttcaaactttaggcaaaaacctcatttcggttacaagacaacttgatatagttacatttagtttttaataatctgtgaaatttgcagagaacaaaaacgaaaaaaaaatgaactataaaattttaggaaatacaggattaaaagtttcaacactttgtttgggaactatgaattatggcggaaaaggatttttcaactatatgggcgatttaggtcaaaaagaagttgacgagcaaattaaaacggtagtcgattcaggagtaaattttatcgatactgccaacatttattcagaaggactttcagaagtaatgattggaaaggcaatcaaaaacctttctattaaaagagacgacctcgttttggctacaaaagttagaggtagtatgggcaaaggagaaaacgatagaggtttgtcaagaaagcacattatacagcaagttgatgaaagtctaaaacgactgaatactgattatatcgacctttaccaattacacacgtctgacccactaactccaattgaagaaaccttaagagttttggatgatttagtgcgtagcggaaaggttcgttacattggcgcaagtaattttatggcttggcatttaatgaaagcattaggtcattcaacctataataatttagagaaatttgcttctttgcaagctaattattcacttgataacagagatttagaacgtgaaatgattccgttattacaagaccaaaaagtaggattaatggtttggagtcccttaagtggtggacttttaaccggaaagtacaaaagagacggaaataacgagaaagggcgtttgaacgatttcccatttgagccttttcataaagaaagagcgtttgatgttttagatattctacatccaatgtcagagaagaaagaagtttcagttgctcaattagctttggcttggttgttacaccagccagttgtttcgagtataattattggtgctacaaaaatgacacaacttcaagacaatttaaatgctgtggacattgaatttaccgccgaagaattacagaaattggatgaagtgagtactttgccaatcgaatatccaaggaatgtggttgaagtaatgaccgcagacagaagtaacggacaagattttttatcgtagctaaaaattatggaaaataataacagaccaaaagtcgtaaattcaataacagaattgcatcagattttaggattaccaaaacctacaaatcccttgataactttaattgaccattccctagaaagagaacaaacggaattaggcaatcaaaaaatggtgcttaacttttacaatgttacaatcaaaagaagttttcaaggtcaattaaaatatgggaaaagtcattacgattttgacgaaggtacaatgtcctttctttcgccaaatcaagtcttgtcgatagacgaaaaaggcgaaagaaataaagacggttggtcgttattgtttcatccagaattaattgcaaattatggtttgtccaaaataattaaaaattatggtttcttttcctatggtgtaaacgaggctttgcacctttcagataaagaagaacaaatcatagaaaatttagtgaaaaacattcaagaggaatataattctacgattgatttatatagtcaagatgtaattgtttcaaatcttgagttattactcaattattgcaatcgcttttataataggcaatttatcactcgaaaaatggcgagtacagatttactcgccattttcgaaaataagttatcaaaaaaatttgatgaaaatttacaagctcaattaccaactgtgaaaagtattgcgagcgaaatgaacgtttcaccaaattatttgagtgatatgttaagaactgtaacaggacaaaatacgcaacagtatattcattctaaacttatcgaaaaggctaaagaatatttaaccacaacttcaaaatcgattggcgaaatttcttttcaacttggttttgaacattctcaatctttcaatagattgttcaaaagcaaaacagatttatcgcctttagaatatcgaaattcatttaattaaaaaaatgcgaaaactactatagctaacaccgtataaaattaattgctggtttctgccaatttacgaaagtcctcgcggactttctatctgtaatttatttgctaactttaatgtgacacgtcctgaataaaggctacataatttaacacaactatatacaaaaatgacaaagtaatcagacggtattcaagacttttaaattaaaaatccagtttatttttttcggtttttttttgagatctacaataaaaaaaacaaaaaatcgtctatcccatttttttgaattaacaccatgaacaactcaaacaacaaaaccaattttatattttgtatcacataatacaaacaccattgtttcttgtagcttaaaatagccagtacctttatgaaccattttatagcactatctgttatcaaaaacaatatttaaagtcgttttttgtatttgtgatattttcgtattacaaaattatcacaggatttattacaaataattatagcatcttatcatattagaatacttggtttgggactccctccccattcaataaaatcttccaacacgttttcattcaataaaaatttctccaactcatcgcaattgaattttttgtcattattgtaggacttatgaaattcaaaatgatccccatcataacccaccccaactctaacaaaaagcaaattattcagaactttatcaaactcccgcactaaattttcaggaaggtacttatcaattctttttaatgttttgacataaccttctaaactatttttttctacttcacgcttactattttcgcgttttttatagatccagactatcaactgtaaaaactcccttgaaaacaaaaagtcttctcgttccgatcttagtttatattggtcacaataacttccatcgtggacagattccaatagatcacgaagatatttggaactggttacattctctttctcagccttggctataattttcgcttttaataatttcgaaattctaaagttaagcgttgtatcttcatccgcgattgattttttagtattcatttatgtcgatttagattactataattgtaagttaaacacagtttttaggaggaacctctcagcctcatcttctgtaataagtattttcttttcgttgcttttcggtttcgctagcttcttgaatatacgctctgtccgtgacttgtcaccagttacaaaatcaggtatatcaaatatattttttatgtttaattgagggtcattaaaataatcttttgtttgatcctgaacagggaaatgctcctgaatataatcccaatgtttgtcaaatgcttctttctggatctcaaatgatcttatggtttcttcactacaattgagaacatcctccttgaggtgctctgccatccaattagacacatgtctgtaaaatgcagcgctcagggaatatctttcggaaagaaaatggaaagctttagggcttagctcagctttcatatccagtagctcatagatgttttcatccaaggatgaagttttgcccaacacataaaaacttgacgcaccattatcaagtatataattatccccgttctcacgcattatgatgacagtatcgaaaacggaatcgaattccttatccatccacttgatatccagatcagcccacagcttccgaggtaagtagaatatgagtggcttatacaatttatgtattaattcaccgtgcttatcttttaagggcttttccaatatactgatttaggattttattaattcagaataatcatcaggaaactcagcatcaatatcacgcaggtatttttcaagtgccttcatggaagaatgtcctgttatctgcatcagtttactcttggcctcaaatggtgacgagccctttacgagttccctgtataattttgtaatatatgtatgcctgaagctatacaggccataatccgctcccaaattaaatgggtctttgacgacccgcttgaaccgtttggaaaagtagtcccttttattgctcagctctgcatcccatactccacctatgccatctggcgtaaaaaaactgtgctccttgttcatcttggaaagatctgggagatcccgtaatagaatatcgggaatgatcttcgttttcaatggactgttctttgccttgaactgtatgcgcttatttttgatgtccaaatcgcccacacgcaatctacaggcctctatgggtctcaaaaaattgtaggagatgaactttataaagagcaatagggtttcgtccgttttttctagatgttcgaaaatagttctctgttcttcccgtgagtatgttctgtttcgttgtggtacagattttagaacaggtattttttttataaaattagactgtatgatgtcattgtcctccaatccctgcatgatactgcttaaatctgttctgtaattattacggtttctgggactggtcttgtccaggatatggttcaaaaaatcaattactatttttttatcaatgtccgtaattgtcttcacttcgggatggttcttctcgacccacagcaaaaaattcttcaaccgattctcgtagctccgccttgttgtgtcactgataagtttttccttatattttaaacctattttgaacgcttcatcataaggcattgcgaccgtaatagattcatctactgtttcaggatcaactggtttcttaggcgttttgttaccgtttaccgggcctttgttcgactttccatcctcacgctcttggtatcgctttgtgttatcttcgaagggattaaaaccttctttcaataaacttaagagtttggacctgtaaacgttcaaaatggcgaggcggtcttctttagtagtatatctattggcaccgccatagatattgttcatgcgctggagttttccggtatctggatttcgataagagtaatggacgtgccaacgcttatttaaattcccattggcaatatagatttttggggacgaaaaatttttctttttttgcaaactgtgttctgaaccgtgttcgtttccgtgttcatttgcaagataacaatttaaattaaacataaaaaaaatggttttgaataaacaaaaccattgatttgaaacgaattacatctagtagcgggaactggactcgaaccagtgaccttcgggttatgagtttgaaaacacctcgaattttacgctatatttaccctatgacactaaaatcgtgtacggaatcgtgtactgcgattagtatatttcttttcaaaaataacacaaaatatcatattgacgcatggattattctgaatattaaatgcgctatcaaattcttaaatatttcaaaatacgcttttcctataattcctatttcagatttgatacgcataatggcttctttctaatctaaaattaatccgacctctaaaattactttcctgaacaaggttatcttttataactaacaactacttattaaatcatagaaaaatgcaattagttaaaaataattgtcaaaaaaaaaatctttaaaagaattaagttctcctaccaatcaaaaagaatgtaaagacagtaaagagctttgcaacttataattacaaaagatcatgatcaaatagcggagatgcaacagtattcaaaacatggttgatttggattaaagatagatatatggttgaagagaattacgacgaacaagaacactgaaaaaactcaaagatatttagtctaaaattgaaggtgaaaaaagaataaaagtttttttttaaaattaggaggatatgaaagacgccttatgggtacgaaattgatcatattattatattatcgataggaggaagaactgacccttccaatatgcagctattaatcattaaacgacataaaggaaaaacccttaccgtgtctgtatctgttttttgaataagtacttacacggatgcttaaagttgatacaactaagacattatattaaaaggattacctatgggtgcttttaagtgaactttggatcaagtaggacgttttaggattagagaacattttaagacagatgtgtctccagtcttttcttctttctatttgccacttaatttttttttaaaatttacttggtttttaactcaaaagacctacttttattttctatccctagattaatggccttttaagtaatttttgactcatcaaaatatgaggttattgactgtagcatttgttttaataagcacctgtttctttagtttcctttttggttaagcaataataattatgaaatatttacgctatttcgaataatgaagagctagctataaaatactatgaacaaaattttttaagcgatattaaataaaaaaaagcgacccacaacaagtatgggccgctttgaatgtttacacaacggaataatccttattgtgaattgctttcagattataaatataagcatttgatttttattaagcttgagccatcactcattttcaataaaaaaaacatcaatattacacaaaacacatattatgaagagaattttaggattggatttagggactacaagcataggttgggcacttgtagaagagtctaaaaacaaagaagaatcaaacattataaagctaggagtgcgggtaaatccactaacagttgatgaaaaaattaattttgaaggaggtaaacctatcactacaaacgctgatagaactttgaagcgcggtgcgcgtagaaatctagacaggtatcaactacgtcgtgattttctaatacatgaattaaaaaagcaaaactttataaccgaaaatacgccccttacagaaataggaaaagacactacacatcaaacaatagcattaagggcattagccgctaggaaaaaagtctctttagaagatttgtctaaaattttattgggcattaataaaaaaagaggctataaaagtagccgaaaatctaaagatgaaaatgatggtgttgctattgatgggatggttgttgcaaaaattctttatgataataaattgatgccaggacagtatgtgttcaacttattgacccaagaaaaaaaacatatccctgacttttacccatctgatttaaaaactgaatttgatgcaatctggacaaaacaaaaagaatattacccagaaattcttacccaaatactctatcaggatttaaagggcaaaaataaagggcaaacatggactatttgttcaaaaccatttcaaattgaaggcataaaattagagggaaaccgaaatgaacaaaaaatcaaacgctacgaactgcgtaaagatgggttatctaaaaaattaagtctagagcaccttgctatcgtgtttcaagaaatcaataacgatatcaaaggtacaagtggttatttaggaaaaataagcgaccgaagcaaagagctttatatcgataagctcacagtgggagaatatctctacaaccaaataaagaaaaacccgcatacttctcttaaaaaccaagtattttaccgtcaggactacttagatgaatttgagcagatttggaatacccaagcagagtttcatccagaattgagtgatgaattaaaagctaaaattagagatatcatcattttttatcagcgacctcttaaatctcaaaagggactgttgagtttctgtttgtttgaaagttggcaacaagaatactttgatgaagtaaaacaaacgaaacgaaaaagaacaattggacaaagagttataccaaaatcatcccctctttttcaagagtttaagatttggcagaacatcaacaatttagaatttaaatactttggcaaccctaaagatggatcggacaaagatgccgccagttttaaacttgatgaagaggacagaaaactactatttttagaagcgaacttgagaggagatttaaatgaaacttcagttttgaaattattaggcctttcaacaaaagaatggaaaaccaactttaaagaaggaataaagggcaatacaactaacgagaaactttttaatgtttaccaggaaatcgctactagagaaggttacggcattgattggaaagaaaattctgcaacagaaattcttgaagaattaaaagccgtttttcctagcattggtattgatgcatctttattagagtttgacggaactctacaaggaaatacttacagcaaacagacaagttatgaattatggcacttactctattccgcaggtgatgatacggtcatttcagaagaggataaattaatttacggaaactctgatgtgagccttaaaaaaaagttacatcaaaaatatggttttgagccagtatatgctgctatgctcgctaatattagttttcccaatgattatgggaatctttctgcaagagccattcgaaaaatcctaccttatcttcaggacggttttaattattacgaggcttgcgacaaagcgggatacaatcattccaatagcataacttccgaagaaaataaaaaaagagaacttaaggagcgattagaaattttaggaaaaaatagtctgcgtaacccagtcgttgagaaaatacttaatcaaatgattcacgtggtaaaccaaatttgcgatacttacggaaaacccgatgaaatcaggattgagttagcgagagatctaaaaaaatcagcaaaagagcgtttagagacaacaaagtacattaattctgccactaaaatcaatctagacattgccaaaaccatccaacaacaatttggctttacgcctaccaaaaatgatattgttaaatataaactttggaacgagctcgctcctcgaggacacaaaagtctgttttcagatgagcaaattaaattacaggatctattcagtagtaaaattgacatagaacatatcttacccaaagcattgatatatgatgactctttttcaaacaaaacattggcctatcgccacgtcaatttaaaaaaagccaatcgcacagcgattgattttattacacaagataaaaatacagagttagaaaactatattgaacgtgtagaaggactttatgataaaggtaaaggccctataagtagaggcaaacgagaccgtcttttaaaaagcgctaaagatatcaaagagggttttatagaaagagacttgcgcaacagtcagtacatcgcaaaaaaatcacgcacaatgcttctagaggtttttaaagaggtaacacctactacaggaagaatcacggacaggcttagagaggattggggaatcataaatgtgcttaaagaactcaatttaccaaaatatagagcgatagggcttatagaaattgaggaacgtaaaaatgataaaaaaattgagaaaataaaagattggacaaaacgcaatgatcataggcatcatgcaatggatgctttggcagtagccttcactactcacaatcatattcaatatatcaataatctcaacgctcgtagggacgaaactcacgataagcataaaactatccagaatattgaaaccctaattacacaaaagtttgaagatgacaaagggaactataagcgaaaattcataaaaccaatgcctaaatttagaagtgaagccaaaaggcacttagaagatattttggtttcatttaaaactaaaaataaagtggtcactcgaaatttaaataaaaccaaaaaggatggtggtttcaatactgctttagaattaacgccaagagggcagcttcatgaagcaaccatctatggcaaatctaaagcgcccaaacaaaagccgaccaaaattaacaagaatttttctattggagaggtacaacaaattattcattttggacaacgcgaattggttttgaaacatttgtctcaatttgagaacgatcctaaaaaggcttttgatacaaaaacgctcaaaaatcaacctcttgcttggaatgatgagcctttaaatgaagtactctgctttgaggatatttttacaattagaaaagacgtttcgccagggttgaatattgataaagtagttgacctaggcatccgagaaattcttaaacaacgcaaagcaaaacacaacggcaatgaaaaagaagccttttcagatttagataaaaaacctatttggcagaacaaaggaaaaggaattgccattaaaagggtcaccataaccggtgtaagcaatgccgagccactccattataaaaatgatcatgtcggagaagtgcttcttgatgaactcgataaaaaaatccccgtagattatgtgagccttggtaacaatcatcacgtcgcaatttatgaggatgacaaaggcaagttacaagagaaggttgtatcactctatgaagccgtagaaagagttaatcaaaatttaccgattatagctaaggggtacaacgctcatttgaattggaaatttaagttcacaatgaagcaaaatgaaatgttcattttcccatctaaagaatttaatctgaatgaaattgatttgattaatggtataaatagttctatgatcagccaatgtctatttagagtccaaagcatttccaccaaagattataggtttagacatcatcttgaaaccagttctgataataatttagattttacttatcaaaggattcgttcgccagaaagattaagagatttaattaaagtaagactaaatcacttaggtcaaattgttcaaataggagaatactaaaaaatgatcaaacgcaccctctttttcggtaatcccgcctacctcagtacccgtaacgagcaactggtggtcaactttcctgaagaaaacaaagaggaagccattattcctatagaagatttaggctatgtggtactagaagatccgcaaatcaccattaccaacggtttaatgatgaagctagttcaaaataaaacggcagttattacctgtgacaaacagcacctcccctgctccttgttacagcctttggtgggacatacagaacaaactgagcgcatgcggcatcaactcaatgccagtcttccgctaaagaaaaacctttggcaacaaaccgtaagtgccaaaatcatgaaccaagctctacatttagaagctagagggaagaatgccttaaagctgaaacgatggagcactgacgtcaaaagcggtgataaaggtaatttggaagctgttgccgcggcatactattttcagaatttatttcatgaggtggatgggtttagtcgtaatcaaaaaggggtaccccccaacaatcttctcaattacggctatgccattttaagagcggtggttgctcgagctttggtaagtagcggtatgctgccctctgtgggcatctttcatcgtaataagtacaatgccttctgcttggcagatgatattatggagccttaccgtatttatgtggatgcagtagtctttgatcttgtagaaactggatgcgacttgaccgagctctctacaaagctaaaaacagaacttttaatgattccagctttagacacgcttgtagatggcaaatggagcccgttgatgaacgctgtaagcagaagcaccagtagcctttatgagtgctttttgggaacgagtcgtaaaatactgtatcccgaatataccaatagtcgactccatatatgagtgaacacagcaacttttcaagacttaaccaataccgatctatgtgggtacttgtattttttgatttaccaaccgagacgcttacagaacgtaaaaccgctgctcggtttagaaaaaacttattaaaagatggttttgccatgtttcaatttagtatttatatgcgtttttgcgctagccgagaaaatgccagtgttcatattaagcgcaccaaaagaagtttgccaaaaaaaggaaaaatttgcattatgcaaattacagacaaacaatttgggatgatggaattatttcatgggcaaaaagaagtagaggcagaagctcctagccaacaacttgaattattttagaaagcggaatataaggttgagtaaaagaacatcttaaagacgatccatattttttatatcctattttttgatataaaaaacaggatatcagctttttatagctggtatcctgcgaatccactactaaaatagtattctgaaagcaattcacaacagttccttataacatcctgtatttatacaccctgcgaatccactactaaaatagtattctgaaagcaattcacaactatgattcatcttttagaaataatattactcctgcgaatccactactaaaatagtattctgaaagcaattcacaacacaaaaagctttttcctgtattattttgaccctgcgaatccactactaaaatagtattctgaaagcaattcacaaccaataaaaagaattgggaaaatcgtgctgacctgcgaatccactactaaaatagtattctgaaagcaattcacaacaatctgctgtttccaatggttttattagagcctgcgaatccactactaaaatagtattctgaaagcaattcacaactagcggtcaatacgatattataaataacgtcctgcgaatccactactaaaatagtattctgaaagcaattcacaacgattcttttaaagttatagcagatgggacacctgcgaatccactactaaaatagtattctgaaagcaattcacaacataactcaggtgatgctgttttaacagctgcctgcgaatccactactaaaatagtattctgaaagcaattcacaaccaacgtctggctgtcctgtataaccaccgtcctgcgaatccactactaaaatagtattctgaaagcaattcacaactctaattggttagcgcaattggtggcgatgacctgcgaatccactactaaaatagtattctgaaagcaattcacaacataaacgccgaataatcaaagaaaacctaacctgcgaatgcactactaaaatagtattctgaaagcaattcacaacacggccaattcatcattggtttgttccacacctgcgaatccactactaaaatagtattctgaaagcaattcacaacccaaatgatggaggtgactggtaacattaacctgcgaatccactactaaaatagtattctgaaagcaattcacaacactaacctatctcacgacacaaaactaatacctgcgaatccactactaaaatagtattctgaaagcaattcacaaccagtacaatagattggattttagacagtcccctgcgaatccactactaaaatagtattctgaaagcaattcacaactcatgtgtagatcaataagcctgggcaatgcctgcgaatccactactaaaatagtattctgaaagcaattcacaacaacaagagattcacgcaccgcagtggtttgcctgcgaatccactactaaaatagtattctgaaagcaattcacaacacgaggttattctttataaataattaaacccctgcgaatccactactaaaatagtattctgaaagcaattcacaacaatatacgtgaaggtatctataccaaaacccctgcgaatccactactaaaatagtattctgaaagcaattcacaactctctgccttttggtcgcgcacgcgctgttcctgcgaatccactactaaaatagtattctgaaagcaattcacaacgataataacttcggaaaagaagctgttatgcctgcgaatccactactagaatagtattctgaaagcaattcacaacgataaagtctaactgcttttgcctgtaaagcctgcgaatccactactaaaatagtattctgaaagcaattcacaactatgttactggactggggtaaaggcgtagccctgcgaatccactactaaaatagtattctgaaagcaattcacaacgtattatggtgctttaaagaatattaccatcctgcgaatccactactaaaatagtattctgaaagcaattcacaactaattttatgaggaccagatattcacctttcctgcgaatccactactaaaatagtattctgaaagcaattcacaactgatgtgcagatcaataagcctgggcaatgcctgcgaatccactactaaaatagtattctgaaagcaattcacaacgttaaaaacttcgatcttggaacaaaaagtcctgcgaatccactactaaaatagtattctgaaagcaattcacaacgaaaaaacgtgtttcaaaaaattacaagtcctgcgaatccactactaaaatagtattctgaaagcaattcacaactaattcatgctcgtagatgataatgtttaccctgtgaatccaccactaaaatagtattctgaaagcaattcacaacagatgcgtttttctccaatgggtgttacgccctgcgaatccactactaaaatagtattctgaaagcaattcacaacaaaaagcctcttaaaacagcgagtaaaaagcctgcgaatccactactaaaatagtattctgaaagcaattcacaacatgatcaagactgtcaatttcctttagcctcctgcgaatccactactaaaatagtattctgaaagcaattcacaacggaataattaaaggtctttttactccctgacctgcgaatccactactaaaatagtattctgaaagcaattcacaacacgatattgtgcgctctatatcaatgaggacctgcgaatccactactaaaatagtattctgaaagcaattcacaacactagagcttctttgcctaaagaccaaggacctgcgaatccactactaaaatagtattctgaaagcaattcacaactggataagtgtacggtaaaatttgaggtcacctgcgaatccactactaaaatagtattctgaaagcaattcacaactagtgtatcatttatttaacctctttagcgcctgcgaatccactactaaaatagtattctgaaagcaattcacaaccagtactctacagtaatatgtatagtttctcctgcgaatccactactaaaatagtattctgaaagcaattcacaacacaggagtaggagtcatcacgcatgcagtcctgcgaatccactactaaaatagtattctgaaagcaattcacaacatacgttgactatctgaaacatcttgttgacctgcgaatccactactaaaatagtattctgaaagcaattcacaacactagagcttctttgcctaaagaccaaggacctgcgaatccactactaaaatagtattctgaaagcaattcacaacctataatctcttgttacgtcgctatttggcctgcgaatccgctactaaaatagtattctgaaagcaattcacaatacctaaaggcatcgctactttacgagattccctgcgaatccactactaaaatagtattctgaaagcaattcacaaccgacttctttataaggttaaagaaatggacctgcgaatccactactaaaatagtattctgaaagcaattcacaactaacgacctctttgttctctacgtaatttacctgcgaatccactactaaaatagtattctgaaagcaattcacaacataagcaattaattttacacccgatttgtttttgagcatttcaaaaaaattagtgttggctagttgatttcaagataatttaaaattaaaaagagcacttgaagaacagaccctatttacaactatttatcaattttgttaaattagtaccctgtgagaaaccaccaaatcaaccaaatcatctccttcatccaaatctttaccctcaagcataccgctgcaaagtatgttataaccttgcttttttaaattctctgttttagtattccaatcaacaaattccgttttgtctggaaacatgataattttaaattgtttaacaggtctcaataattgctctttaaaattgtttttagaccctgtcgccaaccacaattcaccaggaaacaaaatactcataatgattgctgtcttttctgattcaacaatacaaattgtatggattacactgtaatcacacaggttgtgcaagccaaacaaacattgttgttgcacaaatccttgtatacacagcactttatgcatccatgaaatatgtgtatacggtcttttaacccttttaccagtgcttgtatcatacaacattactttaccacaatacacctccatatattcattaacctgccaaaatatggtagcgccattccaatgtgttgatgttccaataaaatatttcttaatagcctttataatatctacattacaaaaatgtctggttaaataagtgataaaattattgttgttgtagtgcacaccaaaactcgaaagtacattaatgtcatgatgactaggttgtttaacaactgatcctgttaaagaaaccaatgaaacgttgccatttggttttaaatggtattggcattttgattcgcgatcacatctccccacatttgcttccaaataacattgttcttcgttgtcggtataacgaacaaaggattttttatgacaggaggggcacgagaatttcttactgcttttgtctagactatatttaaactgattcatttttatatcttattgaaagatttactcgtacttctcgtacctatcgtactttttatagaaagtacgagaggtacgaactcaaacattaccttatcttttattgaaaacattatcaaacaaatactgaatagcttcgctgtcagtcaaaacatccacttgattttctattttcttgaattttcttttcaggttgacattaccctgcattagcataaataactgcatatactccttttcaggaagagctttcgctatagtatgtacagtatttgcatccatttaagagtctactggttcattcttattaagaattttacgtatacctccctcactcaagccatattgagcggcaatttgtgtattgggcacacctttcttatgcaggcctattatttcttcatttctcaccgcatggtttggtgaggatgctcttccaagatggtttgcttcactatcaaaatcaacaagttgaaattttaaaaaattatgatcttgaagtatctcacaaaccactacattctcctcgttgtatacacatcctgtattacgttgtttaatttgtttcaaatagcgtagactgctatcggatgcactttcaccaatggcaaatgcactatcgcagaagttgatgagcattttgctgccagccaaatcgttttttgtcaacggttttgaagagtccctttttggtgtatgtgccaaaaccaaaattgatataccgtatttcttaccaatggattttagttctttcattaacggtaatgcgtcttttgccttttcgttatcattcctcaaataggtgatattatccaccactaatatggtagctttagtatcttctaagatttgcacaacagaatgaatcaaaaactcttcaaagctcttgaactgctttgggatttccatctctggattaatttctgctcttaggaaattgtttgaaaacttataatgatccgaataattattggaatatcgtttttcaaactgcttgtcggatagttcaaaatcaagatagataaccttttgggatcttgcctctaactcaaaaccagtaataggaagccctttggaaatactctcgctaatttgcatgcctaatatgctcttacctacattggtgtcagcaaacagaatgcatatttcaccctcaaaccaaaatacaccaaacaacattttgggtattggtctttttttggcaatatcaatccattcattggctgttttcactacaaagcatttgctcccatgggcggattgttccaatactttgatgcttccatcaatttcctctttaacagccttataagcaattttatctataaaaggttcagaatgtgttttcatgtctataggttttgtattgtacatatttcgttatacataatattacaatccaatgaaaacatattatttggaacgcagaaccaaaactgttttcctgttccgtctggttggtacaaataattgttaagatcatttaaaaccttcagcaattcaaaacgaaaatcgttggaaaatacttgatccttaatagcaagctccaacatccgttttatgcttaaaacctgctggttggattcgtatacataaggattcacaaccttgctgtataaccatgtgataagaaatacatactctttagtttcatgaaagggtgttgaaacatacattgtcattcttataggtatcacattttccgtgttttcaccttgattgaagtcaaagtacccttccaagatatttcttgtatattcggaagcggtcataccctcatcctgtgcagctaactcaatttgtttcttaagaagctcgtctatcctgatgtttaaaatcgatttcataattaggaattttgagttatgaattgaacaacatccgattgtcggaatctgatgtttttatcgaattttagaaagcgaattttcttgtcacgacgtagtttccataaagtgacgctactgcattttagcatcatacatacctccttagtattaaggaagatgtcagggttcgattctgaagatgtgagaaatggactgttgttgtattcacgaatcaatttttccaataagtcattgttctgacttattaatactattaaggttttcagcaaaccttttaatgagtgtttattcatagcaattaatttaaattaaaattaatcacaataaactgattattaactaattatactatgaggaaaggagtatttgttaggtggaaaccctgtaaagttaggtggaagtgtgtatgttttaagagggcatgtcaaattagcttctagccaacagaaatgcggttagatttttttcatattcttgcaatcttattttgtcgatatgattacccgatattaagggatctctaatttctccaacggtaaaagaaaggctaaaatgtttatttaataaatttgaaaatcgacttttggaatttttgattagttccctttcattaaggacgtgaaagagacagcttaattttgcgagattgaggtcattctctgattttataaacaaacctaaaaattcaaacccatttggtgaactaaataatttatctttaaactcgttatacgcataatcccaatgcggatacattgtaaagtgctcattaggctggaaattatatatagtgttatatgacaccaaagtctttaacttaacttcaaattgaatgacctcatataagtactgatttgtattaatcaacatatctgtaaaataatttttatttccagttacgtagtttattattatttcacgttgatgaataagtttgtatatgtaagcgtttcttttccgtagcaataaatcaaaataactttcaggtcttaattcttgtatggagggatcataagccatctgcagctggatgtcctgttgtaattccgtgaagtgttttttaaaataatgaagtgtgatcttccttttttctgcaccctcacttatacccacaaactctccagaatacttcagattatcgatagaagctaaaagtattaatgtttgttcatagtgttctaacagaaaaaagtatagttcgtttttgaacttttcagttagaaccacattgggttcaggtcttaaaactgttctactccctagttctataaatttaaaatctcgattctgttcgtcatcttgactaggagactggacagaaggaaagttgagtggagccgcataaacggtagtcataattttcctttcaatcaataaagcgttctgatcattaaaattcatttcttctaaattggattcctttaattctccgaaatatctcatagtcattttttttattttatgtattctgaataatcttctggcagttcggcatcgatatcccgaagatacttttccagtgacgacatggacgtatgccctgtaatcaacatgagttttgatttgctctcatagggtgtcatcgcttttctgatctccctatataatttcgtaatgtatgtatgcctaaagctatataaaccatagtcatgtgacaagccaaaatgatccttgacctttttgaattgtttagaaaaataatccctcttgttactgtcagaacctgaccattccatacctataccaaatggggtgaagagataatgttctggatcaattttagaaaggtctgggatgtccttccatagaatttcaggaatgatctttacctttacaggtttgttctttgccctgaaatacagttttttgtttaccatgtccacatcacctattttgagtctacaaacctctataggtctcaaaaaattataggatatgaattttacaaacaacaacaaggttgcatcgtttgattccagatattccaataactgatcttcctgttttggtgtataggtcttattgcgtgttgggtttgatttaagaacgttgattcttttaacgaaattgtctttgataatgtcattatcctccaatacttgaaaaaaggagctgatgtctgtccttgtgttgttcctgttccttgcactggtaagctgcaatacttcattcagatatgaaatgatcgttttcttatcaatagcatcgattggtccagttaatttatagcctttggctaacaaccaaaccttaaacctattgaccctacttttatatctggagtaggatgtgtccgctagcatacg

SEQ ID NO: 2233 - DNA, 24158 bp, synthetic construct
  misc_feature 1..24158: note = Synthetic
  source 1..24158: mol_type = other DNA
attcgatcaccgataacatttgcatctgtcgtaataaacgccatttccaattcaaagtctaataattttgaaggtccgaaaccaggggtattacttccgtctgcgggtttagattgtcccattggccttctaacgggcactccagaaggtataatcgaagaacttctaccgtgataacctattggtatgtgtaaccagtttggcagtaatgcattttctggatctctaaataaagaccccacatttgttgcatgctctttacttgcataaaaatctgtatagtctcctacagaaactggcaataacatttcaacttcgtccattctaaagataattttatctttatggtctgcattgtcgcgcaaagatccattagtaacatcaaaaacttctgcaattctatttcttaccaatcgccaagtttttctaccatctgcaataaagtcgtttaagttatcttgtaaaaatatatcatctgttaaaggaatcccttcaaagtaccctaattgatgaaaagcacctaaatctatggcaaaatcaccaattctacttcctattgtaattatatcatctcttgtaataaaaacaccgaatggaatattttgtactggaaaatctgaatcttcctctacttttaaccatgattttctattcggattatttgctgttatgatcattctataaattctttattttgttcaaatctatggaattttttctcatttttaaaatgaaattccacgaataacttatttttaacattgcttttttttgaaatatacaaatcttaataagttcttgaaaatatacgaaaaagttatttaaaagaatttggttttttattacttttggttcttactcaaaacaacaacaatgcaattagacaatcaaatttttgaccttattcaggaagaaaaagaaagacaattaaatggtttggaattaatcgcttcagaaaactttgtaagtgaccaagtaatgcaagcccaaggttctattttaaccaataaatacgccgaaggatatcctggaaaaaggtattacggaggttgtgaaattgttgatattgtagagcaaatagctattgatagagcaaaagaattatttggtgccgaatatgtaaacgtgcagccacattctggttctcaggcaaatacagcagtttttgcagcatgtttaaaacctggagatactattttaggattcgatttatctcatggtggccatttaacacatggttcttctgtaaatttttctggtaaactatacaacccaactttttatggtgttgataaggaaacaggtattattgattatgatcatgtagcgcaacaggcaaaagagcataaacctaaattgattattgctggtgcttctgcgtattctagagatattgattttgagaagtttagagaaattgcagactctgttggtgctattttaatggcagatatttcgcatcctgctggtttaattgccaaaggaattttaaatgacccgttacctcattgtcatattgtaactactacaactcataaaacgttacgtggaccaagaggaggaatgattatgattggtaaagatttcgataatccttttggagaaactttaaagagtggtaaacctaaaaagatgtcaactttaataaattcagctgtttttcctggaaaccaaggtggacctttagagcacgttattgctgcaaaagcaattgcttttggagaagctttaacagatgagtttttagagtaccaaattcaagtaaaagaaaatgctgctgcaatggcaaaagaatttgtagcaaaaggatataatattatttctggaggtacagataatcactgtatgttaattgacttgcgtaataaagatatttctggtaaagatgcagaaatagctttgggtaaagcagacattacagttaataaaaacatggttccttttgatgataaatctccgtttgtaacttctggtattagaattggaactcctgcaattacaacgcgtggtttaaaagttgaagacatgaaagctgttgtagattttattgatgaagcaattcagaatgcagaaaatgaagaagctttgcatgaaataggagaacgtgtctctgaaatgatgagtgcaagaagattattcgttatgtaataaccacgtagtggtttcaaagatctcactgaggtgagtaaatataaaaaaaagcatcaagtttaaacttgatgcttttttctttagctataaggtctaaaagttgattaccaacttttaacttctttttcaatttcttcacgagtcttcccgtatttttcctgaatttttccaactagtttgtcaaaagaaccttctgcttccatagacttgtcgttggtcactttcccaaactgttctttaaattctcctttaatttgtttccaatttccttcgtttgtgtctgaattcatattctttttttttgtgtacttaaatagtacttgttaataatactacaaatttaataggaaactacttcatcaattaatcctatcaattaaaatactaactcatttgataaaattattttttttcagaattttgaattttgtctgcaactttatcagcatcttcagttgcactatgtacttgatcttttagcttctctttatcttctcctttcaatctatctttactgctatctttatctttatatccttttttaacagttccttttaaagggtgtaaacctctttcaagttcgtctcctgaatttccttttgttacgttttctgtactaggtttatctttctttgccataattatattttaaatgaatattaattacatcaaaaataaaaattagagtactatttaattaaccatatcaatataaataagaactcaaaagaattttagttattagaactagcacgatcaataatattttctggtagcgattttttagcttttgcgcccattttctttaacttttctacacttgtaattatatttcctctaccatcaattagtttgttcattgcgttagaatattcttttttgctatcatcaattcttttcccaattcctattaaatcacttaaaagaccttgaaatttatcatataaagcacctgcttgtcttgcaatttctaaggcatttctttgctgtttttcgttattccacatcgtatcaatggtgcgcaatgttgccaaaagggtagaaggagttacaatgacaatgtttttttcaaatgctttgttgtataaataggtgtcagaatttaaagcaacggcaaacgcaggttcaattggaataaataataagacaaaatctggagattctattttatagatatcttcatattttttatcacttaattgatctacgtgcctttttagagaagcaacgtgttcttttaagaaacgttcttttaaagcatcatcttcttcattaatatattgttcataagcaactaaagaaaccttagaatctacaatcatttttttgttatctggtaaatgaattacaacatctggtaatacgcgtttgccttcatcattggtaaagctttgctgtacaaaatactctctatctttctctaaaccagacttttctaaaacacgttctaaaaccaattcgccccaattaccttgcattttattatcaccctttaaagcttttgttaggttgatagtttctttactcatttgtagatttagttcttttaaacctaaaatttgctgacgtaaagcggcatgataatcgatactttctttgtgtgttttttctactttatcttcaaatccctttattttttcttgtagtggacttaaaatattttttatattttctttgttttgttgcgtaaattttgatgatttttcatctaaaattctatttgctaaattttcaaattcttttgtaaatttttcatttaacttttctacttctcctttattttcggctagctttaactgtaaattatttatttctgattcttgccttgtatttgaagtaattaatttttccttttcttgttgattatcttttagctctttttgagattcaataaaattattttctgtgatatctttagataattgcagcaaaataacacgttcttctagtgtagacttttccttttctacaatagttctctctttttcgaagtttaatttagaaagtaactttcctataaataaaccaattaaggcaaatattatagctattaataagtatataattatttcaggcatcatatcaatttaagtccttaaatttatcactttaaataataagataaaatctttatattcggtttttgtaaacaatcaattaaaagaaattttgaaaatactcgctaaatttattttacacacccttttagggtggaaagttgaaaatggttttccgcaagaacctaagaaatacattgttattgctgctccacatacaagttgggtagattttcctattgctatgctaacaagaatgagtcaaggtacaatggttcattttataggtaaaggatctctttttaaatggccttttggttatttttttaaagctttgggtggtacacctgtagatagaagtaaaaataataatttagtagatgctgtaattgaaatatttaattctaaagaagagtttcggctaggtttgtctcctgaaggaactagaaaaaaagtagaaaaatggaaaacaggattctattacatagcaaaaggagcaaatgtacctattgtaatggctactttagattttgaaaacaaaaaggtaaaaatatcagaaccttattatatcactaatgatttggaagaagattttaaaaacttcaaagtatttttcaagaatattagaggtaaaaaacctgaattatcataaaattatagtatttatcaaaaaaaaaaactaaatttgtagtcgtaaataatttttgatagagattaggggctttattatttagaaatttacaaaatagcatatgctatgaaacgagccttcagtttactggaggcttttttttatgtacttttttcaacaactttttgagcaataccaacaattacttcagttgcttttatcatagactctactggaacatattcgaaacgaccatgaaaattatgtccgccagcaaaaatattaggacaaggtaaacctttaaaagataattgagaaccatctgttccgccacgaattggtttaataactggtgtaattcctatttctttcattacttcttctaccaaatctacaatatgcattacaggaacaattttttccttcatattaaaatattgatttttaatttcaatctcaattaaatcttgttctaatctttcattaaaatcaaacgcaattctttgcattaaatattttctttgctcaaataaatcaaaatcatgatctctaataatatattctaaaactgttttttctacattcccagacatatcatgtaaatgaaaaaatccttcataatctgtcgttttctctggaacttcttccggagggagagaagctataaattcatttgcaatgtgcatggagttaatcatttttccttttgcataaccaggatgcacaatttttcctgtaatagtaactattgcgctagcggcattaaaattttcatattctaattctcctatctggcttccatccatggtataggcccattctacatcaaacttattaacgtcaaacttatgagctcctttaccaacttcttcatctggtgtaaaacaaattctaattttaccatgttttaattctggatgctgaattaaatactccatggctgttacaatttctgtaacacctgctttgtcatctgctcctaaaagcgttgtaccatctgttgttattagtgtttgccctttgtattgcaacaaatcttcaaaataatttggagaaagtataatctttttttcttcatttagaataatgtcatttccttgatagttttctacaatttgtggttttacattttttcctgtaaaatctggacttgtatctatgtgtgcaacaaaaccaatggttggtactctatgctctatattgcttggtaaagttgccatgatgtagcagttttcatctagctcaacatcttgcattcctatattttttaaatcttcaactaaaatattagctaaattccattgtttttctgtgctaggaaaagcaggattgttaggatctgattcggtatctacagttacatattttataaatcggtctgttatatgttttttctcaatcatttttattgttctagttttattttttctattaacgttattgctttacaaagtctttggtttactaaagaatctccataaatttctgcttttacaactaaagatttctccttatttatatgcacgaaaatttgcagcgatttgtatttgtactttccttttttaccgatagaaactacgtaataacttggtttatctaaaaaagaaaattcttttgctgttttctgaattagtttatttgataaattttcatgttcaatttttagtttgaaaatatcactaatagttatggaattataaatgtaatttacatctaaaagtattgcttctgtaagttgtttggttgtatctgcagcatatattgaagactgaacctcatctgtgtatacgctagttttccaacttgttggaaattctacagaaaaagttccttttatatcttttatgacttctaaattattaaagaatatttctttacaattaaaatcttcttttaatactgattgctgattacatgcatacaataggagtgaagcgaaaaaaagaactgttatactacctattattttgctataactcaagttttcctatttttttatctccgcttaaccaagctgtattttcatctataaactgaattgcataataaccttctttagaaacatctttccaagttattccaccatcattagaaaaagaaatgcctgttttaccaactgcaaaaacttctttacctgctgtgtttggtacatattgtacgcaacttttataattggggctttggttgttagccactaaagtccaagttttacctccatctttagtaattgctttatttgctttgttttctagaggtttagagtaatctccaccaattataattccgttattttcatcaaagaaatcgatcgaataaattccttgaggtccatttccttgaattattggagtttcaaaaacctgccaagttttcccgaaatttgtagactttaaaattcttgctttgtttcctccagaagcaatccaaacggtattaccaattgtttttatattggtattacttgcagcaaaaaaagcttccccttcaataatttctggtaaattttcacaaggaattttattccaagtttcacctccatcttctgtaagaattatagaagcacattcttctgtagggtcgccaactgcaattccgtgtaaattatcatcaaaaaaagtaagtgcatcataaaaaacctttttatcttcttctgtatattgcaaagttgcttcaccttcagaaattttatatagtaaagcagggtttccgatagataatgcaaagtaatctgaaccattaaaagctaaacttctaaaatgcggaataatagaatcttggtaccgaatatttaaaacattccaaagtgcaccattatctgttgtaaaaccaacatcaccatttgagcctgcataaaatatggtttcattatctactacttgaattgctctaatactagaactgtctatttcaaaggccttaatagtcactttttcgatgtttcttggtttgtattcttgtttacacgccataaaaaaaaggaaagtaaaaataagtacgattattctgttcatttttgatatttttatgccactaaagtaaacaaatcataatagataatgaaaaaagcattggtaatttctggaggtggaagtaaaggcgcatttgcaggcggggttgcacaatacttaatgaaaaacgaaaataaaaaatatgatttgtttttaggaacttctacaggaagtttaatggtttctcacctggcactgggtatgttagacgaattaaaagaattatataccaatgtaaaccaagaaactatttttagtaacaatccttttaaaattaagaaaattgctggagaaaaagtgatcactattaatcatttaaatactttctggaactttttaaacggtagaaaaacgtttggagagagcaaaaatttacgttctttaattaaaaggaacattacaaaagaaatgtatgttaaaattagagcagcaaacaaagaagtagtggttacggtttctaatataacagcaaatcaaatagaatataaatctataacagattgtacctatgacgatttctgtgattggatttggggttcttgtaattatgtaccgtttatgagtttgcttgaaaaaaaccactgccaatatgcagacggtggttttggttctttagtaccaattagagaagctattttaagaggcgcaacagaaattgatgccattattttagaaactgaggttacacagattaacagattgccagctacaaatccgttttctttattgtttgatgtgttcgattttatgttaacacatgtagaaagacataatattactattggtaaattagcggcttcgaataaagatattaaactaaatttatattatacaccaactgttttaacaacaaattctttggtttttgatcagaaattaatgaaaaaatggtggaagtctggttttaattatgcgaaatctaaagacgaagaaaaaatgagtgagtttagaccagatgttcttaccgaccaagaaatggaagattctgcggaagatgtagaaaacttaaacatttaagaacgtactaatactatgaaattcggaaaagtagcgcatcctgaaaatattgattttaccttacccaacacaaactcaaatacatttaaagttttaagtgcttatcaaaaaccagaaaaaccaaccgtttttgttggttgtgcaaaatggaatcgtgcagatttaaaagggttttacccaagaggaaccaaagacgagttagtatattattcaaatcagtttaatgctatcgaattgaacgccactttttatagaaatttccctgcgcaacaatttgaaaaatggcacgctaaaactcctgctaattttaaatttttcccaaaactagggcaggaaattagtcattggaaacgcttgaatggagtagcagaaattaccaattcttatattgatcattttagcaacctgcaagaaaaattaggaactatatttttacagttacacactaattttgggactaagaattttaatttgcttcaaaattttatcgaaagttggcctaaaaatcttcctttggctgtagaagtacggcacaaagattggttttctgatgcattgattgcaaatgatttttgtttattactagaagaaaataacattgcaaatgttttggtagatactgctggtagaagagatatgctgcacatgagattgaccaataatgaagcttttattaggtatgttggcgcaaatcacccgacagattatgataggttagatgattggattttaaagctaaaagattggacagatgctggtttacaaaacattaatttctttattcatcagaatttagaagaagcatcacctttattagctgcctattttattaaaaatctaaatgctgagtttggtttagatttgaaaattccgaatgaaaaagaggcagattcttctaacggacaaatgagtttgttgtaattttttcttgacttaaaaatttaagaaagagaaagcgacatcataatttctatgatgccgctttaaatgttttcacaacggaataatccttattgtgaattgatttcaaattgttctacaaatatatattaaataaaataaacttttttacgggtttccataatctttaactattcttttattttatatttagaaaatataataaattattgaatatgaaaaagattttaggtttagatttaggaactacatcaattggttgggctatagttaatgaagctgaaactacaaatgaaaactcagaaattataaaattaggtgttcgtgtgaatccgctaactgtagatgaacaaactaattttgagaagggaagacctattactacaaatgcagatagaactttaaaaagaggtgcaaggagaaatttacaacgttttaaacttcgtagagaaaaccttattgagattttaacgaaatctaaaataatttcaaaaaatacagctttaacagaagttggagaatctacaacgcatcaaactttaagtttgcgtgcaaaatcggcttcagaaaaaattgaaatagaagaatttgctcgcgttttattagctataaataaaaaacgaggctataaaagtagtagaaaagctaaaaatgaagaagaaggtactttaattgatggaatggcgattgctaaagaattgtatgacaataatcttacagttggacaatatatctataatttattagaaaaaggaaagaaatttattcctgatttttataggtctgatttaaaaatagaatttgacaaagtttggaattttcaaaagcagttttattcagatattttagatgatgaattgtatcagaagttagaagatcaaggacagcaaaactctagaaaacgttttttagctatcaaaggaatttataccgctgaaaataaaggcaaaagagataaaacaaaaaaacaacattataaatggagaagtgaagcaatttctaaacaactaaagattgaagaagttgcttatgttttggttgaaattaacaacaacctaaataattctagtggttatttaggtgcaattagtgatagaagtaaagaactatactttaataacgaaactgttgggcagaatttatacagtcaaataaaagaaaacaaacatacttctttaagaaatcaagttttttatagacaagattatttagatgaatttgagaaaatttgggaaacacaagcagaatttcatcaagaattaacatcagaattgaaagaagaaattcgtgatatagttatcttttatcaacgtaagctaaaatctcaaaaacatttaatatctaattgtcagtttgagaaataccataaagcagtgcctaagtcttctcttctttttcaagaatctaaaatatgggctattttaaatattctagaatttgagaacaaggaaacaaaagaaaaacaaattttaggagacgaaattaggcaagaattatttgatgaattaaatatctctaaaaaattatctgaaaaagagctgttaaaatttgtgggtttgagtaataaagtatggaaatctaattttcctgaaggtattgaaggcaataaaacaaatgaaaaactgtatgaagtatatcataaaatagcagagaatgaaggttatggagaaaattgggataaaaaaacagcttccgaaattaaagaggaattaaaagcagttttctcatcaattggagtacaatcagagattctatattttgacactaatttagatggaaatgattttgacaaacaaaagagttatcaattttggcatttattatattctgctcaagatgatgataaaatttctcaagaagataaaattatatacggcaattctaatgtttcattaaaaaagaaacttcattttaaatatggttttcaaccagtgtatgctaatatgttagcaaatgtttctttgcaacaagattatggaggcttgtctgcaagagcaataaaaaaaataataccttttttggctgaaggacacaactatcctgaagcttgtaaattagcgaaatacaatcattctaattcattaacaagggaagaacagggaaatagaattttaaaagataaattagaattattacaaaaaaacagtttacggaatcctgttgtagaaaaaattctaaatcaaatgataaatgtcatcaatcaaattgttgatgaatatggaaaacctgatgaaattagaatagaactggctcgagagttgaaaaaatcagcaaaagaaagagcaagtgcaactgaatatattaataaagctactttagataatgagaaagttagaacaattttaaaaacagaatttaagattaaaaaccctacaaggaatgatgttgttcgttataagttatataaagagctagaaaataatggttatagaactttatttactgacacatatattcctgcagaaaaactattttcaaaagaaatagatattgagcatataatcccgaaagcaaagttatttgatgattctttttcaaacaaaacgctagcttttagaaatgtaaatttagcaaaagcagattctttagcaatagatttcatttctaatacatataattcaggtttagaagactacaaacaacgtgttgaaagtctatataaatctggaagtataaaaacagggaaatataaaaaattattactttcagaaaaagatttacctgatggatttatagatagagatttaaggaatagccaatatattgcaaaaaaagcaaaacaacttttagaagaagtatttagaaaagtaactccaacaataggaaacattactgacaaattaagagaggattgggacctaataaatgtaatgaaagaattaaaccttccaaaatataaagcactaggtttaacaaaatgggaagaacgtaaatacgataaaaaagttgaacaaattattgattggacaaaaagaaacgaccacagacatcatgcaatggatgctttgacagtcgcttttacaaagattagtcatattcaatatttgaataatttagcagcaataaacagtagttttaaagataaaaagaaccttgataaaagttatttactcggaattaaagaaaaagtaacaaaaatatataaagacaagaaaggaagaagaaaaagaaaatttacaccaccttcagaaaattttagagctgaagctaaagaacatatagaaaatattttaatttcctttaaagcaaaaaataaagtagtcaccaaaaacaagaataaaacaaaaataggaggaaaggataactatttaattaagcaacagttgacaccaagaggtcaattacataaagaaactatttatggtagaataaaagaagatataataaaagttgaaaaagtaaatgcaaaatttacaagagaaaaaatacttgaagtaacaagaccagcatatagagaagctcttttaaaacgtttagaggagtttaatgatgatgctaaaaaagctttttcgggtaataatacattgttaaaaaatcctctctacacagattctgataaattagtaccagaacaagtaaaaacaaaaactcaaaattatatttacacgattagaaaagaagttaatcctgataatttcagtaatctaaaatcacttcaaaaagtaattgatgttggtgtaagaagaattttagagaaaagattagaagattttaaaggtaaagcaaaagaagctttttccgatttagataaaaaacctatttggctaaatagagaaaaaggaatatcaatcaaaagagttttaattagtggaattaaaaatgcagaaaacttacacgttaaaaaagaccattttgggaatgatattttagatgaaaaaggtaaagaacaaaaaagtgattttgttagcactggaaacaatcatcatgttgcaatttataaagataaaaatgataagcttcaagaaaaagttgtttctttttatgaggctgtggcaagagtaaatgctaatttaacaattatagataaagaatataattctaatattggttggctgtttttatttactatgaaacagaatgaaatgtttctttttccttcaaaagaatttaatccgttagaaacggatttactaaatgaaaataataataatttaataagtaaacatttgtttcgtgttcaaaaaatagcaactaaaaactatatgtttagtcatcatttagagactcaagttgttggtagtgagtctttgaagaataaaaaacaactttcggaagttacttaccgctcagttagaagtacagagcctttaagaaatattattaaaattagaataaaccatattggtaaaatagttcatgtaggagaatattaaaaaaggacgctatgataaaaagaaccatttatattggaaatccatcctatttaaaattaaagcaaaagcaactcgtagtacaagaaccagaaaccaaagaaattaaaggaacagtgcccatagaagatattgctttgctaatgttagatcattaccaaataacaatttctaatcaacttttaattaaattacaaggaaataatgtggctgtagttagttgcgatgaacatcatttgccttttggtatgatgttgccattgtatggtcattcagaatattctgagaggattaaatatcaattagcagcatcagaacctttgaaaaaacaactttggaaacaaaccgttgaacaaaaaaaagaaaatcaaaaagcattattaaatttaaataacaaagtttcagaacctttagccgaatataaattaaacgtaaaaagcggagatacttccaatagggaaggaatggcagctcaattttattggaaacacttgtttgaaaatttttctagagaacgttttgggtcggaaccaaataatttactgaattttggatatgctgttttaaggagtattgttgctagagctttggtaagtagtggattgttacccgttttagggatttttcatagaaataaatacaatgcgtattgtttggcagatgatattatggaaccttacaggccttttgtagacaaattagtttataattatgtgatgcgtaactataatcatgagttgaataaagaggcaaaagcacatatattaacaattgccacgcaagatgtttttattgacggacttattagacctttatttgttgctgttaccacaacaacatcaagtttgtacaaatgctttacaggagagttgaggcacataaaataccctgaattagattaaatgtcagctaacagatatagcgcttatagaattatgtgggttttagtattttttgatttaccaacagaaactaagaaagaacgaaaagctgcaggtctctttcgtaaaaaattaatagatgatggttatacaatgtttcaattttctatctatttgagacattgcccgagcagagaaaatgcgaaagtacataccaaaagagtgaaaatgagtttaccaaaacatggtaaagtctgtattttagaaattacagataagcaatttggcaatatggaattgtttcatggaataaaagaaatggacttaccgcaacctacacagcaattgcaattattttaaagtaggatttaaaaagtattggtaaaataaatttattcacttcaaaaaataggtttttctaattcaaaaaaggaatcccaaagtattgattttactcaacattttgggattgaccttgtgattgctcacgtaaaaatacaatttgaaatcaattcacaacacagatgcagaaggaatcgttagattggtacttgtgattgctcacgtaaaaatacaatttgaaatcaattcacaacgatcaacaggtaatcaaactgcaaagttaacttgtgattgctcacgtaaaaatacaatttgaaatcaattcacaacgatatggaactccatattctactcaattcacttgtgattgctcacgtaaaaatacaatttgaaatcaattcacaacttagttagacttatgcattttgagtctgcacttgtgattgctcacgtaaaaatacaatttgaaatcaattcacaacatagaagtattcattaaaaataatagaattcttgtgattgctcacgtaaaaatacaatttgaaatcaattcacaactattagaaacaatggacgtagttgacgcttcttgtgattgctcacgtaaaaatacaatttgaaatcaattcacaacgcaacactgcaagcagaagctaggattaaacttgtgattgctcacgtaaaaatacaatttgaaatcaattcacaacaaaagagtaaaaacacttgaatctttagaacttgtgattgctcacgtaaaaatacaatttgaaatcaattcacaacccctgatgcaagcattcgaatttatcaggacttgtgattgctcacgtaaaaatacaatttgaaatcaattcacaacatctctaagcttaattgtttcttttatttccttgtgattgctcacgtaaaaatacaatttgaaatcaattcacaacgcaatatgcatgaaggtgacgatgaagaagcttgtgattgctcacgtaaaaatacaatttgaaatcaattcacaacgatcaacaggtaatcaaactgcaaagttaacttgtgattgctcacgtaaaaatacaatttgaaatcaattcacaacaagatggattctgggcgagatgtgctcacacttgtgattgctcacgtaaaaatacaatttgaaatcaattcacaacggtaaatctataaatcttggagtatctccacttgtgattgctcacgtaaaaatacaatttgaaatcaattcacaacgtagcgggtaagtatttgttatctcataatcttgtgattgctcacgtaaaaatacaatttgaaatcaattcacaacatatgacccctggcattaccatcacctttacttgtgattgctcacgtaaaaatacaatttgaaatcaattcacaacggcggaacgttgggctcgttttggtgttgacttgtgattgctcacgtaaaaatacaatttgaaatcaattcacaacaaaggagcaggagaagatgccggtggttttcttgtgattgctcacgtaaaaatacaatttgaaatcaattcacaacaccaatgccagaactgctcaaaaagcatttcttgtgattgctcacgtaaaaatacaatttgaaatcaattcacaacaagtttaaaggaatatatattccatctttcttgtgattgctcacgtaaaaatacaatttgaaatcaattcacaacatgggagataaaaggagttgaaaatcgttccttgtgattgctcacgtaaaaatacaatttgaaatcaattcacaacgtttttttgtttgtagcaacacctttagttcttgtgattgctcacgtaaaaatacaatttgaaatcaattcacaactatccctgcatctttagatattaaccctatcttgtgattgctcacgtaaaaatacaatttgaaatcaattcacaacttattagagttaatgataaaaaattaacagcttgtgattgctcacgtaaaaatacaatttgaaatcaattcacaacggtacgaaccaaaagtaaacaaggacataacttgtgattgctcacgtaaaaatacaatttgaaatcaattcacaacggaatattttcactttgcgtctactttaaacttgtgattgctcacgtaaaaatacaatttgaaatcaattcacaactgttatattgttaagttgctataatgtcagcttgtgattgctcacgtaaaaatacaatttgaaatcaattcacaacagtttgaagaaataccaaaatatttatatgcttgtgattgctcacgtaaaaatacaatttgaaatcaattcacaacaaatacttgtcaaccccttgaggagatgtccttgtgattgctcacgtaaaaatacaatttgaaatcaattcacaacacctataaaataactatccattgaagataacttgtgattgctcacgtaaaaatacaatttgaaatcaattcacaacgacaaccgcagaaatgcaagacgtaatagccttgtgattgctcacgtaaaaatacaatttgaaatcaattcacaacgtatataccaccatttaaaactttccatttcttgtgattgctcacgtaaaaatacaatttgaaatcaattcacaacaatgagttattttctttaaacagtgttgttcttgtgattgctcacgtaaaaatacaatttgaaatcaattcacaacaatacgtctttatttaaagaagattcagaacttgtgattgctcacgtaaaaatacaatttgaaatcaattcacaacaatcttctacctgtaaattcaaaagaaaaacttgtgattgctcacgtaaaaatacaatttgaaatcaattcacaacagatttaacagaaacccaattgtttttaaacttgtgattgctcacgtaaaaatacaatttgaaatcaattcacaactctttgaagtataattaaaaacaaatattacttgtgattgctcacgtaaaaatacaatttgaaatcaattcacaactatttaaaggcttaccagtagcgtctgtaacttgtgattgctcacgtaaaaatacaatttgaaatcaattcacaactacgatgaagttcataagagtaatatgtctcttgtgattgctcacgtaaaaatacaatttgaaatcaattcacaactctactgttgttgatgttaatggtgttaaacttgtgattgctcacgtaaaaatacaatttgaaatcaattcacaacccatttcgctgcttctgttttacccgaaaccttgtgattgctcacgtaaaaatacaatttgaaatcaattcacaactaacgcaattctaacaaattttttaatgcacttgtgattgctcacgtaaaaatacaatttgaaatcaattcacaacaaattcatcatctccagaagaaacaattgtcttgtgattgctcacgtaaaaatacaatttgaaatcaattcacaacttatgtagggttattactttctgcatctttcttgtgattgctcacgtaaaaatacaatttgaaatcaatttttaattgaaaccacaagaatatcttattcttcttaatatttagttaaatcagaatacatattattaccagcaggagtcgctaatttagaattgaaaacttcttctgtttttacaaaattgtcttttttagaaaatgttttagatcctgtagaaatatactttagagttctatctagcaaaggatctgaacgttctcccaaaacacctaaattaccaatattttcagctaagttaattcctgtgaagtttgttccaggaataattccgtttgggtaatttttatcatctttatttttaatttctaagaccagtggttgcattgcataggtatgtttagagtttaaatttgctccgtttctttgtaaattgtctgaatcatataaggtaacagaaccaacttgtttaccaacagttgtggtaccaattacttttacttctatatgtgcatctagagcattaataaccaattcagatgctgaagcagaacttcctgtaacgataaaatagactctttgtaaatttaaactattaatagcttcatctacaaccacgttattattacgatctgtttttctaattcttgtaggaaaattattgataaagttatctgcaggaaaagcatttgtatattttttgttccaaatttctttagaatatatttcatctgaaaactgccccgttaccatgcttcctaaaaaacctgcggtatttgtagagccacctccgttgtatcgtaaatcgataattaaatcgtctacagctgctgacttaaaagtattaaaaacggcatttaaatcttggtcataagaacttgcaaattgattgtacattaaataacctattttctttgtaccatcttcaattactctagaatctgcaattggattttcttgaatttctgttttgtctaaagaaactgttgtattatttgcagtcgggtttccaaaattataatctgctagtcctattgaaaaagaagtcgcgttactaaataataaagttctataattagaatctgtaagttgtgttccgtttacagaattaaagtacattcctcgtgtaatacctagtgttgctgcgctagaattaggtattacatagcgtacataaccataaatattagtattactttttgtatatcttaccaagccaaactccattccagtgcttaaattgattccttgaaaagaattttctaaagctacataatcatcaacaatccaagaaaaacgatctattgtacctggctgatttaataaactgttaaaagtatcatctggcgtttcatttcttctaaaaaaagtataaatttcttctaaattactaaatctattatcagctaaattgggtacatcttcttgccataaataataaagattgagacctttccatataaaatcattaatttcatcacctgtagtaacttcaaattcttcacttagaccatcttcttctttagcacaagaaactgttaaaaataagattgaaagtaaacttgctaaaatatatttcttcatattaattagtgttaggtaaatcttgttttataaatacgcctttatcaatttctctttgagaatcgatagaattgtataagaatgttaaattattagagttacatacaacatttgtaccagtatttcctgtagaaacatattctaaaactcgatctaaaataggttctgagcgtgttcctaattctcctaaatttataatatcttcattagcacaaagtgtaatgtttggtgtaaatccgtttttataggtttggtcgtctttatttaagaaacttaacacaactggctgtaaagctactgtatgtgtttcatttcttaaaggaaaatcataatcttcagaattatatagagtaatcgctcccgtattattaccagcagtttctgtaccaataatatgtacgtttatatgcggatttaaactgttaatgaataattcgatagcagaagagccagaaaaatgttctccatttaaaataatataaagatctgttacttctaaactattaaatgctgttgtggaatttaatttagcaggaaacttagttaataaagagtctggttgatttgcttcaaaccaagtttgtgctttcgaattccactgttcttttataaaaactttgtttgcaaattgcccagtaatcatggttgctaagttggtgatgtttttagcaaaactaccgccagaaatattataacgtaaatctaaaacaagtttgttagtagcttgatttttaaagtttaaaaaggtgttatttagatcgtttattgaatttttagaaaagccattattatacattaaataaccaatattatctgtgccaatggtaaagtttttttctaaaaataccgtatcatagtcgtaattttgtttttgtaaagcaataatattaccatttggagttactgttactccatcaaaatttaccattgttagattaaaagtgtctgcaccatttattaataaactttcaaaatttgtttgtgttaattgaataccatccacagcattaaaaaattcaccacgaagtatattttttgttgccgcatcagaacttggtaaagtatgagttacataaccgattacattttcggtattattaggttcttcaataatgccaaactccattccatttaaaaaaccacttctaggtatttcgatatttaagtctgaataattttctaataaagacgattttgcatccgcagtaattaataagctagaaaataaagtattataatctgtaaaaccacttagatatgcgtttaactcttgatctgaactaaaacgtctgtcagataaatctgcaatttcatcttggtgcaagtagtatgcgtttaatcctttccaaacaaaatcttgtacaaccaaattttctggtaattggtattctttagagcattgcgtaaaaaaaatagtaattattaataaataagtagcttttaaaaggtttttcatttaaaaagaatataaattgtttcgtaaatctaacgcaatataaatagaattagtattatttttaaattcttgtgtaacaaattaaattgtaactcgtcgtaaagatgtaaacccgataatatataggttataattaagaggtttacaattaatcaaccaaacctaaatgaaccagtcagactttttaaaagttgttttaccatttaaagataaggtctttagattagcaaaaagattattagtttctacagaggaagctgaagatgctactcaagaactgatttttaaattgtggagaagcaaagaaaaaattgctgattataaaaatgtggaagcatttgcaatgacaatgactaaaaattattgttatgacagattaaaatcgaagcaagcaagtaatttaacattagtacacagtaattatcaagaaaaagaaacgtctttagacaagaagcttgaatatcgagacagtgtaaaccaagtacaccaattgattgaaaagctgccagagcaacaaaaaattattattcaattaagagatattgaacaatatgattttgaagaaatctgtaaaatggtagatatgaaaccaacagcagtaagagttgcattatctagagcaagaaaaacaataagagaagaattaactaaaaaacacaactatggagttagctaacatagaaaaattagtagaaaaatatttaaacgcagaaacttctttgcaagaagaaacaaccttgaaaaactatttcacagaaggtaatgttgcaccacatttgcaagaatatgaaagtatgtttaattattttactattgctaaagatgaaacgtttacaaaaaccttaaagttagaacctaagaaatctaaaaagagaaactttaaatggttgtctgtagcagcatcggtagtgttgttgttaagcgtatttgttggtaaacagcaatatgataaaaatcaacaaagaaaagaagcgcaaagaatttatgcgcaagtaagtaaaggcttagaattgttgtctaaaaacttaaaaaaaggagaactggctgtagccactttatatacttatgaaaacacagtaaataagatattaaaataaaaccaagtaaaaaatagtaaaaccaagtaaacaaagaaattatgaaaaaaataatcctattaatagcgtttattgttgctccgatggtaactagcgcacagtctttattcgattctttagaagatttagatggcgtagatatggtagttgttaccaaagatgccttcgaattattatctaaatttagtccagaaaaatttaaagatagcgaagaaatgaaagtctttgaaatggtaaaagatttaaaagaatttaaaatgttttctacggaagacaaagcaatagcagacaaaatggagaccatggtaagttcttctataaaaaaacaaaacttaacacaattaatgcgaattaaagaagatgatacgcgtgttaagatctatgtaaaatctacaaaaaacaaagattttgtaagtgaagttttaatgtttatcaaaggaattgataaaagaacaaacggaatgtctgaagctatgattgtttctttaacagggaatatcgacattaataaaatgtctgatttagcagatacttttaccaaaaaataataagtataacgtgtaaagtcaggcttttaaaaacctgactttacttttttaaaaccattcaaatgaaaaatataaccaaaatactttcgatattaactttagttttaatgataacttcgtgtaaaaacgaaaaatcattacaaagctatttagtagataccagtggtaaagaaggtttttatacgggcgatttgccagtaagttctgtactttctgcaaaagcagatgtttctgaagaagtaaagaaaaccattaaaagtattaagaaaataaatgtcgcttttttacctaaaacagcagaaaacacagctgtttatgaattagaaaaagcgaaacttaaaaatatttttgcagacaacaatacctacaagagtttaatgtctatgaaagcaaaaggaatgaatgtaaaagttttttattctggagatacagacgctatagatgaagttattgcttttggatatggagatgaagcaggagtaggagttgcaaggttattaggagaaaacatgaatcctgcacaaataatacaaatgttaaataatgtagatgttgatggagatagtgcttctttaaagcagttatctaaaatgtttaacaagtagtaatacattcattttttcacctataagaagcctcaactcta

SEQ ID NO: 2234 - DNA, 24158 bp, synthetic construct
  misc_feature 1..24158: note = Synthetic
  source 1..24158: mol_type = other DNA
agatagtcctgttataaattcccaattttttaaataatctatagtcaaaaccagttcactggtatgggtggtgagttctgtatccatagatggtatattcttattttctcccaatcttaaatcaaattcttttctattattaaattgaaaagcataggataattctaatttaccaaaagaagaccacctgttttctgctttaattttagccaaatgatggattatgttttgatatggtttatctatggtataactaaaatcttctatgggtgtaggtgtggatgcatttatggcatagtataaatctcttaaattgccaagatgggtcgcttttaatatccccaaatcttggttaaaatagctataactagcacgtacatttctcttaaaatctccccatttgagttcggtcatcagcgattgatgctcactagcggtattggtcaaaatataatctggtgtctctaaatcacccattcttttataagaaccttgcacttgaaaagctacatcattatgaaagcctttttgtactctaattacagcgtttccaccccgtccattgctctgtccattgagtagaacgtgtccccgcaaagtgtctttttgtggcaacttatgatattctgctaatacaacaccgcccacagcatcaccgccatagcgcagagcacccccacctttaatgagtttaatatcagaaaaattattcacatccatatttggggcatgttccacaccccattccatatcttcttgtttaacgccattattcaacatcaaaatcctactgctatgcattccatgaatgattggcttcacgatattgctaccagtagaaagtccttctacgccactaatatttttgagtaaggctcctatagcctcagcgctgtttttttgtatatcctcatcatgaatgtgtttttctttcaaggaattaatggtctcatgttgcatcccttggacttctattttctctaaatctatgatatggtgttctagaaaaataataatatcctcgttttcatctttggcaagttcatagatttctgggtcagaattcacatgggtaaccctgatttcataagaatcaggacataaccctttaaattgaaaggttccattttcgcctgaggtagttctgaattcagtatttaaaatatgtaaatctgcgtgactaatgggttctcccgaatggaaatccagcaccaccccagaaataactctctcgcattcttgggcttgtacaatcatagctatacaaaagcaccaaatacttagtatttgtttcattataatacaaattatatataagataaaacagattaattgaatcaatagattgattgaatcaaactaatagaaaattctttagaattgagtgaataagtgaactcaaattaggcaatcggtggtgcgcgaagagagaaataaggtcttaaaacacgagtagtgatattcttatccttggatataattatactagatatggctatattttctatctgttctgtcaaggtatatgagtcagaatttagaaaagagtcttgcccgttggtgactaattttatataattacaatcctggagtgtttggtgttgatgcgtattgtccagagaagaattatgcaacagaaaatgcatcggtgttatattaaagaaatatacaccaatcagaatagaaatcagaaaagatttaaaccattgcatcgtgtggcaaatttaaactatttttgattgagaaaaaattttaatgtattcattgaaataggagaggaggtcttgttctattttcttgggcattctcctatgggcttctcctttttcttctagggctattaaatcacccttatttttaattttatcaatggcttctataagcatttttatctctgtttcatattggcgataggctactgcatgaaaagtgtcattttcatatatagggatttccactctatctatcaaccagcctgcatctgttttatcattgatgatatgggaagtaacgccaatttttttcttgtaataaatagcccatttcaaagcatctagtcctcttatatctggcaaataggctgggtgagagtttataatggcatgatttaacaccaattctttaggtaacaaccctgcgcctgcaactagggttgctgtaggtttcatttcgtctaagatctctgctaaatgcctagattctacttttttgaaatcatacccaagattacgcgctagttcctgtggataaatggggaaagcctgcgagggtctatggttataaattggtttaaatggattttctctaaaaacaaaaggtaacgctaatagcattaccttttgataattatgcattttgagtcctgatattacatcttgtgtttttctatgaggataatcgtaagtaattactacaattgggctcatatttcaacttattgtcctaaaactacagtagaatgtggaggaatttcaacgcctctatcagaaacagtatgttcaacactttctaataaattcttttctaaatttaatccagtcaaagaaattttagatatatacatggggtaattagaataattttgtaatactgctagatgtttgtcatctttagagattataaagttaaatactagatcatccgcactcaaaacttcataagttgctctagagtcattccataagacttcatgcttatccaaaattttattcaagttttgataaaaagaggtgtattcataatcgccccagtcaataggatctttttcaaagaattttaactgcttgttcaatccagactcttgtccattgtagattaagggcataccacccatgaagaacgtcaatgcttgatagttttgcaaattggtagagaacttatctctttctaaatagttccaagaattctcatcatgattggtagtgaagaacatggtgatatcaccttcatcatgttcattgcttagtttttctaaatatactggaatggcgttgaaggttttttccccatctgcaatttctatgattaaatctttgaaaggccagccataagtcatatcgaatgcctcatataattctggtttggcgccctctgctaacatgaatacaggttttatgctgtctagttttgcccgggtatccacccaaaaatctaatgggacatattctgccacatcacaacggaatccatctatattggtttcttttatccagtactgcatcgcatcttgcatcgcagcacgcatgtcaggattatcataatttaagtctgcaacgtccatccaatctgttcctatagttggtatgggagcattgcctaaactgtctttggtatagtaatctaaatgatcctttatccaaacattatctggagaagaatgattggctacccaatcaataattacttttaaccccaaatcatgtgcggtatccaccagcaatttaaaatcctctaaattcccaaattctggatttactgctttatagtctttcacagcataataacttccaagcgttcccttgcggttaagctctccaataggatgaataggcataagccatataatgtctattcccaaatctttaatcctctgtaaatcattggtaacagcctcaaaagtaccttcctctgaaaactgtctaacattgatttcataaattgtagcatttttagaccaagatacatgttcattttttggagtcatgtcttcttcattatttattgctaattttaatgagtcttctagtacattaccatcagcattctctatggtagatttatttttgcaaccaaagattaaaaaaatacaaaagaagaggattctatagtgcattggataggggattttttatactagcaaagatagagcttagcgaattttaaagcaaacgttttaccaactttgtgataacatataattcacttgtggaacacatcatatacttcttctttttattactttcactccttttcttggctattaattttagcagattggatgagggtaggcgatatcgtttttttacttttaatccctaaattttttaatttctgcgattgattaactagattatctctacctgtatggagttgtttataagcctgctcgtatgatgcatgggccctgttcaattgcttacctacttcttccaaattagaaataaatccaacaaatttatcatataatttagcccctctgtgagcaatttctagcgcattcttattttgataatctcttttccataaatctgccaacaattttagagaggtaatcagattactaggatttaatagcaatattcttttgtcataagcatattcccataaattaggatctttttgcatcgctgctatatatgcagactcactggggatgaacatcataacaaaatccaatgatttactataatcatcataagctttttgggagagctgattgatgtgatttttgatagattttaaatgttgatttaatttaatttctaagatttcatcatctagctcatctatggtgtctagaaaagctgtaagagaaaccttggagtctataatcacatttctattatctgggtatttaaccacagcatctggtcgcatctttttaccagaaaattcagaaaagagagccttgttatcttcatcttttaattgatattccataaaatattctctgccttttaccagacccgatttctccaggatattttctaaaatcatttctccccaattaccttgtgttttactttctgatttcaaggcttttgttagtttttttgcatcctctgatatttgttgattgagcgctgctagttccttcactttttctcccaaagaaaatctttgcttattttctttctcataggtctcatgaacagtttgtttaaattcattgattttatcctgaaaaggctttaggattaaatctaaattttctttgttttgaatggcaaaacgatgggatttttcttccaaaattttatttgctaaattctcaaactctttcttaaacttttcatttaacgcttctatcttcaatctttcttcgcctagtttttcaagtagatttttattctctgttttctgttcagaaaatgatatttttaatttattatattgataatcaatatttaaaatcttattatttaaatctttaatttcagtatttaattggctatttagtatatttagatttctattttctgattgtaaactattcacttctaaggatagctgtctattggattggtctaattctatattgttctttttcaatagggcgttttcagatttcaattgctctaaattctcatttagatattggaaagttgtactcgcttgtttctttaaaattaggtaaataagtcctattatcaatataaataatatagcaaataagaggtagtgaatgaatggtatattcatattcggcataaatcttgttaaaacttagttaaatcaattcttaaatttaagaaatataaatggatacaatatcaatcattatggcttttttccttggaatagggctatccgcttctgctggatttcgcgtatttttgcctctatttgctttaagcttagctgctagattcggttttgatcttagtgaagagtgggcctgggtgggaagctggacagccattatcactttaggagctgctacattttttgaaatcatagcttattacattccttgggtagacaacgcattagatactttggccgtcccaatggcaggaattgcgggtacattgctaatggcattatccttaggagacatggattcacaagtaatccaatggggattggcaatcatcgcgggaggtgggacagctgccaccatcaaggggagttctgcgggaactagagccgcatctacagccacaacaggtggagcagggaatttcatagtttcttctaccgaaacagccgcagcaggcctattgagtgcaacctctttgatttgggcgccacttgcatttatattggtattggtggttttttactatatctataagggttggaggtacattagaaatgttaaaatcaaaaagcctaagaattcttataaataattattgaactttatttagacgtatgataggaaaaatataaaactaaaaagtagcggtctcaaaaccttaaaaactagtcattctaaacttgattcagaatcttattaaattgataaccagtttattgtgaaactatgaaataaattcaagatgacaaaagcgaggttttgagatggtcactttttatgccttataaaatttagaattatttcttgctgaagaatcctcctaataatttaccgcctaaatccattgcctcatccatgatgctaccatcaccattttgatccaacattctttctatcatgctcatttctgaatggttggtttgtttcattcctcctaatagattttctaataaattaggaacctcattggcgctcatattattttgtgctttttgcttccctaaatatcccattacaataggtgccagcgttgccaatatttgcatcacatttccagaggaaattcctgcatttttaccgatgctttgtgcgacttgcggttgtttatcaccaaatacatgacctaaaattcctaatccttctgccatatttggactattaagaatagaagatacattatttaaatccttgtggtcacttaaagcattagccaagctttctgcacctctggggtctgatgcatttttattcatctggctcaatagaaacggtaatgccatagaaacagcagaagaaactttgttatcttctaaaccagtttgttgacttaaaccattgattaattctttaccaatagaaccttgtactaaatctgtaatatccatattaattgtttaattataattatctgtaattggtgtcagagtccaaaacttctatgttagatgggtctagaagaatattcacttttgcggtaaatattttatcctcataacaccttcctgtaaaatctatactggactctatcccttggtctgtcaatttataagaacgtttgccatattgtacattataactctgtggacataaagtgagcaaacgtgaatctataataggcttaacaaaactttggaataccttggctttaatatgcttgccctctatgcttctaaacccaggaaacctttctgtcaacttctctctatctactttataaaaaggactcacgatggtaaaaccgtttttttctacaaaagttccaaagtatatgtactccaagtcttcattcacaatttgccagtcatgtctataattactttctaattcactttccattcttctatcaaaaaatgtgttgatagaaaccttattagctctatctagaaacatgcctctctctgcatctcgcaaagcgatgtatccacctttgttacaggatgtaagtgtgattagagcaatgagtgtaattgttatataccgcatatcaggaattgtctgctataaattgatttactttatttataaaatcttcttccatagaattgatttcatcatcgctttctgctaaatcacgtaacaaggttttaaaataagtaattttctctgtagacaaaccttttaccgctttttctgcatcggacattttaaaattttctaatttgtctaggaatcctggattccagccaaattcatctacaatagtttctaaatattgaacttctttatcatctatttcgttatctgccttaatcaaagcatccatcgcttttaggatagaaactttttccacttctgtaaaattcatcattgtgttactaatcaaatataagattcaaaaatataaaaattaaaccatttattaatttataatttgcttaattaaatttttacttaattttgttgctacaattcatttataactaagcttttaatttatgaaaaaagccctttttttccttttattattggttgtagctttggctattacaccacttttcttgcccaaaacattatatgtagaagaggaatatgtgtttgatgagaatataagtactgtatatgagtatttttatgatatgcaaaagttcacacaatttgatcaatggtctaagaagaacccaaacgttgaaatcacttactcatccccatcttctggaccaaatgcatcttatgtttggactagtaatgcaggtgaaacacaagaaggcaaagtccaaattatagattctaaattagatgaatttattaattataatttaaactttggagagaccaaaggcaatgtatcagaaattatatttcaggaaatgggagataataaaaccagagtcatctggacatttgaaagtgcagaagctaattacccctttcaagtttttaatatattgatgagaaatgctgtgaaagaagatttagcacagggttttattcttttagataaccttttaaaaaaggataaaattagtagcaatccagagccatatagcgttaaaaatatggaggaaaagaaattatttggtgttctgcagcaaacctctctagatcagcaagagattgatacagctatggcggaaacgtttggttttgtaagaagctatttaatagatgccaatgaggttatgcgagatagcattagcaaccctgtagtgctatggaaaatgtatgatgtagatgataatacagccatttttatctgtggatactttatagaagatgcggatataccagaagttgatggaatggaatacacccttttaccagcggggagagtgattaaaggagtccaccaaggtagttatttaaatttacccaatgcctattcggaaatgaggaactatgcagccaaaaaaggatttaaactttctaaggatgcttatgatattcatttaaatacaccagaagatgtaatggtagattctaaattacgaacagaaatttatattccacttttagagtaaaaatttgactaactattacgatattttaggacttacttaccaagcagatttaactgaaattaaaactgcttacagaaaattatctaaaaaatttcatccagatttaaatcctaatgaaccttattttgaaaggatgtttctgaggatacaggaagcttatgaggtattatctgatccacagaatagaaaaacatatgatgatttattaaaaaataatcaagcaaagagccatgattttattcagcctaacgtattatatcctacgattctaaatttctctatcaacaaagcagagattaaagaaggtgaaacatttactttaacctgggatgttaaaaatgttgattttgttgaaattaaaccttttggacgattttcatctaatggaatagaaagttttaaattaaaaaaacttcagcaacctcaaatcaacatcatccttactgcccataatgcagatacgggagccacggctagagattatttaatggtggagaatgcctcctacaataaaaacatactaaactatttatataaagatggatatgctgtttttatatttagaatttttctttttctattaattattgcttttctagtcctgctgcttatttttggcgtagaagttcataatccattgcaagaattaagaaataaataatataaaataagtagccatcacaaaaccttaaagactgttcattctgattttatcgttcttacctctcacaaaccccatactgtatttaatttgttgtggattgcaagtctaaaggacttgatttagaatcttattatattaataaccagtttattatgaggttatgaaagaaattcaggtgccaaaagcgagggttttcagacagttacttttgatctgtccctaaacttctaagaatttttataaaaagaaaacgacccaatttgcattgggccgctttaagtgttttcacaacggaataatccttattgtgaatagcttcaaaatgtaagacaaatatataaatagttaattgttttaacaaaaatttcactaattttaaatcaaatattgttttaaatgaaaaaaatactgggattagatttagggacaacctctattggatgggcatttgtagaagaagccgaaaatgaaaatgaagaatcttcaattattagaacaggagtgcgagtagtgcctttatcaacagaagaacaaaatagttttgagaaaggtcaatccataactactaacgctgatagaacggataagagacaggcgagacgtaataaatttaggtatcaattaaggagacaacaattaaagggtattttaaaacaaattggctttatagatgatgaatcagttttagcagaagatacttctcattcaacttttgaaacgcatagattacgtgcaaaaggagtatctgaaaaattagaaaaagaagaatttgcacgcgttttattagcgattaataaaaaacgtggatataaaagtagtcgaaaaaccaataatgctgaggatgatgggaatttagttgacgggatgaaagtggcaaaacatcttcaaaataatgatttgacacctggccaatatggatttgaagtacttcaaaaagaaagtagcacgttgccagagttttatcaatctgatattagggcggagttagaaaaaatatggaaataccaagcacaatattatccagagaaatttacagatgaaaactttgaggaaattcaagataaaaatagaaatgatacggcaaagttattcaagttcaaattaggaattgaacgagttgaacaaaaaggaagaagaagcgagaagttacttcaaaattatgcttggcgaagtgaagctctggataagaaattggatttagatattttagcacatattataacagagttgaataatgagatcagtcagtctagtggttatctcaacgccatctctgataggagtaaagaattatactttaataatgaaacggtaggtcaatatcaatttagattgttgcaagaagataggcataattctctcaaaaatagagtattctatagaagtgattatgaacatgagtttgataaagtttttgataagcaaagagagttttatccagaattaacagatgaaatcaagtctaaacttaaagactataccattttttaccagagaagattacgttctcaaaaaggattaattagcatttgtgaattggaaagagttgagagagaagtaactttaaaaaatggtagaaccaagaaaaaacttataggaccaagagtggttcctaaatcttccccaattttccaaatgttcaaaatttggcaaaaaataaatgatattaaggttactaaaaaatacaatcttaaaaaagagaaagaattaggagaggaaactaagcatttgctttttcaagaacttaattggaagggtaaaatgtctaaaactgatttcttgaagtggctattcaaagattctgatgagaattataaagattggactataaaatttgaagaattaccatggaataaaaccaatgaaaaattactagctggtttacgtcaaatcttagaacaggagggaggttttgaaaagattaattggaatgcagatgccgttgaactaattgcaaatttaaaagaggctttggaacatttaggaatatcttctgatattttagaatttgattatagtcttgataattttacagaacaaaagagctatcaattatggcatttattatattcttatgaaagtgataaatctgatactggtaatgtgtcgttattagagaagttacagaacaactttggtttctctgaaaatcaagcaaaaattatctctcatattacttataatcaagattatggaaatttaagcacaagagcaattcgtaaattgttaccacatttagaggatgggcgattatatagtgaggcttctagtctggtaggttataatcattccaatgctgtaaccaaagaagagaatcaaacgagagatttagaagacacgatagaaattttaaagaaaaacagtctaagaaatccggtggttgaaaagattttaaatcaaatgattcacgtggtgaattcaattattgaaaatccagaattaggcagaccagatgaaatcagaattgaattagcaagagaattaaaacaatctgcagaccaaagaagcgaagcaacgaaatcaatagaaaaagcaacaaaagaacatgagaaatatcgccaatatttaaaagatgaaattggattacattatgtaagtagaaatgatctaatcaaatataaattatatctagaattagaacctattggctttaaaactttgtatagtgggacaaaggtagatttgaaagggatgttttttgataagacttttgatgtagaacatattattccgaaggctaaattgtttgatgactcttttagtaataaaaccatagagacgagaggtgataacattaaaaaagggaatgaaacggcgttgcaatatgtagaaagagaatatggtgcagaaggagtagaaggttttaaaaatcgaatagaagaattatggagagcgggcaaaatctcattctctaaacgaaaaaaacttcttatgatgtctggcgatattccaagtgattttattaatcgcgatttagccaatactgcgtatattggtagaaaagcgatggaactgttattgaaagtttctagaaaggtaacgcctacaggaggtaaaattacgaatcgattacgagaagactgggaattaatcaatgtgctcaaagaattgaattgggataaatacgatgcccaaggattaacgtatattcaaaaaaataaagaaggaaaagaattaaaacgtatcaaggattggacgaaaagaaatgatcataggcatcacgccatggatgcaattgctgtggcttttactaaacgaggtattattcaatatttaaacaccttaaacgcgaaagggaaggagaatgaaaagagccaaatggtatatcaactagaaaataaatacacctataaatctgaaaaatcgggcaaaagaaaattcaaaaaaccttttaaaaatattagaaaatccaccaaagaacatttagaaagcatattgatttcatacaaggctaaaaataaagttacgactactaattataatagaattaaaattggtaacggtaaaattttagaacagaaggtagaaacgccaagaggtcaactgcatgaggcaactatttatgggaaatccttaaaatatgagactaaatttgaaaaaataggtggtaaatttgatcgtgcgaaaatcgaaacagttgctaataattcttatagaaaagcattactaaaaagattagaaaaatttggaacacctaaaaaagcctttacgggtgccaatagtctctcaaagaacccaatttatctggaaaatggagaagatacagtgcctgagaaagtgaaacttgtcaatttagttgagcagtttaccattagaaaagatatttcacctgataatttcgcgaatgtgaagaaaattgataaagtaatagatgttggtgttagaaatatattaaaaaagaggttggcagattatgaaggtaaggcaaaagaagcgttttctaacctagaggaaaatcctatttggttgaataagaaaaagggtatttcaataaaaagggtaacgattagtggagtaaacaatgtagaggttcttcatgataaaaaagatcataaagggactgttttagaaaaggatgcggtagattttgtaagtactgggaacaatcatcatgtagcgatatacagagacgagaaaggaaatttacaagaagaggtagtatcattctatgaggcggtcatacgtaaaaatcaaggattgcccattattaagaaaaatcatgagaaaggttgggaatttttgtttaccatgaaacagaatgaaatgtttatttttccctccgatgaatttgatccatatgaaatagatttattggattctaaaaacttgaaaatgatttcaaaatgtctctttagggttcaaagtatatcgtcaaaatattacatattcaaccatcacttagaaacaaaggctgttggcggtaatgagtttaaaaataaaaaaatgttatctggaataacttatcaatttataagaactccatcaaatctggaaaatattgtaaaagttcggttaaatcatttaggggaaattgtacaaattggggaatattaaattataaatcatgctcaaaagaaccctctttttcggtaacccagtttatttaagcaccaaaaataagcaattggtaattaaattcccagaggaagaaaaagaggataggcgtgtgccaattgaagatataggggtagtggtgctggagagtccacaaattactattactacgggtgttttaactaaattggtagaaaataaatgtgtggtgattcattgtaatcagcaacatttgccagtaagtattttacaacctttgagtgggcacacactttttacagaaagactacgatatcaattggatgcaagtgagccgctaaagaaaaatttatggaaacaaacggttcaggcaaaaattcaaaatcaagctactcatttatctatacaagggaaagatgctcgaaaattggagcgttggttaaaagaagtaaagagtggtgatggggagaatcatgaggcttatgcagcggcgtattatttccaaaatatctatgacatagaaggtttttctagaaaccaaaaaggaattccgccaaatcattggttgaattatggttatgccattttgcgtgctgtcacggcaagagcgattaccgcttctgggttattgcctgtatatggaatatggcatcgcaataaatataatccttattgtcttgcagatgatatcatggaaccctataggtcttttgtagacttgattgtgcaagatatgctgattcaatttgatttagaagaagatttgactacagagcataaaagagttctgttacaaattcctgctatggatgttgtgatagaagggaggaaaagcccattgatggttgctatgagtaggacaacgaatagtttatatgaatgttttgaaggaaccagtcgtaaaatattgtatccaactatggaataatttctaaataatatgagcaatggaagatagattttccagactcaatcaatacagatgtatgtgggttttagtgttttttgatttaccaacagaaactagaattgatagaaagcgagcatcacgttttcgaaaacaattgttggacgatggttttgggatgtttcaattttctatttatacaagattctgcacgagtagagaaaataccaatgttcatattaaaagggttaaatcttttctccctaaaaatggaaaagtggctatcatgcagattacagacaaacaatttggaatgattgaattattttatggtaaaaaagaaatagaagggaaggcaccgccacaacaattggagttgttttaggattaaaaaaatgtatctacatcgatattaaaataaaaaacacccttagaaattatcattctaaaggtgtttttaaatcattgacaatcattgaaataacaaaggtatgttgtcaatgatcggttaaaaatacaattttgaaagctattcacaactgtgatatggttcagttattttgttaaacagttgtcaatgatcggttaaaaatacaattttgaaagctattcacaacaaaaaattgtatgtctgcatcgtgagatatgttgtcaatgatcggttaaaaatacaattttgaaagctattcacaacacacctttgaaaattaagaaattaaaggaagttgtcaatgatcggttaaaaatacaattttgaaagctattcacaacatgccagcgctttagggggtgttagtaaaagttgtcaatgatcggttaaaaatacaattttgaaagctattcacaacaaaaaatcattattccaattgctatcatgtgttgtcaatgatcggttaaaaatacaattttgaaagctattcacaacgtcggtagataaagagattctagtgaatggttgtcaatgatcggttaaaaatacaattttgaaagctattcacaacgcccagtcaaacctaaatcttctgctatctgttgtcaatgatcggttaaaaatacaattttgaaagctattcacaacgataatctattcgtaaaagaaagcatctaagttgtcaatgatcggttaaaaatacaattttgaaagctattcacaacgataatctattcgtaaaagaaagcatctaagttgtcaatgatcggttaaaaatacaattttgaaagctattcacaactcgagcaaaacatttgacgaggactatcgcgttgtcaatgatcggttaaaaatacaattttgaaagctattcacaacaacaaaacaccttggattctttcactacaggttgtcaatgatcggttaaaaatacaattttgaaagctattcacaactgcttcttctctagtggtgtctttaaagtcgttgtcaatgatcggttaaaaatacaattttgaaagctattcacaacaaaaaatcattattccaattgctatcatgtgttgtcaatgatcggttaaaaatacaattttgaaagctattcacaactgattgttggaaaccttggttgcgaaaactgttgtcaatgatcggttaaaaatacaattttgaaagctattcacaacaaatcagtcgtgtttgagtttctaaagccgttgtcaatgatcggttaaaaatacaattttgaaagctattcacaacctatcatcttttaattcaataaaataaaaggttgtcaatgatcggttaaaaatacaattttgaaagctattcacaacacccatttggtctttagcaacaccaatttgttgtcaatgatcggttaaaaatacaattttgaaagctattcacaacatacccaactcctttaaaaccttcttctgggttgtcaatgatcggttaaaaatacaattttgaaagctattcacaaccgggtaaaccacattattagtaaagctattgttgtcaatgatcggttaaaaatacaattttgaaagctattcacaacgtttttagtcttagaaactaaatggatattgttgtcaatgatcggttaaaaatacaattttgaaagctattcacaactccgtttcgtgctcaaaataatagaagtcggttgtcaatgatcggttaaaaatacaattttgaaagctattcacaaccaccgccacatcaaagatgctttctaggctgttgtcaatgatcggttaaaaatacaattttgaaagctattcacaactttacgaattccttttcactattcttgaatgttgtcaatgatcggttaaaaatacaattttgaaagctattcacaactttacgaattccttttcactattcttgaatgttgtcaatgatcggttaaaaatacaattttgaaagctattcacaacctatggtcagattttgctaattcaaaatatgttgtcaatgatcggttaaaaatacaattttgaaagctattcacaacgaagatagtgagaggcattaatagagcgtagttgtcaatgatcggttaaaaatacaattttgaaagctattcacaacctgtttgggaatagcctaaaagccttcctagttgtcaatgatcggttaaaaatacaattttgaaagctattcacaacaagactaaagaatactatccaagcgtaggtgttgtcaatgatcggttaaaaatacaattttgaaagctattcacaaccttatagttagttttatttttcaacaaccagttgtcaatgatcggttaaaaatacaattttgaaagctattcacaaccagttttttacaactttgtttaaagaagttgttgtcaatgatcggttaaaaatacaattttgaaagctattcacaacatgtccatcaataacctgcattcccactttgttgtcaatgatcggttaaaaatacaattttgaaagctattcacaacttgtattactaagtaatattagtaaacatagttgtcaatgatcggttaaaaatacaattttgaaagctattcacaacactcttatgcaggttctttgaaacaaagcagttgtcaatgatcggttaaaaatacaattttgaaagctattcacaacacttagctctaaagtatctaactcttctacgttgtcaatgatcggttaaaaatacaattttgaaagctattcacaactctaaacctatttatggacaagattttggtgttgtcaatgatcggttaaaaatacaattttgaaagctattcacaacttagacccctcccataatttaacttccttagttgtcaatgatcggttaaaaatacaattttgaaagctattcacaactgattgttggaaaccttggttgcgaaaactgttgtcaatgatcggttaaaaatacaattttgaaagctattcacaacaggcaaggcggcggatataaaagcaggagggttgtcaatgatcggttaaaaatacaattttgaaagctattcacaacctgatattatagataagaaatgggaatggtgttgtcaatgatcggttaaaaatacaattttgaaagctattcacaacacccacaacggcgtttgattttgcttctaagttgtcaatgatcggttaaaaatacaattttgaaagctattcacaacaaatcagtcgtgtttgagtttctaaagcctgttgtcaatgatcggttaaaaatacaattttgaaagctattcacaacggttgattaagcgttatcaacgttttattgttgtcaatgatcggttaaaaatacaattttgaaagctattcacaacctggtttttgagttgtttaaaccagtgtgtgttgtcaatgatcggttaaaaatacaattttgaaagctattcacaactattccgtccttatcaataggcgtaaatgcgttgtcaatgatcggttaaaaatacaattttgaaagctattcacaacttacagaatattactatatttgtataacaagttgtcaatgatcggttaaaaatacaattttgaaagctattcacaacggtcagtcatatagttgcccccccatactgttgtcaatgatcggttaaaaatacaattttgaaagctattcacaacacagcaccatacggctctaggatagacgttgttgtcaatgatcggttaaaaatacaattttgaaagctattcacaacttgtcttttgttctaaaatagtaggataggttgtcaatgatcggttaaaaatacaattttgaaagctattcacaacctgttttttgatctgtgattcccgtaatctgttgtcaatgatcggttaaaaatacaattttgaaagctattcacaacgaatttgcaaatctgcacagaagtgattcagttgtcaatgatcggttaaaaatacaattttgaaagctattcacaacagtcaaataatctattttgacctatatcaagttgtcaatgatcggttaaaaatacaattttgaaagctattcacaactttattccttttaattttaattctgttttggttgtcaatgatcggttaaaaatacaattttgaaagctattcacaactttattccttttaattttaattctgttttggttgtcaatgatcggttaaaaatacaattttgaaagctattcacaacacaggcaatggtgacataacacttaacgaagttgtcaatgatcggttaaaaatacaattttgaaagctattcacaacctggtttttgagttgtttaaaccagtgtgtgttgtcaatgatcggttaaaaatacaattttgaaagctattcacaaccgcataatatttatcaaaaagggacttcatgttgtcaatgatcggttaaaaatacaattttgaaagctattcacaacactatatctcatttattttaattgctaaagttgtcaatgatcggttaaaaatacaattttgaaagctattcacaactggtaagataagacacttaccaagtgctgtgttgtcaatgatcggttaaaaatacaattttgaaagctattcacaactcttaaaagccattcatatagcttaactgggttgtcaatgatcggttaaaaatacaattttgaaagctattcacaacctaatatttctgcttttttagaaatgttaagttgtcaatgatcggttaaaaatacaattttgaaagctattcacaacttagataatttgttgaccttattaattgtgttgtcaatgatcggttaaaaatacaattttgaaagctattcacaactgtgagaacggaaccatatcaactccaaaagttgtcaatgatcggttaaaaatacaattttgaaagctattcacaacaagttttttacaactttgtttaaagaaatcgttgtcaatgatcggttaaaaatacaattttgaaagctattcacaacattcttttagaggtatcaacgtcttggactgttgtcaatgatcggttaaaaatacaattttgaaagctattcacaactgtgagctattttaaaaaaaaacggctttggttgtcaatgatcggttaaaaatacaattttgaaagctattcacaaccacaaaaacatttttatgtagataaagatgttgtcaatgatcggttaaaaatacaattttgaaagctattcacaacattcacaaccttttgcagtaatttcattaagttgtcaatgatcggttaaaaatacaattttgaaagctattcacaacttacaaaatataactaaaaatttaagttatgttgtcaatgatcggttaaaaatacaattttgaaagctattcacaactttgaagtcaaataaaacatcagataaccagttgtcaatgatcggttaaaaatacaattttgaaagctattcacaactgtgcgctatttttaaaaaaaacggctttggttgtcaatgatcggttaaaaatacaattttgaaagctattcacaacatcttagtgtatgccacaggggataaagcagttgtcaatgatcggttaaaaatacaattttgaaagctattcacaacattcacaaccttttgcagtaatttcattaagttgtcaatgatcggttaaaaatacaattttgaaagctattcacaacctttcgagctaccttcccatccatatcaaagttgtcaatgatcggttaaaaatacaattttgaaagctattcacaacctatggtcagattttgctaattcaaaatatgttgtcaatgatcggttaaaaatacaattttgaaagctattcacaaccctccgcctcatctaacacccatgtggttagttgtcaatgatcggttaaaaatacaattttgaaagctattcacaacttctacatagttcagttttaaatgcttcatgttgtcaatgatcggttaaaaatacaattttgaaagctattcacaacgtgctatcctatctttaattatattttgtcgttgtcaatgatcggttaaaaatacaattttgaaagctattcacaactagtaaagaaattttgcagaggcatgttgtgttgtcaatgatcggttaaaaatacaattttgaaagctattcacaacgcccagtcaaacctaaatcttctgctatctgttgtcaatgatcggttaaaaatacaattttgaaagctattcacaacggtgggaaagtgtattatttcgcttccaaagttgtcaatgatcggttaaaaatacaattttgaaagctattcacaacacacctttgaaaattaagaaattaaaggaagttgtcaatgatcggttaaaaatacaattttgaaagctattcacaactgagcattaccgtcaactctaccatctgtagttgtcaatgatcggttaaaaatacaattttgaaagctattcacaactaataaagccatatttgtgatagacgtacagttgtcaatgatcggttaaaaatacaattttgaaagctattcacaactttgatatgaccttgctttttaagaagaaggttgtcaatgatcggttaaaaatacaattttgaaagctattcacaacttacaacttgatttaaattatttccgattggttgtcaatgatcggttaaaaatacaattttgaaagctattcacaacttcatctatctactattttatatttgaaaggttgtcaatgatcggttaaaaatacaattttgaaagctattcacaaccgcaattagaagctcttttgattctttgtagttgtcaatgatcggttaaaaatacaattttgaaagctattcacaacgactattttggtgccaatatctctgaaagggttgtcaatgatcggttaaaaatacaattttgaaagctattcacaacctatgtgctttacatttttccaagtatttagttgtcaatgttttgaaagctattcacaaccggctatttcgctatcttttgtttttatcgttgtcaatgatcggttaaaaatacaattttgaaagctattcacaactctaaaaatttgtgtagctctctagcacttgttgtcaatgatcggttaaaaatacaattttgaaagctattcacaactagcggcataggttcattgtcaaaaccacggttgtcaatgatcggttaaaaatacaattttgaaagctattcacaactaaatctcttaactcatatccgttctcttcgttgtcaatgatcggttaaaaatacaattttgaaagctattcacaacacacctttgaaaattaagaaattaaaggaagttgtcaatgatcggttaaaaatacaattttgaaagctattcacaacataccagccgtctcttttagatttcaggcagttgtcaatgatcggttaaaaatacaattttgaaagctattcacaactctaaattggtattactatcagcatcaaaagttgtcaatgatcggttaaaaatacaattttgaaagctattcacaacaaaattctcatcactccactcaaattgaaagttgtcaatgatcggttaaaaatacaattttgaaagctattcacaactatctattttatattctggactttttattgttgtcaatgatcggttaaaaatacaattttgaaagctattcacaaccaactcctgctattgcatctaattcaagtcgttgtcaatgatcggttaaaaatacaattttgaaagctattcacaactggtaagataagacacttaccaagtgctgtgttgtcaatgatcggttaaaaatacaattttgaaagctattcacaacatcaaaaggacgggtaaaatggtcaatggggttgtcaatgatcggttaaaaatacaattttgaaagctattcacaacatgtccgtaataagtgaatgacaattcatagttgtcaatgatcggttaaaaatacaattttgaaagctattcacaacttttctgctcttgtcttttgcccttactacgttgtcaatgatcggttaaaaatacaattttgaaagctattcacaaccttacggagacaaaaaacttaaaaatggtcgttgtcaatgatcggttaaaaatacaattttgaaagctattcacaacactaatattgtattcctttgaaagtttagagttgtcaatgatcggttaaaaatacaattttgaaagctattcacaacctattttaccaacattatttttaatacacagttgtcaatgatcggttaaaaatacaattttgaaagctattcacaactcacaattaagctatcctttctatatttgggttgtcaatgatcggttaaaaatacaattttgaaagctattcacaaccaaacaagcaggcaacaaaccaacaatgacgttgtcaatgatcggttaaaaatacaattttgaaagctattcacaacggttttttagaatactgtccaatgatgtttgttgtcaatgatcggttaaaaatacaattttgaaagctattcacaaccatcttaaagatgcatctaactccgtcttcgttgtcaatgatcggttaaaaatacaattttgaaagctattcacaacccgttgtgctatttatgcataaccgaaacgttgtcaatgatcggttaaaaatacaattttgaaagctattcacaacgcttccaatcctttctgtaaagcttcaatgttgtcaatgatcggttaaaaatacaa

SEQ ID NO: 2235 - DNA, 24155 bp, synthetic construct
  variation 15513..17167: note = n is a, c, g, or t
  misc_feature 1..24155: note = Synthetic
  source 1..24155: mol_type = other DNA
ttgcattatctccttgttcaaaaacaaattcaatagcattcttagagtttactgactctttcagcttacttcctttttctacaacagaaaaagatgttaacggctgctgactatgctttattaaatcttctgtaaatttaaaatttaaagactctttgttttcacttaaaacacctaaagacaaagaatttataggttttacagttccgtcatttgccgctatcataattacacctttgtatttttttaaaacaaaatctgtaatatgatcacctataacattaatcattttaggctttctttttcctaaaacaattatgtctggctgttgctcttcaatctgttttgctatttcacttttaacgtttccaaaagaaaaactatgcttaatttttacatctgtagccttagaaattggcttaataattttactaattatactgtctgtactattgtactgctcgttaatagaacgcatagcagacagttgattgtccctaagaactacatctgaaggtttttttacgtaaaaaaaagacacttcaccacctatcatttttgcaagattaacagtactttttaatgtagaaactgttgtcttttttaaatctgatagcactaaaattttatatttattttttttcatagatcctaacttaaactaatgttagatttaggtcttaacttgaaaaattctataaaactttctgggttctctactattcctctttttgaaattaatttgatatctatatttcgttctttcgccttaaaagcaaaatcttctaaaatttcaataatatcataatctagatatcttgttttagtaacatcaaattcaaaataagtatctctaggtaaactatctaactcttttaaaatagctcctttgttaaaaaaggtaacttcttctgcaagtgtcatttttattttatgctttccgttactgttgtcttcaatatgaagaaaatgcgagttctggtaactttttaaaagtataacaacaactccaacagctaatcctaaagcaatgccaattaataaatctgtaaaaacaatacctaccacagtaacaaaaaatggtatagattgtttccaacctaacttgtacatcttaaaaaacaatgccggctttgctagtttgtaacctacaattaataaaattgctgccaatacagataacggaatcatatttaataacgttggaataagaacaacagaaattaatagtagaaaaccgtgtaaaattgcagccatttttgtttttccgttagattgtatgtttgcagaactacgaacaataacctgagtaattggcaaaccacctattaaaccagaaataatattacctgtaccttgagctagtaattctctgttagttggtgttacacttttttctggatctagtttatctgtagcctctacacataacaaggtttctaaacttgcaactaatgcaatagtaaatgctataatccaaacttcaggatttgtaatagcagaaaaattaggaaaactaaattgacctataaaagaatcgaaactatctggcacaggaacacttactaaatgagccgtagaaacaccaaaaacatcgctagttttagttaatgcataaaaaataatacctacagcaacagctactaaaggaccttgaataacttcaaaaatctttccttttttcactaaaacattgctccataataataaaattgccaaacttataagtcctactactgttggaccaacagctatattatcaaaaatactaaaaatagcagaaaaagtattttcacctgaagcttctataaaactatctgccccttctggctcagaatcgtaaccaaaaaagtgtggaatttgttttaaaataataataataccaatacctgttagcatccctttaattacagatgatggaaaataataaccaataatacctgcttttaaaataccaaaaaccaattgtattacacctcctaaaacaactgcaactaaaaagttttcataaccacctaaagtcccaattgcagttaaaacaattgcagctaaaccagcagctggtccacttactccaactctagatccacttaaagcacctacaactacaccacctataatacctgcaattacacctgcaaataagggtgcgccacttgctaatgcaatacctaaacataatggtaatgcaacaaagaatacgacaatactcgctggtaagtcgttttttaaatttttaaacatattaaatagaatattagcctctttgacttatttttttgtctagaggagttaataaattaatagtaactacacgtaaatgcatagtcacaaaaaagtctaattataatatgtaaaaatcgggaggtggtgaaacaaggtttataagaggtcttgggtattttttagaagaatactcttgcttgtttttcttttctacaaaagaaatatctatatctgaaaaattatctgctgtcaaaaacttttttgcactatgaccttcttcctcttcagagattgaataaaaaacagaaatatctatagaatcattaaccatcttgataatcgttggcgcagataaaaacgcaacgaaaagcacagtaaaaaatatggaaataatttttttagacattacatttaaaattcggaaagttgcaaagataacaatctacacatttaataatatagtaatagtatattaaaaaattgttaagtttttaacaattttaagcatctttctgattaccaattaattacgcaaagaacccagatataagttatactcatcgtaatttaatcctactaaaaacaatacaggttaaatacaatagattaatttatgatattttgatgcgttattataattcttcttttaggctaaacttttaaatctagtacccaagaaaaatagataaccacacaaatatataactatatagaactagctactttctcttatattttttactgtttttaactcggttaaaaacataaactgctactacaaataatgctaataatggaaaaactaaatcccctcccatagtttaaaaattttattgttttttattttttaaggcaaacgaaactattgctgccgttactactcccatagataacgcagtaaatatgccctgtcgtatataattgtttaaattaaaaaactcaagtgccttatcttctttcattctacctgcctctacaatgtatgctacaatattagaaaaatactctggagaaatataaacctgcgttatatattgcgtagccggacttaacaaagctacaactgcacttaatacaataccgctaataaatccttgtttccaagtcatttctcccttaagatcgttcttttttttatctaacaaggccaacacaaatacaactatagctactaaagcaaaaagatttgtatacattaattgtttaccaataagctctgagtgccaacccatttgcttttcaaacaaagcccataaaagcgcacaaccagaaaagataaaaccccattttatctcagttttaaacttattcatatctgcttattttctatattttgataatgcatttcttgtaaaatctgacaagactaattttccggaaattgttgctctttcttttagtaaagcatcccatttttctgttccttgccacaatatcgttttcatttcttgcaatgcctctggattgtatgatgctaatttttctgtaaaaattgctatctctttatccatatctttactagactcaaacacttttgcaaacaatcctttgtcttttgcccaatatgcactttgccaatctgtagctgctaaagatagctctgccagaccgctttttcctattttacgctctaccgctggcgcaattacaaaaggaccaataccaattgctaattctgataattttatagatgcgtgttctgtagcaaaaacatagtcgcacgcagctgctaaaccaacaccaccgccaacagtcttaccttgcacacgaccaactattagttttttacacatacgcattgcattaataacgtttgcaaaaccactaaaaaattgttgtccttcttccaagttggttacttccattaactcatcaaaagaagcccctgcgcaaaaagctttttctccttcagactttaaaataattacagcaacgttattatccacagataatttctgtatctcttttgttaacctatctaacaattctgctacaaaagaattactagccgggtgaccaaactctattgttgctattttattatctatattggtgtataaactaccgtttgctctagctgtgcccataaaggtgttattaattttctaagatcaaaattacgttttttgtaacaggggacgaaactttgagttgaatttaaacactaatgcagctcctcttattagcatccaaaccgtaaaagcaatccaaattcctgtaaaaccccaacctaaatatttacccaaatacaacataggcacaaagcctaaaaaggtcgcccctaaaagtgtatttcttaaatacttcatttctcccaaacctttaaataagccatcaaaaacaaaggcgatagagtttataggtaagcttaaaattatgatgtaaaaaaccgaataaaaggtatctaatgccacttgttcgttagaaaaaagtcttcctataggatgataaaacacaaagcctaagaccgttaacattagactaactattactccatattgtataattttctttgctaaattccataaattaggataatccttagcccctagcaatttacctcctagaatattacctgcagcaccataaccatctataaaaaaggaagaaaatagccatacatttatagcaattgtatgcgcacctataaacctatctcccaaatctgtagcctcgcgtaccgctaatattaatgctatatttaaagacaaagcacgtacaaataaatttaaactcattattaccaaacgccctaattctggatgaagaggaaaacgcagttttaaactaatatctgtttttaaaaccagtaagaaaaatgcaattattgccattactccttgcgatagtaaacttgcccaggcagcaccatctaaatacattggctccaaaacaccttctatgccatacacaaaaatataatctaataatatatttaaaactgcaccaattaacgcaattaccattggccaacttgtattctgtaaccctctaaaaatacccattaccgcaaacgtaaataaggttaacggaaaaccccaaactctaataccgtagtatgatacgcaaaactctaaaattttatcttttgcttttaaaaacataaatatttcttctacaacaaaaacagtagacagtagaattataatacttaatagaatattaaaaaaaatagcttgtacaggcagtgttttaacctcatctaaacgaccagctcctaaatactgagaaattatagcagaaatagcacttctagtttgtcctaatatccaaataagcatagacaaaaaagaccctacaatacctgctgccgctaaagattctaatccgtattctggaatattgcctacaatggcagcatctgtaatagacaacaacggctcagatatacctgcaattgtagctggtatagctagcttatttatatttttaaggtttacaattgttttcaaaaaaaagtgactttataaaactagttcgtaacaaagaaaaggatgttcgctttgctttggaaaataaatatctgctagtcttttataacccctagcttcgtaaaaacgcacattgcgtttgtttacactaaacgtatctaacctaactgaggcaaacttattttcttttgcataagattctgcaaaggtcatcattttttgggcatatcctttaccttgatgctccggatgtacagataatctgtgtatgtacaaattagtatcactcttagttaaccactttataggaatgtactcattatccatatgggtagacagtacaatggttccttctatttttttatcaacctctaaaacataaagttctccttgggcaatatcatttaaaaaagcctgtttacttgggtaatgttcgttccattggtaaataccattttctatcataaatgcagcacaagctttagttaccgtaagtatttcatttatttctgatatttttgctagacgaatcataagaggtttaaattaaattgtaaatttagagtataaaatacaacttataaaatgtgttattctacttaagattactttaaccaagaatctaaataacatattattaataaccatataaaactataaaatagaacagatgaaaaacatattggttcctatagggacatctccagagagttataaaacattacaatatgccgtagattttgctaaaaactttgatgcaactatatatgtaatggaaatttttaatgtaatctctgctggtgctggtagtttagctaacgctacagagaagattgaaaaaaataacagagagcaattgttagaaattgttaataaggttgataaaaaaggaattgatataaaaattgtaacctaccaaggtactattattgaaggccttaaaaagattgacaaacaatacctaggcatagatttaattataatggcaccaagaagtaacgatattaacgagggcacttaccttggcaatacttctggaaaaattataaaaagaacagatataccaacacttattgtaccaaaagaataccagtttaaacctgttacaactatacttacagcatttaaatctggagttttaaaacgcaaaagaatacttaatccattaattactataaaaaagaagtttaatagtaatgtaagtttgttattggtcaaaactccaggctatacagatgatgatttaggtgtaaatagtgctttattagatattagttctaaaatgacaataacagagaatgtgactacgtatttaggtgttttagaacattttcgtacaaaagaaccagatatgctttgtgtttttagaagaaagcgtggttttttcaagaaattatgggaaaaaaacaccatttctaaatcggaattttacgcaccagtaccagtattggttttaagtgttaaaaaagactaagctctttttgggggattagctcagctggctagagcgcttgcctggcaggcaagaggtcaccggttcgactccggtattctccaccatattgctttacaaacaaaaacccctttagagttttctaaaggggttttgttttgctttcgttttaaagaaaaaaagttacttaattaaactattctacaataaagaggtcatagatatatctaaattaaatctatgaaaaagtttgccctactaatagctgtagcaacaatagtaagttgtagccacgatgacgattctaaaaaagcagaaacaactacaacaactaatgcatacaaagcagaaggctttgttaccattaatgaaggacaagcaggatttactgcaggcttagaaagtggagatagatttggaagagatcatgacaaaataggagatgttgatggagatggagtaacagattttattgttggcgctcgttctgacgatgatggagctacagatgcaggagcagtttatattttatttatgaacaatgacggaacagtaaaatctaatcaaaaaatatctatgcttgctggtggctttacagatacattaaatgctggcaacttttttggttatggcgtagcaggtattggagattacaataacgatggtattccagatatagccgtttcttctcctgtagctccaaacaattcgctatacattatacatttaaacaccgacggcaccgttaagagttttgttaagaatgaaaatattattgctaatggcttaactgctataggcgatttaaacggagataatagaatagatttagttgcctgcgttcctggatctaatgatggcggaaataatcgtggtgctatagatatattgtttttaaatgatgagtctaaagttatgtatggcaatacagtaaccattagtgacactcaaggaggcctaggagcagggctaggagatgatgaccaatttggcggtagagaagttgctatgctaggagatatagataatgacggcaacaaagagttagccgttggtgcttttatgtctaacggaggtaagggagcagtttggatactctctttagacaatactacctacaatgtaatctctaaaattaaaattactgaaggcctaaacggctttacagatgaattaacatctgatgttaaccctaatggtacttatggcgcaaattttggacacgctatgtgtgctgcaggagatatagatggcgatggtattccagatttaattactggggctaaccaacaatatgaaggctggggctatattttgtacctaaatgaagataaaacggttaaatcatttagccgaattaataatgatgatggtggttttgaattaaatttagaatcggaagaacgtttttctcgttctatatcttttgctggcgacttaaagggtgatggttctattgctgtaaattttggcggaggagcaggaggaacaggaactttatatactttattttttaggcctcagtaaataacatattaaacttagaaataataaagcccctttaaaattagtaaaggggctttattatttattttgcttacactataaattatgagtcctagcttctcttttttctatctcctcaagcatagtttcttttttagaataagacctaattgtaattgcagttacaatagccaacacaacacctaaaatagaattcacaatttctattaaagtactatttaaaaacccttctatagtttgtgacttagaaaccactttaaaaagatattgtcctatataattagatacaatccataatgcccaccacaaaccaataacagttacatcactttttaactggttatttgttttagagtttataagatttgttgtcttcgcatccatttctttcattatctgatatggtctaaataatgaaatgatagggacaaaccaggcccctgcagcccacccttcagaatgactacaatttactctaatatttaaattataataagctcttctaaaccatcgtaaaaaagtaactattgaaactacaaaagcacctaagtacataatagctattatttgctccctaaaatcattagagtctaatacctgatctgaaacatattcttcatttttaagcaaaagcaataagttatactgtaggtaagatgaaaatgctgaaacggcatctaacaacataacaatccaaatcagtacctgtgcaattttagctctttctaaatttggtcttatagcttctatcttatttttagtaccaacaataacattagaatccaaaataaaatctacgcaagaatcttcaaagtctaagttcttgccttttatgttgcaaatattttctttgttatttacagatcttttccgatttaaacattgtttacacttctcgaattgagcatttgtcatctattcaatttggtttcttataaatgtaaactaataactacatttatttggttacaaaataggtaacgacgcataaaataggatattgttaaaagtagttttcaaaaattaaaagcccctttaaaattagtaaaggggcttacttttttattttgtaaaaattacaaaaaacaacttgctttatacttaaataagtttttatattagagtttaaattctactttttaaataagcctaccccctaaacttcttaaaaagatttaaacagagagcataaaaaagccccgaattggaagtcgaggcggcttaaatgttttcacaacggaataatccttattgtgaattgctttcagtactgtaaatatataaaaagaatataataaagcaaatacggatttccgtaatagaaataaaaaagaatcttttagttttaaaaaaaagtatacaaatgaaacgaattttaggattggatttaggaaccaatagcattgggtgggcattagtaaacgaagcagagaatacgagtgagcaatcagaaattataaaattaggagtacgcgtaaaccctttaacagtagatgaaaaaacagactttgaaaaaggaagacctctttctgtaaatgctgatagaacattaaaaagaggagctcgccgtaatttgcaacgttttaagttacgtagaaaaaatctgatagaaattcttttaaagagtaaaattatttttgatgatacatttttaactgaaataggcaagaataccacgcatcaaacattagggttaagagccaaagctgccaatgaaaaaatagaactgcttgattttgcaaaagtattactcgccataaataagaaaagaggttacaagagcagtagaaaatctattaatgaagatgaaggagttgccatagatggtatgtctgttgctaaaacgttatatgaaaacaaccttacaccgggtcagtatgttttaaacctactagaaaataataaaaagtatattcctgaattttatcgctctgatttacaaagcgaatttgatatggtctggaataatcaaaaaacatattatcctgaaattctaacagaaacattatataaagaattacaaggtaaaaacaagggggctacatgggcaatttgtcaaaaacctttcaatatcgctggtgaaaaattagaaggaaaagcacaagagcaaaaacttaaaaaataccagttacgtgttcaagccttaacagaaaaattagatttagaacatttagctattgctctacaagaaataaataatgatgccaacaaatctagcggttatttaggcgcaataagcgataggagcaaggaattgtattttgataaaattacagttggtcaatatctgcatagtcaaatcaaaataaatccacatacttctttgaaaaaccaagtgttttatagacaagattatctagatgaatttgaacaagtttgggaaacacaagctaaacatcatccaattttaaccaacgctttaaaagaagaagttagagatgtaattatattttatcaaagaaaattaaaatctcaaaaacatttaatttctaattgccaatttgaaaaataccacaaagctattcctaaatcttctcctttgtttcaagagtttaaaatttggcaaaatctcaataacctacaatttaaacaaactaataaaaaaacgagtggcatacctactcaagaacaaggagctgattatgaactagatgaagaaacaaaaactttactctttaatgaattaaatgttagaggtgacttaaaagcaaatgaaatactgaaatttttaggtaagaaaccaaaagaatggaaatgtaattttgaaaaaattgaaggaaatagaaccaaccaagcattatacgccatttataaggaaatagcagatattgaaggttatggttttgattggagcaaaaaatcagctttagaaattaaagaagaactaaaagctatttttactgaaataggaataaaaccagaaattttagattttaatgtaaataaagaaagtactgattttgacaagcaatccagttaccagttatggcacttgttatattctgccgaagacgaccataaaataaatgaagatgataaattggtttatggaaattctagcgttgcattaaaaaagaaattgcataataagtatggttttaaacctgaatatacaaaatggctagctaacataaagctacaacaagattatggcagtttatcatcaagagcaatacgtaaagttttaccttttttacaaagtggcaatgagttttcggaggctagtaagttagcaggctacaaccattccaacagcttaaccaaagatgatttagagaaacgagttttaaaagatactttagaacttttgcctaaaaatagcttgcgaaatcctgtagtggaaaaaatattgaaccaaatggtaaatttggtaaatcaagttattaaaacttacgggaaaccagatgaagtaagaatagaactcgctagagaacttaaaaaatcggcatcagagcgtaaagatgcaacctcctttataacaaaacgtactaaggaaaatgaggatattagaaaattaatatccaaagaatttggtattcctaacccaacaaaaaacgacgttgtaaggtatcgtttgtatgaagaattaaaaggtttaggctataagacagttttcacaaatgaatacattcctaaagaaaaacttttttctaaagaaatagatattgagcacattataccaaaagctatgttgtttgatgattcattctcaaacaagacattagcttacagaaaaataaatctccaaaaaagagatagaacagcgctagattttattgaaaatgattttaatgctgatttagaaaactataaaaacagagtggaggctctttataataaaggtaatggtattagcaaaggcaagtataaaaaactgttaatgagccagcaaaatttacctgatggttttattgcgcgcgatttaagaaactcacagtacatagctaaaaaagccaaaactatgctgtttgaagtgtgtaaaaacgttgtttctacaacaggtagcattactgataaattaagggaagattgggatttaattaatgtaatgaaagaactgaatttacctaaatacaaggctttaggtttaactgaaattcaagtaagaaaaggcaataaaaaaattgaagttattaaagattggactaaacgtaatgaccaccgccatcatgcaatggatgctctaacggttgcatttacaacacataaccatatacaataccttaataacttaaatgctagaaaagacgataatcataaaaagcattcaaacataattgcgatagaaaaagtaataacacataaaaacactgaaggaaagaaaaagtttgtagcgccaatgccaaattttcgtactcaagcaaaacaacatattgagtctattttgatttctttcaaggctaaaaataaagtagtaactaaaaacataaataaaactaaattaaaagggaaagacaattttaaatctaaagtacaacttaccccaagagggcaattacataaagaaactgtttacggtagatctaaacaacctatggataaaaccataaaaattagtaagaaaattacattagaacagatttgtaatattattaaccctcaaataaaacaatgtttactagatcatttagctaaaaataacaatgatctccttcaagcttttgacagtaaaacacttaagaaagacctgttaatttataacaacgagcccataaaagaagtgcattgctatgaaaatgtttataccattagaaaagaagtaagtgcagataattttaaaaacgaaaagagtttagataaagttatagatagacagctaaaagaacttcttaaaaaacgcttaaaagcatataaaggcaatgctaaattagctttttcagacctagataaaaatccaatttggttaaataaagaaaaaggtattgcggttaaacgagttaccatttccggtgtaagtaatgtagaaacacttcatgaaaaaagagatcatgtcggtaatttgatactagacaaaaaagggaaaacaatacaaaatgactttgtaagtacaggaaacaatcatcatgtcgcaatttacaaagatgaaaaaggtaaacttcaggataaggtagtatcattttatgaagttgtacaacgtgttaattctgggctttcaataattgatagagatttcaaccaacatcttggttggcagtttttatttagtatgaaacaaaatgaattatttattttcccttctgaaggcttcaatccaattgagattaatttattaaacatagagaattcaaagatgataagcaagcatctatatagggttcagaagttttcaagagttgaatatggtaattcagttgtcagggattacgtttttagacatcatctagaaactcaaataaacgaccaaaaagagctaagaaatacagcatataagatctttaaaagtatctcggaatttgaatttttaataaaagttagaacaaaccatttaggtcaaattgttcaagtaggggaatattaaaattgatatgtaatgataaaacgtactcttttttttggcaaccctgcatacctcagcactagaaatgagcaattggtagttagttttcctgaaagcactaaaaaggataaaaccattgctatagaggatttggggtatgtagtgttagagcatccgcaaattacacttaccaatggcttattgcgcaaactagtacaaaacaaaactgctgtaataacttgtgacagccaacatttaccttgttctttattgcaacctttggtagggcatagtgagcaaaccgagcgtatgcgccaccaactaaatgctagcttacccttaaaaaagaatttatggcagcaaaccataacttacaaaataaacaaccaagccaatcatttgttacaacgcaaaaaaaacgcattaaagttaaagcgctgggcaaaagaggttaaaagcggcgacagtggcaatcatgaggctattgctgctgctttttattttcagtctctgtttagtagcattgcaaattttagccgcaacaaaaaaggagtgccacccaacaatttactaaactatggctatgccattttacgtgccgttaccgcaagagctttggtaagctctggtatgttgcccagtgttggtatttttcataaaaataaatacaatgccttttgcctggcagatgatgttatggagccttaccgtatttatgtagatgctttagtgtatagtttggtagaagctggtggtaacattagtgaactaaaccaacaattaaaagcacaattactaagtatacctgctttagatgtgtatatagatggtaaatacagcccacttatggtggcaatgagccgcactacaaatagtttgtatgaatgttttaatggcaatagccgtagaatattatacccagaatacatgtaataatgtttgcagataattatagccgacttaaccaataccgtagtatgtgggtacttgttttttttgatttaccaaccgaaacccgtaaagaccgtaaagctgctagtggttttagaaaaaaattgttagatgatggttttactatgtttcagtttagtatttacttgcgtttttgtgctagtagagaaaatgctgctgtacatataaaacgcactaagcttaatttgcccaagcaaggcaaagtgtgtattatgcaaattacagacaagcagtttgggatgatggagctttttcatggcgccaaagaggtgccaccagaaaacccaagccaacaactagaacttttttagaacagaaaaaaagggtttttaaattactaaaaaccatacaattacagtttattttacaatgctacaaacacagttaaaaagcagtataccagcatnnnnnnnnnnnnnnnnnnnnnnnnnnnnnnnnnnnnnnnnnnnnnnnnnnnnnnnnnnnnnnnnnnnnnnnnnnnnnnnnnnnnnnnnnnnnnnnnnnnnnnnnnnnnnnnnnnnnnnnnnnnnnnnnnnnnnnnnnnnnnnnnnnnnnnnnnnnnnnnnnnnnnnnnnnnnnnnnnnnnnnnnnnnnnnnnnnnnnnnnnnnnnnnnnnnnnnnnnnnnnnnnnnnnnnnnnnnnnnnnnnnnnnnnnnnnnnnnnnnnnnnnnnnnnnnnnnnnnnnnnnnnnnnnnnnnnnnnnnnnnnnnnnnnnnnnnnnnnnnnnnnnnnnnnnnnnnnnnnnnnnnnnnnnnnnnnnnnnnnnnnnnnnnnnnnnnnnnnnnnnnnnnnnnnnnnnnnnnnnnnnnnnnnnnnnnnnnnnnnnnnnnnnnnnnnnnnnnnnnnnnnnnnnnnnnnnnnnnnnnnnnnnnnnnnnnnnnnnnnnnnnnnnnnnnnnnnnnnnnnnnnnnnnnnnnnnnnnnnnnnnnnnnnnnnnnnnnnnnnnnnnnnnnnnnnnnnnnnnnnnnnnnnnnnnnnnnnnnnnnnnnnnnnnnnnnnnnnnnnnnnnnnnnnnnnnnnnnnnnnnnnnnnnnnnnnnnnnnnnnnnnnnnnnnnnnnnnnnnnnnnnnnnnnnnnnnnnnnnnnnnnnnnnnnnnnnnnnnnnnnnnnnnnnnnnnnnnnnnnnnnnnnnnnnnnnnnnnnnnnnnnnnnnnnnnnnnnnnnnnnnnnnnnnnnnnnnnnnnnnnnnnnnnnnnnnnnnnnnnnnnnnnnnnnnnnnnnnnnnnnnnnnnnnnnnnnnnnnnnnnnnnnnnnnnnnnnnnnnnnnnnnnnnnnnnnnnnnnnnnnnnnnnnnnnnnnnnnnnnnnnnnnnnnnnnnnnnnnnnnnnnnnnnnnnnnnnnnnnnnnnnnnnnnnnnnnnnnnnnnnnnnnnnnnnnnnnnnnnnnnnnnnnnnnnnnnnnnnnnnnnnnnnnnnnnnnnnnnnnnnnnnnnnnnnnnnnnnnnnnnnnnnnnnnnnnnnnnnnnnnnnnnnnnnnnnnnnnnnnnnnnnnnnnnnnnnnnnnnnnnnnnnnnnnnnnnnnnnnnnnnnnnnnnnnnnnnnnnnnnnnnnnnnnnnnnnnnnnnnnnnnnnnnnnnnnnnnnnnnnnnnnnnnnnnnnnnnnnnnnnnnnnnnnnnnnnnnnnnnnnnnnnnnnnnnnnnnnnnnnnnnnnnnnnnnnnnnnnnnnnnnnnnnnnnnnnnnnnnnnnnnnnnnnnnnnnnnnnnnnnnnnnnnnnnnnnnnnnnnnnnnnnnnnnnnnnnnnnnnnnnnnnnnnnnnnnnnnnnnnnnnnnnnnnnnnnnnnnnnnnnnnnnnnnnnnnnnnnnnnnnnnnnnnnnnnnnnnnnnnnnnnnnnnnnnnnnnnnnnnnnnnnnnnnnnnnnnnnnnnnnnnnnnnnnnnnnnnnnnnnnnnnnnnnnnnnnnnnnnnnnnnnnnnnnnnnnnnnnnnnnnnnnnnnnnnnnnnnnnnnnnnnnnnnnnnnnnnnnnnnnnnnnnnnnnnnnnnnnnnnnnnnnnnnnnnnnnnnnnnnnnnnnnnnnnnnnnnnnnnnnnnnnnnnnnnnnnnnnnnnnnnnnnnnnnnnnntactgcgaatcatcaataaaattaatgaactgaccgagcggagcgaccgatgaattcctataaaaaaacaatagtaaatatatgaataaagcaattactcacgccatagttattttttttggtgttcatgaagctcattcttcgctttcacaactactaaacgtaaaacaatactataatttactaaaaaacatcaataaatcaataaactgaccgagcggagcaaccgatgaattcctataaaaaacaataacaaatatatgaataaagcaattactcactttacatctatttttttaaatgtgttcgtgaagctcattcttcgctttcacaacttgtaacagctaccaatagtatttttttttactgaaaacacctataaaattaaaaggtaggacaactagtcggcttataaaaaactaatgctttgttattaacttctgttgatctctaaagtaactaggggtataccccattttacgtttaaaagttctattaaagttagatatgttattaaacccactatcaaaacaaatttcgtttatagagcgttctgtttctataagcaaccttgccgcgtgccctaaacgcaaatcactaacatagtcagagaatgaagagtttgtgctttttttaaaaaagtgactaaaggcagattcagacatattaaccaaactagcaacatcttttaaaagtattttctgatgcaaattctctttaatataattgtttactttttctattctacggcttttatgtatggtataataatctacataagaatgagatgctaacattttagtgttgcgagcaatagacaaatcgtacaagattgataaaaaattaagaagtgaatcaaaatcctgagactcggataaacgcaatattttaggttttaatacagctaaagtttctttagaaaacaaaatacctcttttagatttttctaacaagtccctaataggcaacattagctttctttttaatgccaattctgataaaaacttctcatgaaactgcactgttacaacatgtgcttctgtgttttcatctactcctgtccacgcgtgtggtgtattagaacctaccaataccaaatcgcaattttcatactcctgtatagagtctcctataattctttttccagatgaatttaataccaagttaagctctagctcgggatgaaaatgtatgggaaaatcgaacttagccgagtgatggtttaatacaatgaagaaatcatcttcagatataggcactaattcccttaaaatacgcgcttctttattcataatagtatcataaggtgtttcatcaaaattacgtctcaattatattaaattgtaaataaaaagctacaattattatcaaattaaataaaaataacttaaaaaaacactacaacggacactaatatttcgtaaaaatatcacattttaccacctaaattcatataagtatcattatttaacatcatttacaaaatcattgttaacgatatgttattcttttgtaaacaacttaattactaactaattaaacttatgaactaatgaaatataaatttcaaaaaagcataatttttattgttttcttaattttaagcttctcaggagttgcgcaaattaatgtaaccggaacagtaaaatctaacgacggagttcctttacttggtgtcaccattatggaaaaaggttctgccacaaacggtgtaacaacagattttgacggaaacttttctattgacgttaatagcactaaagacctacttgtagtttcttacattggctttgttactaaaacgatttcgataccagaaaacaaggttgtaactgtcctcctagaagaagacctgcaacaattatcagaagttgttgtggttggttatggatctgttaaaaagagtgatattaccggttctgttacttcggtagaaatggacaacataccctctaaaccggccaattctattgatggtttgttacaaggacaggttgctggtgtgcaagtaacaacaccgtctgataatcctggagccggtgcagttataagaattagaggtggtagttctttacgcggtggtaatgatccgcttgttgtggtagatggctttcctattgggtacgcaggtgatttaaaacaaatatctccgcaagatattgcttctatggaagtgcttaaagatgcttcggcttctgcaatatatggctctagaggtgccaatggtgtaattatgattacaacaaaaaaaggcgctaaacatactacagaggttaccgtttctcagcaaaatacctactctagctttacatctgatttgaatttatggagagatcctgtattaatggcagaattaagcaacgagagcagaactaacggtggttttactccaatttacattggggctaaagatgcaaatggtgtgtattacccatctgtaagcgaacttaaaagcggagattggaaatacaacactcgctgggacgatgttgtttttcgcgaccctgtatctaacaacactaacgttgctatacgtagccaaacagaccgcacacagtttagtttaagtactacatattatactaacgaaggtgtttacattaataacgattatgaaaaactaaacattaacttaaatgtaattcataaaatatttaatgacaaagttactgttggcggtaatgttatatactctaaaggaaaccagaacaataataatgatttagcatattggcgtaatcctatttttcctatttaccaagatggcaacccaattaacgactactttttagctggctctcaagattactctcaccctattgctttaatagaaaacaggactaataaaaataaatttttagactttataggttctgcttttatagagattgattttacaaagactttaaaattaaaaactcaggttaaccataaatacgggcgttctataacagattattacaatccaaaaatttatacagaagacggtacctttaacaatggttctggaggtataaacaactgggaaaatagtgaaactgttgcagaaacttttttaacctataatgatacgtataaagaaaagcacaactttactgcaatggctggtttctcttaccaagggtacgaggctaggacgtctgacttaaaagcgtatgattttttaaacgaatctctaggcaatggtaaccttggtgctggcaacccagaaaagcaatctgttgccaatagcttatctgaaaccgtaatgtactcgggtattggtcgtttaaactatgggtatgatgataaatacctagcaacatttactgtgcgtacagacggttcttctaaatttggagaaaacaaccaatgggctatgttcccttctggcgcattagcttggaaactacacaaagaaagttttatagacaacctaaatgtttttgacgagcttaagttacgtgctagttatggtatatctggtaatcaaggtatttctccatacctaattaatagtaggtacggacaagaccaatactatgtaaacggtcgttggcaaacaacaattggccctggctacgtagttggtcaagatagtcaaagtggtaaaaaaacgtggggaggtattcctaatccagatttaaaatgggaaactacagagcagtttaacattggtgcagattttgccttttttaataacagattaaaagttactgcagattactacaaaaaacatacatcagatttattaagagaacgtttgctttctccttcttcttcttacgataaaatgtgggttaacgatggtgaaatagaaaaccaaggagcagaagtaactctagatggtactatggttaataaagaagattggggattaaacggtatgtttattttctctagaaacaaaaacaaagtggttagcctaggagatgcagtatcatctggcctaaatactgatgctttaacaggtattaaatatgagttctctggaaaccaagttgaagctttccgttctataccaaacatcttagctgttgggcaaccaataaatgtgttctacggttataaagtagatggtattgtacagtctgaagccgaaggtttagctgccggcttaaacggagatttagcacaaccaggagaatttaaatatgtagatttaaatgaagacggagttatagatgaagatgaccgtgcaataattggtaatcctaatccagattttactgcaagtttaaatcttaatggtcgttataagaattttgatgtatctcttttctttaacggtagttttggtcaagatatttttaacaccaaagcatttagtgagcctagcaacacacctttacgttggacacaggataataataccaacaactatcctagtttaagagatggacgcacactttatatgtctgactactttatagaaaaaggaagctttgtacgcctacaaaacgtatctattggttataacataaaagatttaaaaacggcttggtttaaaaaaggtagaatttttatgaacggaaccaacctattcaccataacagattttaagggttatgatcctgaattaggcggagatggtatttactggggtggttaccctaagttaagaaactggactttaggtgtagaattaaccttttaaaaaaaattcagctacaatgaaaacatttacaataataaacgaattgaaaatgaagcactttaaaaaattaatagtagcgctcgctcttgctgcaggtgttacttcttgcgaaagtctagatgtagaacctactggtttttattctgatgaaaacttctataaaacaatagaagacgcagaagcatctattttatatgcttatgatgcacttacacttgtaagttatgctcctgtaacgtattactttacagaattagcatcagacaactgtaatgtaaaagcagacgaaggtgcagatgcgcaagcatttgtaaactgggagattacggctcaaaaccaattattaacacaatattacagatctatttacattgctgtaaatcgtgccaatgctgttatagaaaacatagaaggcaaagggtttaatccagaagacgaaaaacgcattttaggtgaggccttattcttaagggcttataaccattttaatgccgtaaaagcatttggtttagcgccattacaaaaatctcttatagataagctagacgaaacaacagctacactacctgcagatatgcaagaggtttatgcctttttaatagacgatttaactagagctatagacaatttagaggtaaacagagttactggtcgtgcagataaagttgctgcacaggcattactttctaaagtgtacttatttgctgcttctgccaaagaaagtggtgtccctaagtacaatgctattacagaaagtgtagataatttatatgctaaagctgctgagtatgcaggtatggttctaaataatcaaggggaatatagtcacgatacggatcttcaaaacatttataatattgactctcctaacggacctgagcatatttttatattatcgttagacaggtctggtacgcaagaaggagattactctaaactatctaaatactttattccttatatagatggtgcaacagtatatctaaaaaacacagatggtacattttctccaacacatgatgggtggagtgtttttcaaacctcagataaattgttctcttcttatgctgcagatgacaaacgtaaaaccgatttatttgtttcagaaatatacgatcaagatgaggtagctataggttctgttgcagatggcactgtaatttatccttttacaagaaaatacatagatcctttatttgagggtgataaaacaagtacaagaccatacttaattcgttattcagacatacagttggtatatgcagaagctactgccaatgcagatggtttagcacaatacaaccaaattagaaatagggccaatgctacagagttagctagtattggtggtttatctaaagtagattttagaaaactaattgtagaagaacgccaaagagaacttgcttatgaaggagaccgcctatgggaccttagacgcacaaatacagtgcaaagcaatgtaaccaatgccgctggtttatctccagaagcagttgctttttatcctattccacaacgtgagatcgatttaaatcctaacatcaactaaactaaagcgtaatgaaaaaattatataacatatactttatagtactggcattgttttttgttgcttgtacagaaaaccctcttgaagatgtagagggcacagattggcaaaaagaacgtaatgtggtttctattttagtcgaaggtcaaataggtacagctattatagagcgtaattttgatgatgcaaaaattaaaatatatgctaaagttgagaacatagctgacttagcaaatgtagaaattaaaaacatcgcgttttcatacggagctagctctgcaaatgagaaaggcacaaccttagatttaagcagcggtacagctacaattgctgttgcatctggcgcaggagaaagcttaaactgggaggtttctttattaccttttaaatctgacttagaaggtacttggtatattggtgatgtgcgtatgtattgtgatatgtttactaacgaaagttggggctgggaaaagaatgaaagtatgtttagttacttagcagaattaaaccctgagttagacaacaaaattacttttactgtggaaggtgcagatgctaaaggaaatccttttggcaagtatgaacataacgttggtgatgatggtgcttatggcagctatacagatgctaacaaaggatgggactttaattctagattcagaaaaataccaacagggaatggtacttggctgcgcgactttgaacgtaataaggtaattattactgatgctaataaagttgaacacgaactagatttagaactacttactgcaactaacgaggttaatttaaaaactgaa

SEQ ID NO: 2236 - DNA, 24149 bp, synthetic construct
  misc_feature 1..24149: note = Synthetic
  source 1..24149: mol_type = other DNA
gtatggaagaagtggatatataagacaatctcagatagactttgaagcaaagtattggctatttggtttcattgtaacattttttctttttatcctgccttctatattagaaagtttagcgttggtacccattagataaatgttttaaaactaattaaaagttcaataaaattaataaacttcttgcttatattgatgctaaagcagaagggggtaattttagatgcttctgtgagagttgtagtgtgcaagggatttaggtatcaaagtaattactattgcggcatttaaagtacaaatgatgttattagacatattctggtaataaatttatgacacttctattgttttaattcaacctacaaagtttaatcaaaactttagtacgctatccaaagcgtcatcggcatctttatgtataaaattaccttgatatccaatcgtggttgttaagtgggagtggcggtaaagcttttgtaacattcggggagatattttgtctccggctatattaccaaaagaatggcgtgcaatatgtgtagtaatctttttatctatttttgctaattgagcaatttttttaaggtgtttgttgaattttgaaacagcagtatttgtttttcgataaatatcttcaggatcctttgggtttgctctttttaattctgggaaaatatagtcattattcgatgttttatcgttttcatagtactcaaggattttcataacctttataggtaattttaaagaatccactttgttatttttccccatctggtaagttattcttccatcccttatggagttccatttcatttccaaaacatcagaaattctgatccctgctagataaaaggaaaacaaaaacacatttcttgtatgatgtgtagtggttcctttttctaaatcaaggtcttcaatcgcttttatttcataatcctcaagaccaattttgatagtttctggaaattttatctggacttttcccttaccgaatggataattatcctgttttactattgcttcttttattgcgatattatataatgtacgaactaaaacaaaaatgttcataactgttctttcagaaaccccttggtaggagataaggtagactttaagtttttttagaaataaaatatcaatttcttgaaaggctaagtggttgcttttgtgaaactcttctatgcattttagtctacttttatcagattttgctcttttgaactttcctgttttttctagatttacaagatattcatttgccaactcaaagaacgttttatttttattttcgtttttaacaaatgaggtaatttgctttgcagtaaatgttttattcgcggattcaaattcaaaaatcaagtcttctatttgatcatacttttttctgattaatcgattgagttgagcatgtttgatatgtgaagttttgactttgttgttttgctcattccaatccttaagtttgatgttatgacccagataaagataacttgtctttcggttgaccgtaactcttattgccaagcgatatatcttatttcctttttcgttttttggatgtagaacctttttaatagaagccatgtcttattaacttttgagctaagataaagaaattgggtaaaacataggtaaaacattttaggtgtttttaaataattttgttaaacattaataaatggtaaagtgttgattttattatgttttacgtgtgtttagtgttggttgaggttgtttaatgtgttgtggtcatagaacttaaaatccaatgtccattaggacgtacgggttcaagtcccgtcttcagtacttaaccctcttaatctttgattgagagggttttttgtttttagatgtttcgtgattctttagtaagtgttgggtttttgttgatattgaacacaaaaagatatcaaagacttggaggtttatggggagaaacaactgttgtataaataaaagatttgaaaactgaatatgctgataaaataattcctattgcctccgtacattctgaattaattcgaagaagaataccctacaaaaagctaaatattgatttatggtttgataataaaagtaaaacttttatttgggcaactaatacgttaattcgtaaaggaagtatttttggatcaagttgttttcctgaagttaagtatcacttcaaaatgaacgcaataaatggaaaaataactgaatatgattctgaaaaacgaggagaatatttcattaaataagaataaagcaagttacacagcactttcgtttgacttcatctgacagaggtttataattgagcataaataacacctacataagactactaaagttagtattagaaaatagtaggaaaaatcagtttcttatgtaggaattatcaaaaattacgtaagaaaaaccatgttttgtgtaagaattaccaaacaccttaatgagaattatcttgttgtttatcaagtttttaccgcaagagggtgaatacataatcagtaaaaatttgaggaggtttccgcagcacattcagtgaattttatagctacttttggagagtgagaagtaaaggaggtgattatactttttacattatagtaaagtgattaaaaacagcatttttgattgagtagctacactctgtttttgattataagaagaggaacccgaaaatcttaagagtagggctaaacagttctagataaccaattatatacaaaccaaaacctgttgaagtaagattaacgtaatacatcaatcccattagttgtgcaatcacctcatacattaatttaattctaaaatcttaaaaccttaaaattatgaagtcaattaatcaaatcaacaaattactcttactggtaatgattctgtttataacttttggttgtgaaaaagaagaactgtctgttttttcagaagaaaatagtattgaggaaaacactggtaaaaagacagcaaatagggctattctgtcaagagatacttctttacgacctacaggctctagtacttatatttggtttaaaggaggtaccaatgtagtattcgatggtcaggggaaagtaaaaataggaactataaaatacaatagcagtctaaggccatcgggctctagtatctatatctggtttaaagccgggactgaagtcacttttgaaaccgggcaatccggaaaagtaaaaaaaggaaccctaagatataatagtagcttacgaccatcgggctccagtacctatacctggtttaaagccgaaactgtagtgctttttgaaaccgggcaatccggaagagtgaaaactgggaccttaagatataatagtagcttacgaccatcgggctccagtacctatacctggtttaaagccgaaactgtagtgctttttgaaaccgggcaatccggaagagtgaaaaaaggaaccttaagatacaatagtagcctacggccatcgggctctagtacgtatatctggtttaaggctaatactttggtaacttttgctaccggacaatccggaaaagtaagaacaggaacgttaagatataacactagcttaagaccttcaggttctagtatttatataatgtttagtgcaggaacagtagttacttttgataattctggtggtgtagtttagtccagagatgtattttcaaacagagatagcccgattgtaacgggtaaagtacatcgaataagatcgaactaataaaattatattgcccgtagctttggtagtcttattgatataaaatacgttggatacaacataccagaactatttgaaattctcaaaaagggggaggcaattacagttaaatatgggtggttatatttaattattttttacctgagccatcaaaaacattgtttttggtggcttttctttgttttataacttttttgtgaaggtaactacttgcctatttaaggcacagactaaggggagtccttagaataaacttcttacaacacgatgtacatgctatagcatctaagtaatcaatcaaaaggttattgtatttttggtaagaactaatgcttacattgacagacaatgcatagagaaatctaaaaacaaggtaacattttgtctttctatgacacatatattaaacgatgtacataatgcaacaaaagaataaactaaaaatattttttctactatctcttactttctatacaattctttcgtttggacagagtcaagcagaaaattggcaatcttacattgcttcctatgatgaaaacaagccaggatcaacaactgtgagaatggatattgctaatcaaacgccgatacctcaatatgattatgtattagttactggactcacatataaaagtacaagagaagatggttttcctgaaggtaaaacctttgaagtattacacaaagtgggtgatgaattggtggaacttttgaatgggaataatgaaagcattcttgttggttcatttatgtataattttcagagattagaatatttttacctcaaatcaaacaagggtattgaaaacaaagtaaaagaattctatgattctaattatcctgattacaaaaactacataaatctaaaagaagataaagaatggacttattacaaagaatttctttatcccagtgatgaaattctagagtatctcggagaccaaagtgttataaaaaacttacaagaagctggagataatttgagtaaagcaagacgagtagatcattgggcttattttaaaaatgaatcggaaatggaatcttttaaaaaagaacttacaaaaaagggtttccaaattcagtcctcaagccagattgagcacaagtctactccgtttgaaatacaattttggagagtggataaagttgatattaattctatctatccgataacatcagtattaaggaaaaaagcacaagaatataacggagactatgatggatgggaaacctctgttgaaaaagaataaaacactactggcaatatggatacaatagaataacaccctactacttacagattaatgggagcggggaattattattggattaagtattaataatggaatattttaagagatatgaaatatattataataactggcttcataatcctgtttgtaatttttctttactgggcatatttacctgattacaaacggaatcctaaagagttttggagaaccataatcggaatgccaattggaatgcttcttggtggaattggacttaaagatttgaacgagaaaataaaaaaatgggctgttggagagaaaaagaaacgcaaaagcgaaaagtaaacttgatttatcgatatattaaaattagcaaccaatacgtaagaaaaatcaaatggcagaatacataaatccgttctcgaatagaaaacagtatcacgaacatactgaatggattgatgaccatttaagtaagttttatgataataattcaatctctgtcttccatgaaattccaactttggatttacatcttgatgtttatttgataaagcctgaaaattcatcattcaatatacttttgacttcagggatgagtactttaaaaatgaatgtttcagagcaagccgaaaatccaaaggaattggagtttgccgaattgatgatgcttattccaaaaagtattgaattcggagaaatttactctggagaaaacaaaaatgattggattatttcaattcttaaaaggactgcaaagtttccacacttttatgatacctggattggtatagggcatactattcaggcagaagaagacttaacaccttatgcatcggatactcaatttgcaggagccttaatccttccttctgtaacattcggaaaagattttacagaaatacataaaaacggacgaaaaataaacatctataatattcttcctctctataaaaacgagatcgaatttaaaatagaaaatgggtatagtaaactattagatttactaataaaagcaaatggaaaagaagtactggatttgaatagaaaaaatctaatccctaaaaagagattttggaataggtttattggaggttaaaccgcctaaactgaaaaattttcattctttttttacctaagatcaataatctatttaatttacatcatcgagatttgggtaggtgttgtaataatactaaataaatgttctggaaaagaaaaaagaaaaaatcaacaggattgaaatgttcagaatgtgggcaagtacattcagaatggcctgcattaacttttaaatccccttcaaactatcataacctttctgataatgaaaagttggacatgggaaaattagattcagatttctgtgaaattcattacgaagatcaagttgatcgatttataagagtaacacttacacaaaaagtaaatgacgcatgtgaaattctggaatatggtctttgggtttctctaagtgaaaaaagttattctgattataaagaaaattacaataatacgaatcacgaaacaggctattttggttggctatgtaatactattcctgaatatagagatacatcctcaatcccttgtgatgtaatgacaaaaagagggaataacagaccagaaatttttccgcacaaagatgttgatcatccatttgttagagattattaccatgggatttcaaaagaagaagccgaaaatcggataaacgaaatgataaaaaatattgatgaacactaaatttaaatgactaaaaaagaaatagacaccttaatcaaaaaggaaaatggggtcatcttgctcaaaaaagattctgaagaaacgtttttagaaagtttttttggagaattgtctgttttgacttttgtttactttttaatcaaaagaaaaatagattatttaattcttacagaacaacgggtactctttattatcaggaataagattatcgaaaacagaaccttaaccggtactgaaaaagtggtatacaacggaatcaaaccatcctttgaaattaatacctcagaacagcaatattctttttctttacgtaaactaagagtgagctatgaggagtcaaagcttataaggcaaagaatatctgaatttgagaatagtaaacaatgaaaagggtaaagaaaaacacatcacgactgataggttattcatcaaataatttgtttactgttatggtagccgattgcctgtatccaatgaaaatattgtaatcattgttatagaaaaatgaaacctaaggtaacattttaccgaattaagacatatacctaagaatacaattcaatgaaaattaatcgtaatgattcccgacttcttaaagaaatttgaatccgacctaaaaaaatacgaacgagaatttgttcgtataaccgcaaaaccaagaaaggaaaaacttcttgaagataatttagggttaacggacagtaagtttttaggaactcctttctttccaaaagaaaaagaataccctaaagatagaaatggaaaaccaatgatcatggttgcccaacttaattttgagcagatccccagacttgaatacttccccgaacatggaatattgcaactttttctttcatctaccgattggtatagtgaagattcagctataatttatcattcaaaagaagatttaaatacaccggtattagataacttctcatttctttctatcgaagattatgaagaaatgcctgtttataagcttcaccaactctcgtttgaaaaagggattgatcatggaggttcaacggattcgcaatttgattttctatttgatgaaaaggactattgggattttactgagggcttaactgaagaacaagagaaagaatttggagaatattttaactccgcaggacacaaaataggtggatatgccgaatttacacaatcagatcctagagattacaatgccggtcaaagtgatgatgttcaggttttacaaattgatgttgacgaccatataatgtttggtgatagtggagtaggacatatttttataagcaaagaacatcttgtcaaaaaggatttttcaaaagcttatttctattgggattgttgttgatagacgtatagcacatcaacactcatagatattttaaaaaaccttgaaaaaaggaaagagtactataacatgatatcaggggtagctagataattggtagatctgttttgtgaatttttatatagctacttttactaaaattcgcttcataccttaaaaccagttagatttgcggataagtatgtataggatataaaactttagaacattgttagacaacataaataaacaattttgatacatagaaaaactaaccttaagatcatttggcaacgagctaagcttagacccagattattactttttgcatttcagggtattgcattttcattatttcttttcattcctattgttttcatgatgagctctataaaaaatagctttccttatgtcgaaaatgttgaagaaatagcatctaatggaataaaagaaaatgcagttttaattgatattgaaccaataggaaatgttactataaatggtgataatcctacagttttaatctatgaatttgatttggatggacaaaaaagacattctaaatttagtgtttttgatcccaaaaaaatagagggtcttaagaagggagatgtcattgcaattaagcactttaatgaaaaatctattgtacttggatatgagcaatattcatttagtatggattttatttattatatcgccagtccttttttggtaataggattagtattttgttttgtattatacacacgcattaaaaaagaaattggactttataaaactggaagagttagggaaggtaaaataatttcgataagccataatagaggattcacattttcaaaatttggactatctatggatgtacattatgaatatgatggttatgatggggaaaataaagtagataaatcgcgaacgaataattttgccttaaccaataataaagcagttggagacgtaatccgaattttggtatcccaagacggaaaatcatcttgtctttatccagaattaattgctaaaacaaatggctggaaagaaaattagaaacaaagagtttgaaaacaaaaccaacatatctaaaagggaaatcggtttttattgtttcgattttagttatcatcgttaccattctcactgtgtattggagcgggatacattataacaggagtttgactgctaacctttatcgatctttaggggttattgctacagcactatttttgtttatgacctacggtttgtatactgggattaggcttattaatgattttccaaaatttaaaagttttaagactggtgattatttgcctagttctggaacaactcctgatatatcagatatgccagatattgatgtcggagaggggataggtgcacttattctgtctgtactgttctggatcggcatgaccattcttttcgtcatcttactcatttttttagaagcaattttttggttttctatctttatcattttggcaatgctatactggattttttttagagccttgaaacttgtttttagtaaatcacgtgataccaaaggggatatttggttttcctctgtatatgccctaagctataccgctttgtatatcggctggatatttgggattgtgtatttggttcaagtgataaaatagaagatgatttgggttaccttaggatgattcttttgagtaataagaaatgttattataaaaaagaaagcgatctaaatagaccgctttaaatgttttcacaacggaataatccttattgtgaattgctttcaaaattgttccctaaaattaataaaaaaaacagaataaaaaagttttattggtttttatatagttgtaatttcatgacatcattcaaaagaatccagattagttttcacccctattttatctgcgattcttttttaagtacaatacggaaatccacaatgtaaatatttcagggtttcttattttcaaccaaacaaatcatctatgaaacatattttagggctagacctggggacaacatctattggttgggcttttgtaaacgaagcagaggatagtaaagaacaatcatctattataaaaacaggagttagagttattccattaagtacagatgagcaaaatgactttaaaaaaggaaatagcattacaattaatgcagatagaacatcaaagcgtggagctcgtcgaaatttgcaacgatacaaacaaagaagaaaagctcttctgcagattttaaaggagataaagtttttggatcaagaaaaatttctttcagaagatggagcccttacacacagtacttatgctttgagagcaaaagctcctttgcaaaagatatccaaagaagattttgcaaaggtattattaatgatcaataaaaagagagggtataaaagtagtcgtaaagcgatcaacccagaagaaggtcaattaatagatggcatggctgtagccaaagagttatacaataacaaccttacaccggggcaatattcttataagttacttgtcgggggtaaaaaacaattacccgagtattatcgatcagatttacaaaatgaatttgatactatatggaagacccaaaaaaagttttatccagatctattaacagaacaacataaagagaaccttaaaggaaaaaataagactcagactgagaattattttaaaaaaacattaggtattgaaaaagcagaaaataaaggaaaaaacaaaaagttagaacaataccaatggagaaacataggagtttctgaaaaaattgagatacgagaattagtctttgctcttatagaaattaataaccagattaatcagtctagtggctacttaggggcaattagcgatcgtagtaaagcgcttttttttaacaatattacagttggacaataccaatataactttctaaaggaaaaccctcatggttctctcaaaaatcaagtgttttacaggcaggattatatggatgagtttgatgccatatggaaagagcaatccaagtattatccagaacttaccgcagcggtaaaaaaatcagtgcgagatattacaattttttatcaaagaaatttaaaatctcaaaaagggcttatcagtatctgcgaattcgaaggaaaagaaaaaaatgtaacagtagatagagtcactaagaaaaaaaatattggaccgagagtagctccaaagtcatcaccagtatttcagcaagccaaggtattacaaaacatcaacaatattagaatcactagaaaagaaagtaatgaagaatacaccatagatgaagataccaaagcgttattgtttcaagagttaaacatgacagaattctggtcatcagctcagttactaaaatggatatttcagggatccccagaaaaacctaaagactgggaggtaaacctaaaaaagattgaaggaaatcgcacacaggcaagtctttttaaaatttatcgccaaatactagccatagaagggtatgataacattgattttgaaagagccgaagccgctaccattttagaaaacttacaagcgtgttttcaacaaataggaattcataaagatattttgactttggatatgtatgctacaggaaatcaattcagtaaacaacctgcctatcaattatggcatttattgtattcttatgaagatgataattcgtctaccggtatcgaaagtcttaaacaaaagcttcaaactaattatgggtttaaagaatctcataccaggttattaacttcagtagtttttcaacaggattatgggaatctgagtgttagagcgttacgaaagatctatccgtttttagaaaatggcaaccattatgatcaggcatgtaaactggcagggtacaatcattcgcactcattgactaccgcagaaaatgaaaaccgctcactagataataccttaacacttctaaaaaagaattcattaaggaatcctgtagtagaaaaaatattgaatcaaatgatcaatgtggtcaacgccatacttgctcaccctcaaatgggacgtcctgacgaaataagagtagaactcgccagagagctcaaaaaaactgctgctcaacgtaaagagatgacttcggttattgcaaaaactaccaaagagcatcaaaagtatcgcgaaaaaattaaagaagaatttgggttaccatatgtaagcagaaaagatttgataaaatataaattataccttgagttaaaatcgataggtttcaaaacattatactcgggcacttacattcgaccagaagaattatttactaataaatttgatatagagcatattataccacaatcagtactgtttgatgattcattttctaataaaacattagaattaagagatataaatctggagaaaggaaacgaaacagcttttgactattgtaaacgaaaaggctggcaaaatgattttgagtccaggatacaggaaattttttctaaaaaagatatcaaatacggaaaacgcaaaaagttattgatgacaaaatcggatatcccagatgattttttaaatcgggatctgggtaactctgcctatatcgccaaaaaagctacagaattattaaaaaagattagcaggactgttacaacgacttcgggaactattactgccaaattgagatccgattgggaattgattaatgttctgcaagaattagcctgggataaatattcggctttggggcttacctactatcaaaaaaacaaacatggaaaagagctccctcgtataaaagactggacaaaacgcaatgaccatagacatcatgctatggatgccataacggtagcctttacaaaacctgcatacattcaatatctaaataatatgaatgccaaaggagaaaagaatagtgttatatatggtattgaacaaaaatatacttatcgcaatggtgagggaggaagaaaattcgaaaaaccctttgagaacattagagaagaatccaaaaaacatttacaatcaattttgatatctcataaagcaaaaaacaaagttgtgacccttaataagaataaaataaaagttaaaggcaagggtaactttattcacaaaacagagcttacccccagagggcaattgcacaaagagaccatctatgggcgatctggtttttatgaaatcaaagaagaaaaagtaaatggaaaatttgacgaacataaaatccaaaccattaccaatccagactataaggaagcactgtttaacaggttattaagttttgataaggatcccaaaaaagcatttacaggcaaaaacagtctatccaaaaatcctgtggttataaaaaatacaaataaaactattcccgaagtaataaaaacaaaaacacttcgatcgcagtttactattcgcaaaaatattactcctgataattttaaagacttaaaaagtattaacaaagtagtagacctcggtatacgaaaaatactaaatgatcggttggtagagtttggaggaaatgccaaagaagccttttctaatcttgaagattatcctatttggtttaataaagaaaaaggaatagtcatcaaatctgcaaaaataaccggagttagtaatgccgaacctttgcactatgcaaaggatcatcatgggaaagacatagcagatgaccaaggcaaacccatccctgttgattatgtaagtacaggtaataatcaccatgttgcgatctatcatgactccaagggaaatctggatgatgagatcgttactttttttgaagctgtagaaagaaaaagtcaaagagtacctatcgtgaattctaattctgaaaaaggattccctttgctatgtaccctcaaacaaaatgaagtgtttgtttttccttcaaaagattttgatccattacaagttgacttactagacccttccaacaacggaataatcagtaagcatttatacagagtgcaaaagttttcaaaagtatcttatggtaattcttctattagagattatgtctttaggcatcatttggaaaccgaactaagggataataaagaattaaaagatattacctggaaacccattaaaagtttaggacatcttcatggtatcgtaaaagtaaggttaaatcatttaggagaaatcgttcaaacaggagaatattaatatcatgattaagcgtactctttttttcggaaatcctgcttacttaagcactaaacacgagcaattgatcatcaatttccccaagcagaatagagatgaagttactatacctatagaagatttgggatatatagttttagaaaacccacaaataacgattaccaatggattgttgactaagttaataaaaaacaaaacagcagtcattacatgtgataagcagcatttaccttgttcttttttacaaccattggtaggtcatagcgagcaaaccgaaagaatacggtatcaactcaatgccagtctacctctcaagaaaaatctatggcaacaaaccataagtgtcaaaatacgtaatcaagccatgcatctaatcaagtatggtaaaaatggattaaaactaacccggtgggcaggagaggtaaaaagtggtgatgcaggaaaccatgaagctatagcggcagcttattattttcaaaatttgtttgctataaaagaatttagccgcaatcaaaaaggagttcctcctaataatttgctaaattatggatatgccgtattgcgagcggtcactgcaagagcactaataagcagtgggatgttaccatctgttgggatttttcatcataataaatataatgcgttctgccttgccgatgatattatggagccttatcgtatatatgtagacgctatggtgtatgaaatcactcaatcttttaaagagtataaagaactttctggagacctaaaatcgatcttattaaaaatccctacgatagatgtacaaatagatggcaaaaaaagccctctaatgatagcgatgagcagaaccaccaactctttatatgagtgctttttaggtagtagtcgtaagattttatacccagaatatgaatgaagactatttttcacgccttaatcaatatcgaagtatgtgggtattagtcttttttgatttaccaacagaaaccagaaccgaacgaaaagccgctaatcgattccgaaaaaacttattggatgatgggtttgctatgtttcaatttagtatttatatgaggttttgtgcgtctcgagaaaatgcagaagtacacaccaaaagaacaaagaatgcgctacccaaaaaaggaaaagtagggattatgcaaataaccgataaacaattcgggatgatggaactctttcatggtcaaaaagaggtagaaccagaaaaaccatcccaacaactagagcttttctaacttgttagttggttttttaattctaaaatatcgcttagggcacaggatatcagtagtttataaagagtatcctgtgaatcctagttaaaagtacaattttgaatgcaattcacaacccaatcgtattaatcgaataattcccctctcctgtgaatcctagttaaaagtacaattttgaatgcaattcacaactcagataatacatctaattcattaatgtttcctgtgaatcctagttaaaagtacaattttgaatgcaattcacaacactctcttctgtacatcttgatcttgatgacctgtgaatcctagttaaaagtacaattttgaatgcaattcacaacgcagatatttcactccaaacctcatcatcacctgtgaatcctagttaaaagtacaattttgaatgcaattcacaacggccaggcatacttctagatgctaaccaatcctgtgaatcctagttaaaagtacaattttgaatgcaattcacaacatcagccatctgtttcatagcagaaaaagcctgtgaatcctagttaaaagtacaattttgaatgcaattcacaacagcctttttattatttcacacagcactccccctgtgaatcctagttaaaagtacaattttgaatgcaattcacaacaatcgatcaaatgttattacgtatggttgacctgtgaatcctagttaaaagtacaattttgaatgcaattcacaactgaacttccttgatatcctttttttaattccctgtgaatcctagttaaaagtacaattttgaatgcaattcacaactcctagatttttcatattcgaaaacgtaaacctgtgaatcctagttaaaagtacaattttgaatgcaattcacaacagtcctattaaataaaaatatctctggattcctgtgaatcctagttaaaagtacaattttgaatgcaattcacaacttttaatgttgttttcagatgatttaataacctgtgaatcctagttaaaagtacaattttgaatgcaattcacaactaggtcatgaaggcttaagtgatgatatcacctgtgaatcctagttaaaagtacaattttgaatgcaattcacaacactaattctaggatcggattcctttactatcctgtgaatcctagttaaaagtacaattttgaatgcaattcacaacatttactatgaaaacagtacacttcttagacctgtgaatcctagttaaaagtacaattttgaatgcaattcacaacagagacactatagttagtacaaagaggattcctgtgaatcctagttaaaagtacaattttgaatgcaattcacaactagttctggattggtagacttgataactaccctgtgaatcctagttaaaagtacaattttgaatgcaattcacaacttattttgttgtggttcttttttaccatttcctgtgaatcctagttaaaagtacaattttgaatgcaattcacaactaaaacatgagtgcatttcaaatttttagacctgtgaatcctagttaaaagtacaattttgaatgcaattcacaacttatatctaaagactccattttcaaggattcctgtgaatcctagttaaaagtacaattttgaatgcaattcacaaccatgtttgcaattcctatatctggaaactgcctgtgaatcctagttaaaagtacaattttgaatgcaattcacaacaaacaggcgcagcaggtgttcaattaaagacctgtgaatcctagttaaaagtacaattttgaaagcaattcacaactgtttgaacctcacaccattttttacaaaacctgtgaatcctagttaaaagtacaattttgaatgtaattcacaacatgatcctaatatcaaaagatttgagttttcctgtgaatcctagttaaaaatacaactttgaatgcattttacaaccaagaaataagcttcaatttgtttcttacttatggttttaggtattttccttactcactttttattactttttctagttgcaatatggtcttactcccatcaatatttgtataaagtaatttaataaaaccatattcggtattaaaaagtgaagttaatttggtctcacctagcccacttgttgctgtggcatcaatagtataacactctaatttgccaaaagccgtatttatcttctttttatctgttattttataaatatacttattttcaattcctcctttccaggttaaccatcttttgtctgcccaaaaatctcctatatccaaattccaggtccatgtatttccaacttcaaaaggagtttgtatgtacggaaaaggatttaactcaagaatcctaaaatatttatcccgtggtggatgcatccatacgtttttttcattttctataatacccgacatcgaattaaaagcagatgatttatccttggttaaataatcatattgagctactgtttgattatagtgtggttcaaattgtgtcataggttctagtcccggatttatcttaatcttaacctctagaatggtatttttgtctattgagtcggcagcaacaaacttccaggaatgcttccagttatctatagatgggtcttctttaaaatagtatctgctattatcttttgtaatatgttcgtaggaatatatgaactctagttcttttctataaatagtattgttgtctgtatacctagtaagtttaacatttgtagaatcaaacacttcaacaaatattcctccttcctcgataagtgtataatccttatggtttttttcaagatctgatttacaacttgtcatcgcgatggctaagatgaatagccttagtactattttcatggctagtgtttttataagggtcgttgtttgtttattatccatctgttttatagaccaatattacaaatccaataccaataaacgattagtcatactattatttgcggtaatacgatgttgccttaaaaactcttgtactttgttctctttatcttttcctctgactactcccagcaagttttttctggttagttttcttagttctaaaggcgcatagaccgttttaaagtaatacaccctaaacatcccccagttgggcaaaaatctattcttctctttatacacctgcaaccaattatttgatcctgtaaattcacatagattgccattgggtagaaaagtaaaatgaaatggatcaatccaatctaccttttctatatcagataaaatgatttgcttaaggtttttggtatttataggacttgaagcataaaacagtgtgacttccattttatgtaaaagatcaaaagcatctagtttgtttaatcccgaaaaatgcttgagaacctttagcatggtcgaatactccttactcattctttttagtatcatagtttatactacaatgatagtaagtaagcgtctcattttttgagacgtgctaaaaaagtaattcggattatcaatgtcatttagttaacgattttaattgtcagtctgagcctgtcgaagacattagaaaacacgaacttggaagcacttcgacaggctcagtgtgacaacccagtgtgacaagaaattctaaattatccttaactaaactacattgcctaggtttgaacaatgtataataagggtaaaaaaaaacctcttattaatcattaaaaagaggtttttttatattttctttaatctataatatggttttgttatagtatagatgggaagcatgctaacaattacattcttgcataagcaacacctaactcccaacctatatacattaatagcattgttactcctagtacaattgtaacaaattttaaatgactcgttttattgatgtacttagaaattccatctaaaatatttgccttgattttcataatttctttttatggttattttataacgaccttaaagtgcagtgtcattttttttttgctttaagtataacacctacaaccataagcaataatcctaaagcaaaagcagtcatatatagtattgaagaaactttaagtgtaagcaatatgataccaataaccgatataatactaccgatacttaatatagatgttccatttatgtttttcataattttttatgagtttaatatttctacaaaaattagtaagaaagattaaatagtagacgaccgattttttctcctacataccatgaaaaaaaactaaaaaagcaataacgaccaaccaataatagattgtcctttctttctttttcattactagcttcatatcaagtttttattttatattgaaattacttgccatagaagaggtgtcgtatcaattacatccttgcataagcaacacctaactcccaaccaatatacattaatatcattgttactcctagaacaattgtaacaaattctaaatgactcattttattgatagacttagaaattccatccaaaatagttgctttgattttcatgttttaatcatttttaaattaaaaattatctaaaagattactttaatagctatcaaatataaagagactgttatacaacaacagtctcttctatatacttaattagtttttactaatgtatcaattggaaataagtatatccagcatgaaacgctataactggtaagactaataatccaaagcccccattaatttcagtcaattccttcatgctcaattcctgagttttattatcttttttcatatttgaagtttaaaattaagttttcaaatctttcataagaaataaagcatcaatttttaaattccttgtgctgcactatattgaaaacctaaataaaagaagaacataaaaagtaagatgctaatcaccactagccatatgattttggctggagttactggttctattgcttgcgaaaggtttttaagaaaactcataattcattattttaattaaacgtttttttaatcagtttactgtgcagcagcatactgatatccagcattaaaaaagaaagaaccaatggctacagtaagagccagtgcggggataagtccaccaccatttgtttcattcaattcagctacactaagttcttgtaaatttaatttttttgagttcattttgaaaattttaaataattaatatttgttttaaaaataagtccataatgatttcgtcaaatcaagtagacaagtctttgttgttgcaacaacgggataaagaactgcgccattctttatatactacaatactacaagatcagcgtctcattttttgagacgctatcataaatattggttttttattcaaattttgtgatcaaaaatcgtttgcccaatccagccaaatatgatccgccattaatagatcggatctcgttatgatcaagctcactatcgataaagccaaaacggtaatgcacatttttggtatatataaaactctggcaggcaaaatcataagctacaggagcatttagctctttcatcgtatcaataagccgatataccttggctctagatattcccagtcttgatgccagtttttctggtgatcccgtggcttgcaagcgaatgagttgatcgattctctctataagttctatgtgtttgataatgatattcattgttttttcttttttgttttgtttaaagaagcagagaggcaaagacgctgagatgcaaagtttgtacatctgacctctgacctcggacttctgaccttttttagtttttttatttcacattcggtttatcaaagtgcttcgacagccgaatgccaattttacctataatctgaacaattcaattccgctttcacttcggctacgctcagtgaccgctatgtgtcgtttttgtttaaattattatcaatccgagggctgagcccttcgactaggctcagggaacacgaagccgaagtccgatactatgacaaccgaatgccagtcttattaataacctgagcaatacaatttcgctttcacttcggctacgctcagtgaccgctacgtattgtcttgcttaaactatcctcaattcgagggctgagcgaagtcgaagtccgatgctatgaaaaccaaatactaatcttattcataatctgaataattcaatccggctttcacctcgacagcacttcgacaggctcagtgtgacattactattcacatttcatttctgatacccgacctcggacatctgacctcgagcttccaacccttccagggatctgcttttgccataattcataatatttttgttgttttaagtatagtgtatcatggttaccttcttctaccacttttcctttttctagtaccacaatggtatcagcattcactacagtactcaatcggtgtgcaattatgataatcgttttatctctatctcgtaggttctgtactgctttttggatataattctcagacgtactatccagtgatgaggttgcctcgtctaataccaatacttcaggatttttgtataaagcccgagcaatagcaattcgttgtttttgccctccggataaggtagctccattttctccaagataggtagcaaaactattggggagggtttctataaattccagaatcccaatcgtcttacatacctctataatccgttctacatcgggagcaaattcgcctaccgcaatattctcgattacattacccgcaaagagatctatcttttgtggtactacactcaccagatttcttagactgctgctctcgatatgttttagattctgatctcctatagagattttacctttttgtataggatatatattttgtaaaagtgacatcagtgtagatttaccagaaccactctccccaataatcgcggtaatttttcccttgagaatagtcagtgtaaaatctttaaaaacctctactctggatccgtatctaaaccctacattagaaaaatggatatctcctatattctgttgagttagttttaccttctgggcatcttcttctcgctccagatccataatttcaaacaagcgatctgcggcaatcaaggcattttgcacctgtttattggcactgatcagactggcaacaggactggtaaaatatcctatgatcgcataaaaagccatcaactccccagcggtaatttctttttgaattacaaaaaaagagccactccataacaaaataatagtgaacaactgggctatggtagctgtgcttgagttagagaatacactatttaatgcagacttgtatcctgtttttagcaatccaataaatcgtgtttcggttttgatatttgcaaaatcctcaagcccaaatcttttgatagtacctaccgagtttagggattctaccaattgactctctagttctgccgatttttccatgatccctcgttcagtacgcttgtttagtctattggtgatcatataaatgatggcatatacggggatgattgccagcatgattaatgccagtttccaataataggtaaacatcaacccaaaagaaaagatcagaatcaaaacgttaacggtaagatccagcgcaaccccattgataaaattcctgatttttacagcatcattgattcgggaaatgatctctcctacgcgcatggtatcaaagaattgctgtggtagttttagcaagtgtttataatatcccagaataagtcgtgcatcaatctgctgcccggttttaatcagaaaaacatctttataggctcctaccacaagttttaaaagcaataatccgatcatgacaatccccaacaggttaagcagtttggtactggtacctataaacacatgatctgtaagtttttgaatataaatagaggtagagaaccccaataaggtatagattagtgcgcctataaatgcctgtgtcaatactcctttatgaggttttagtaaaaaccagaaccgcttgaatacagatactttttgattacctgctataaaatcttctttgggtaatagtagtaccaatactcctgtccattctgcagtaaattcctgatatgtttttttatgaaatctaccgtctcccggatccataattttgatatactctcgggttacttcgtagatcactacataatgctgcaatttttggttaacaatcacatgggcaatggcaggtttagggattttagacaaactacccagatcaccacgtactcctttggcttcgaatcctaatttttcggcagcctcgatgagccccaatacattggttccctttttatcggtactggcaaactgccgaatacgggcaatgggtaattgtagtttataatgtgccgatatcgatgccaggcaagccgccccgcaatctgtaatatcgtgttgttttatttttgttttcgacatttttttcaaattcaaaggtttaaaggtttaaagaagcagagatgcaaagtttacctaccacaacaaaccttgatctcctatcttcttggctttattttttttactcatagttattaaaaacattttcctaaatcccgcttgcacttcggctacgtgttccctgagcctagccgaagggctcagtgaccgctaattgtcgttttgtttattctatcttcaacccgagggctgagcgtagccgaagtccgatgttatgaaaaccgaataccatcctcagtagtgatctacacaatacaatttcgctctcacttcgactacgctcagtgaccgctatgtgtcgtcatgatagcttagtgtgacattgtttgatcatttcacttctgacatccgacctcggacatctgactttgagtttccg

SEQ ID NO: 2237 - DNA, 24149 bp, synthetic construct
  source 1..24149: mol_type = other DNA
  misc_feature 1..24149: note = Synthetic
gtccaatactacaaattctctttttttgaaagaatccgtgatattttgtgtttcacctattactttaatttcaccttttaacgtatacatagttttgatttatttaattattaaaggacaagagtgttttccacgcttcgtccactttattttcttttaatttttcttttgctaagctgtgtaattttatttctaatgttttctgatcgtcctcaaattcaataaataattcacttaaatcaagtaatttatattcgttgacttcagtttcatcaggaatggtttctatgttacctaattgtccaaaatcattttttgtcaatacggtagattccaaaatgtcttttggaatggcatcataaccaatcccaatagtagtgattggtttggcaatttcaaacatggagtttttatctgccctgcaataccaattgccacccattcttgcgactaaatcaattttgtgctggtcaattttaccattttcgtctaaaatttcttccgcaatgtggatgcgttgcacttcacaaaataccaagtttcctgcaccaccatcttggcccaattctttaacttctgtgacgatacactcaaattgaactggtgcttcggcaaccctaaatggttgtactgtttctgaagcaactttggtaaagccagtcttaataaattcatccacatttggttcgaatggtgaacttgccaatgacatttggtgaaccatatcgtaattcacaatattaattactacctcttttactgcctttacattgttgtaagtgtcctttgttgtatttgttctgccgcttcttgctggagaaaaaattaatattggcggatttgcactaaaaacattaaagaaactaaaaggggctaagttaggattcccgtctttgtctaccgtactggcaaatgcaatcggacgagggcctatagcgcctaataagtacccgtgaagttgtggtaccggaatggtttttggatcaattgttaacatcaactgcaaaggtattaaatttttatggggactaaaaaaaagtaattcacaatcatggaatttatttaacattatctgcacgcgcaaataaaattgtccaattagtaatttctttaaatcgaaggtaaatttgtttaaggcgtacattatcagtatacttgttagtgttaactatctattatgaaaattgtaaccctttttttgctcatacttttttttagaaatgatgcacaatctcaagcgttgacggtgatttcaaatattgtttctgaacctttttgtagaactacaaattatcaaaatgggtatggccttttaaactgcgtggttacaggtggtagtggaaatcattatatcgattggacgaatccagaaggattggttgtttctcatttttccaatttatctattccaaaaccgggcttgtacgtattagaagtttttgataccatatcaggagcttattttattgattcaatgatggtagattccattaatcccgaagcagtattaaacatagtttcaaatggtcttactgatttaggtaatgatgcgtatgaggggaataattcagtaaacgttactttagagaatcattccacaggttcttttcaagtgggtaacccgctttcagataccattttttattggaatttggacactagcattacaaatggatttatttacacctttgatatgaaccccatcatgattacttatgaagttggagtttatgatgtaacactcatagcaaagaattacaacgattgtaccgatactgctcatgcaaaaatctctatttattcaacagcaggtaacctggccacatttgatgaagtgaaatttcaagttatagctaattatcaaggaaaatacataaatgtagtgcaagcatcaaacaataacgcaaacattcaagtgtttaatatgcaaggtcaattaatggcaacacatgcgctaaacaatacggaaacttttattccatttaatcacccgcaaggcgtatatatctatcaagtaacgcaagactcaaaggtggtttataaagagaagtttctattttaaaatcgtgtgaaaagttttttaaggtgccctttgatatagtagaggcatttctcttttaactatttttggtaaagagtatccgtataattattcaacttgttagaatgataaaaggttttaggaggaaatgcttaaactaactttctttattcccaaaggagtaaatggctatcgttttttaaattcaaaaaaggatgaagtcctgggaaatgaaaatttatatacaattaacccatgcaactatctctttgttttaattcagtatcaacttaatattaactgatttatcactatgaatattaagggttatagcgcgttttaataatttttggttcctttttcaatgtaatacactttaaatgttaacctaatttcaaacttaacttaagccgaaatggatttgtacatttttatttaatgcaagcataactgctaggtaaaagcattggtagcttactgctttacttttgtaaaaaaaagtaagatgaaaaaaattctactctccttaataggtatcggcggaatagtattccaaggatccgctcaattggatgtgactgcaccagttgtaacagctgtaaacccaattactagtattgaaatattggttgtgtttagtgaagatgtaactttagcgacagctagtgatgtgctcaactataccggtttaggtacggtcaacacagcagtgttttctggtatgcaaatggattcagttactttaacattagcaagtggtttagatttaggggttaccaatacaattacagtttcgaatgtagctgataattcttctaataacaatgtgatggttaattcaaatcacagttttattttcaataattcaacaccaaatattatcattactgaaatcatgtacaattctcctgaatcaggtacagattctttagagtttatcgagatttataacaatggtacttcagatgcatacttaggtggatttgaatttacaaatggggttaactatattttcccgaccgataccttaagtcctgcggcattttatttaatcgcagtagaccaggcggttgcagaagtattttttggaatggcgtttaatggcgaatttacaggtgccttaagcaatggtggtgagcttttaaaaattgtaaatactttcggaattactatagattcagtggattatgatgatgcttcgccttggccaactggaccaattgatcctgacggtgatggtgcatccattgaacttatagatataaaccaacctaatgaaatggcaagtaactggacggctgggtctattcaatacggcatagtaaatggttcaacggtatttgcttcaccaggcgcattcacacctcaagctaatatgcctttggttaatgttgtaaattctaaccttacttttgatgaaactgcaggacttgtttcaatcggattagatttaacaaacagcaacggtatgccgagtattgtaaaggtgaaagtttcaactggaagtactgcggacgtaaatgatttttctgtcccgcttagtttaactttccctggaaatgtggatacaactatgaattttgacattaacatagtagatgatatgttgaccgaaagaaccgaatacattagtttaatattcttagattcttcaaatacggaaatcggatcgacaaatattgcaacagtttatatcaaggatgatgaatttactgcgccaataggaaatggatcaattaacatggagccaatttatacttacactgtgccgactggatctgctgaaatttcggcgtatgacccaagttctaaaaaattgtttgtcggaaatactacttcaaatttaattgaagtgttggatatctcagaccctcacaatggggctttattacaaacaatagcgataggtacatatggtaatttaaatagtattgcagtttggggagatacaattgctttggctatggaaaatagtacagacccgcaattggcaggtagtgtggtgtttttggacgcaagtggtgctttattaaatcaactgactgctggtgcaatgcctgacatggtaacttttaccccagaccacagcaaagtattgtcggcaaatgaaggagaaccagatgacaattataccaatgatccagaaggttcgatcagtgtaatcgatatttcaaatggggtattaaatgcttccattaccaacgctacttttacaagttttaatgcacaacaagtagctttagaagcaagtggggtgaatatttacggaccaggttcaacagtagcacaggatttagagccggagtatattactgtaaatgaaacttcaactattgcttggattactttacaagaaaataatgcattggctaaattggatttagcaaccaacacgattacggatatttatccattaggatataaagaccatagtttgcctggaaacgcaatggatgtttccaatgataattcagaagtattaatagccaactggccaacaaaaggaatgtatcaaccagatgcgattgcttctttttcagtaggtacttccacatatttagtgacagctaacgaaggtgactctagagattacaatggtcttgaagaagaggaaagaatcggggatggttcttacccgcttgattcaactatatttggtgactttatgcctatcttaaaagatgatttaaatggaggtagattaaaaactaccaacaccataggagatatagataatgatggagactttgatgaaatttattcattcggcgcacgttctttttctatctgggatgaaaatggcgtattggtttacgatagtggagatgactttgagcaaattactgcagcagatgctactttttcaagtatttttaataccagtaatagcaatgtttcttttaaaaaccgctcggatgataaagggccagaaccggaaggaattgtaaccggtgtgattaacgatactgtttatgcttttattaccttagaaagagtgggtgggattatggtgtatgatgtgtcagatgttaccaacccattatttgtacagtacattaataacagagacgtagctactgcaactggtgacttaggtcctgaaggaattatctttgtaaatgataataatagtccaattgatactgctttagtcattgtttctaatgaggtaagtggtacagttactatttataaaatcaaccataccattattttaccaccacttgcagatttcaatgaagatgaccatacaatttgtgaaggtaccacagtgaactatactaacgaatctataggggtgcaagatacttgggaatggactttcaacggtggaacaccagcaacatctacattagaaaatccaacagtaacttataccattgcaggacaatatgatgtacagttaattgtgagtaatgtaaatggtacagacaccttaatgagcacaaaccacatggaggtatttgcaaatccaattgcacctacaatttcacaaattgatgcacttacgctttcttcaactgaagtaaacggcaatcaatggaatgatgtaaatggagaagttacaggagcaattaatcaaacgtttgtgccaggagttgatggagattatagtgtgacctatacagatgttaacggatgttctgcaacgtctagcatgtttagctttagcgattattcttcggtagatgattatgatggaaaaacattgataatatatccaaaccctgcagctgaggttttaaatttcaataaaatattgaatgttgaggtgatagacctttccggtaaaatagtgcttgcagctaatcaagtaaatgcaattgatattagtgatttatcccctggaatgtacgcattgaaaacaagtaatggaaagcaattaaaattcatcaaaaagtaaattttcttcataacataattaagtctttgatgtttttttaaggagttccgtttggagctccttttttcattttattattttaattttgaataaataaaagaatgatattatggctttgataaaatcttgtaggggcaacaccccgcaaattccaacttcttgctggttggcagaaaatgcgactttagtgggggatataaaaatgggtgaaaattgcagtgtttggtttaatgcagtggtgagaggtgatgtaaatacgattcagtttggaaacaatgtcaacattcaagacggggcagtgattcattgtacttacgaaaagaccaaaactattttgggaaacaatgtttctgttggtcataacgctttagtacacggttgtacagtggccgataatgtgttaattggcatgggcgccattgtaatggataattgtgtgattgagtcgggttgtattatagcggctggtgctgttttattagaaggaacccatgtaaagtcgggcagtatatgggcaggtgtaccggcaaaaaaggtaaaagatctttctccagaaatgttcgaaggtgaagtcaagcgaattgcaaccaattatcgcatgtatgcttcttggctcgaagcataattgtagcattgaatataaaatataaaaatcgtccagtgctaaagcaactggacgataaacctatgtggtatggtttttgggttttcttttatctgtttttaactacaatttgaaagtcaaactcacctgcagtaagtccgtttacgcctgcaatgccaatcattattttataaggacgttgaatggcgttaaacctgatacttctaatattgtttttggcctttcccatctggttattgtctgcttcacaagttacacagctcgatagttgcggtacaattgcattgttgttgaccccaatttggtaaccatataagctcaatttagtgcctggttttttgggaattaaagtgacggtcatcacagaattagctggaatttcggtttcaaacaacaaatgatttccggtataattctctttttgagtttctggaaaacaggcaactgaactattccaagcccaagataaatcagttaattttaccccgttttttaggtcatccgtaaatgcttttccaccaccaattgccacattttcacatttttttacaggaacttttttcgcaggtgtttgcaaagggctaccagtactaatagtgaaaaaaagtaaaagacttaaatatattgaatgcatcatgttgtttgtgttatgatttgactcaaaactatgacaaaaacataaaacattcctcaccctaaagggtgaaatgctcttttaattttggatttcttggctttttagtaaacttcctttgatggcggcttgggttctgttttttacatctaatttattgtaaaggcttaatatatgtgtctttacggtgttcacggaaaggaataagttttcaccaatttctttgttagacatcccagtggctaataattctaaaatttcctgttccctattgctcaatttgtcttgtaatacaatatttaatcctttattattttctgagctcgctgtatttaaatcttcaatttcatttttcagggccatagtctcgttcaatctgaaacgtatttcttcccgtaaactgtccattttagctaagttatttttcctgaaaatatataaaatacttaataatattagaatacccaaaatagctactactaaccataatctttgaacggaatttctactggctatcaaagcattttcctcgtttaataattcattttcaattaatatattaacgttttctaaactgtcaatcattactttttggttgtaatcaaactggtacttgctttgcagtacggctttttgattgtcaatgctatttaaactatcatgtagctcactgtatatttcatggtattttaaagctaagcctggttttttctctgttttataaattaaatataatgcctgtgccgactttgaaatttcgtgtgaataaccatgtttaagcgcaatttcatgcgcctcggttgccatggttttggctctttttaagtttccgttggcgctataaatatttgctgctttaaataagcttatggctagtcctttattcactttttctttccttctaatcgttatacttttattgtataattctaacgctttatctgtattacccatttcttcgtatacagttcccatattactataacagaaagaaatgcctgtttgatcgcctatttcattacgaataaccaaagctttattataataatctaatgatttttcataaacctttttatagcgataggctgaacctaaattattgtaatttgttgctaaacttttttgtttgtctaatgctatgtttagcagcacgcattcattaaaatatttaatggcttggtcatgattcaacaactcttggtgtaacatgcctaaattgtttaaaataacagggtagctttctttattattgattctttgcgcaatatctaaactttttaggttgaattttatggcttcgggaatattacccaattccgcatttaaatatcccatccaaccataagcttgtcccatgccatctacatgatcaattttttctgataattgcatggccttttctacaaaccaaaaagtagtgtcggggttttgatggacaaatatttgagctagtcgataataggtgtcaatttttacactatctagtgttgtttctgattgggtaattttaaaaagtgaatcttttgcctttgcgctagacagcggttgggcttgcaataggatacaaaaaaataataaatataaagtgagaatgcatttgtgcatcatttggttttaaaagggttaggttagttagctaagatataaatttaatagagaattgttggataaaatagaaattatcctatattagttaaaccaataatcttaaagatatgcgtttacaaaaaatggacattgaaaaaatattgtttcttgatattgaaacagtacctgaagtttatgcttttagtgagttagatgagaaaacagcagacttatatactaaaaaaactaagttttttcaaaaggatgggttgacagcggaagatgtttatgaacgtgctggtgtatatgcagaatttggtaaaattgtatgcatttcctgtggcattgtacaggagaaaaatacgggtaaaaccattcgaatgaagtcttttgccaaccatgacgaacacaaattgttgctcgattttgcggaaatgttaatggcttattataatacaccaaaccatgctttatgtggtcacaatgcaaaagaattcgattttccttttattgctcgtaggatgttgattaacggaattgatattccggatattttagacatagcagggaaaaaaccatgggaagttaatttattagacaccatggaactgtggaaatttggggattataaacattatacttctattgcgcttttgtgtcatatctttaatgtgccaacaccaaaagatgatatttcgggtgcggatgtagctcgcgtttattacgaagaagatgatttagaaagaattaaagtgtactgcgaaaaagatgtcattgcactgattcaattgtttttgaagtttagaaatgagggattggtaaaagaagagaatatagggtgagtagattaataattgatagtacaattttactaaatagggttataattactcactacagcttttttactactcacttttaatgttgcatttatttgtgctactaaacgcgagcacttagaaacactatttaaaacaaactaaaaaagcgacgattgctcgccgctttgaatgttttcacaacggaataatccttattgtgatttgctttcagacttcaaatatacaaaatcaattttatttattcgatattaaaaaaagggaaaaatcctgttttttatttcagttaaaatacttagattcagactttaaaaaatgacgtgaatttccatagtttggaagttaagaatagcaggtaatttattagtaaatgggaaaaaaagttttaggattagatttagggacaacgtctattggatgggctttggtaaatgaagtaaaagatggtaattcagaaattataaagttaggtgtaagggtgaatccattgacagtagatgagcaaactgattttgaaaaaggaaggcctttgtcaacaaatgcggatagaacattaaaaagaggagcacgaagaaacttgcagaggtttaaacaaagaagagaacatttaattgagcttcttatttttaataaacttattgcagatgacgcacttttgacggaggttggtaaaaatactacgcataacactttacaattaagagcacaagctgcaactcaaaaagtgagtttagaagatttcgcaaaaatattattgacaataaataaaaagagaggttataaaagcagtagaaaagcaaaaaatgatgaagaggggagcttaattgatggtatggctattgcgaaggaattatatgaagcaaatttaaccccaggagaatacgtttataatttattaaaagaagagaaaaaatttatcccagacttttatcgttctgacctgcaaagtgagtttcataaagtttggaatgtgcaaaaacaattttatcctaatttattaacagataaattattaatagaattagaaggaaaaggaagcaatgctacttgggcaatttgtaaagatcctttttcgattgaaggcattaagttagaaggaaaaagggaagaaataaagctgaaaaagtatgaattaagaacaatagctttacaagaaaaaataaatcttgaacatcttgcaattgttctacaagaaatcaataataatttaaataattcaagtggatatttaggagcaattagtgatagaagtaaagcgttatattttaataatgaaacggttggtgaaaacctttacagacaaattcaggaaaactttcatactagtttaaaaaatcaagtgttttatagacaagactatttagatgaatttgagcaaatttgggaaacacaagctaaatatcacactgaattaaccgaaaaactaaaagcggaaataagagatgttattatcttttatcaaagaaaactaaagtcacaaaagcacctaattgccgaatgcgaatttgaaaaatatcataaagctataccaaaatcttcttttttgttccaagaatttaagatttggcaaaatataaacaatttagtttttactaataaacttaccaaagaacaaaaaacgttaagtgaagacgatagagagttactatttgctgaacttaatataagggggaacttaaaagaaaccgaagtactaaagttttttggatatggacctaaagaatggaaatcgaattatacggaaggagttgaaggtaatagaactaatgaaagtttatacaatatatatcaacatattttaaccgaggaaggatatggcttcgactggaataaacgatcggctttagaaataaaagaagaggttagacaagtatttaaacaaattggaattgagcctaaaattctagattttgatgttaatttaaataaggttgacaagcaagaaagttatcaattatggcaccttttatattctgcggaagacgatcataaaattgatgaagcagataaatttaaatatggaaattcaaatgtagctattaaaaaaatacttgagcgaaaatatggtattgagcctaagtacggtaatctttttgcaaatatgagtctgcaacaagattatggtagcctttctgctaaagctattaagaagattataccttttctgcaaagtggaaatgattatgccgaagcatgccgattagcagaatataaccattcgagtagtttaacaaaagaagaattaaaaaatagacagcttaaagaaaaactagaattagttcccaaaaacagtcttcgcaacccggttgtagaaaagattttgaaccaaatgattaatgtaatcaacgaaattgttaatacatatggtaagcctgacgaaattagaatagaattagcacgagaattgaaaaaatctgcaaagcaacgagcagaaatgacttcctacattaacaaagcgactaaagccaatgatgattttagaaaactaattacaaaagaatttggtataccaaacccaacaaaaaatgatgtagttaggtacaaattgtacgaggaattgaaaagaaatggttacaagacaatattttcaaatcaatatatcgaaaaaaaggatttattttcaaaaaaaattgacatagaacacatcattccaaaagcattattgtttgatgattcattttctaataaaactttagcttttagagaagttaatttaaaaaagggggcaaggacggggattgattttattacagatgactataattcggaactggaaagctataatagaagaatagaaaatttgtatgataaaggaaaaggaagtattagtaagggcaaatttgaaaaattaaaaacaagtagggaaaaattacctgaaggttttattgaaagagatttaaaaaatagccaatatatagccaaaaaagcaaaagaaatgctatttgaagttttcgaaaatgtgattacaaccaatggcaatattacaagtaaattaagggaagattgggacttaattaatgtaatgaaagagttgaacttagctaaataccaattggcaggtttaactgaaatagaagaaagaaaagaaggtaaaaaagttgaaataataaaagattggaccaaacgaaatgatcaccgccatcacgcaatggatgcgctaacagttgcgtttaccacccataaccatattcaatatttaaataacctaaatgctattgctaaccaagataaaaggtttgagaatttgaaaaatagtgttacttctgttataaaaacaaagagtggaaaaaccaagcgaatatttacaccaccaattactaattttagaacagtagcaaaaaagcatattgcatctattttaatttcatttaaggcaaaaaacaaagtagtaaccaaaaatgtaaataaaacaagaatcaaaggaaaggataagtataaatttacaacgcaacttacaccaagaggtcagttgcacaaagaaacggtctatggtaaaagcaagcgagaactacaaaagaaaattaaattatctaaaaagtttacttttcaacaattaaacttagttgtagatttaaatatcaaaaatttattacaaaatcacttggcaaaatttgacaacaattttgaaaaggcttttgatgctaaaaccttaaaaaaagaacccatactttataaaggagaacccatttttgaagtaaggtgctttgaagaaatttataccattagaaaagatattacccctgatttaaaaattgaaaaagtggtagatgagggcgtcagaaatattcttcaaaaccgattagatgaatataataataacaaaaaagaggctttttctaaccttgataaaaacccaatatggttaaaaaccccacttgaaaaaagtgaatggaagaataaaaatcaacccctaccacatgaaatagggattgctataaaaagggttaaaatatctggagtgagtaatgcggaagctttacacgttaaaaaagatcattttggtaatgaaattgtagctaaagatgggttgaaaaaaccggtagattttgtaagtactggaaataatcatcatgtggcaatttataaagacgaaacgggaaaattacatgaaagtgtggtttctttttacgaagcagttgcgagagttaatgccgagcagccaattattgataaaactttaaatagtgaccttgggtggacctttttatttactatgaaacagaatgaaatgtttctttttccacctgaagactttaactttgataagaaagatttgttagatgagaaaaatagaaatgaaataagtaaatatctctttagagttcaaaaaatttcaacaaaaaattacctattcacacaccatttagaaactatggcaacaacaggtgatgacttgaaaaaattgaaactattaatcggtgaaaaataccatttcatacaaacaccaagtaatttaggaaattgtattaaaatacgaataaatcacattgggcaaatagttcaaataggtgaatattagagatttttaaaaaaattatttgtgacttttgcaaccttaaagtgtgtttatgccgtataataaatgtaataaacatttaacggataaatgattaaacggacaatttatataggtacgccggcctacttaagcataaaacaccaacaaatggtgattagagatgtagagtctgacgccattaaaggtaaaataccgattgaagatattggcttgctaatgctagaccattggcaaattactattacacatttattgataataaaactgcaagggaataacacctgtatcatcagctgtgatgaacaacacttgccatttgctgccatgcttccttttactggtcataccgaacattctgagcgcttaaaatatcaaataaatgcttcggaaccattaaaaaagcaattatggaaacaaacggttgaagctaaaattagccagcaaatgttactcctaaaaaaaataggccaaccatacgagaaaatggtggaatatatgtttgccattaaatcgggtgacaccaccaatatggaaggaaaagcagctcaattttattggaagcatatttttaataattttacaaggcttcctgatggtgaaagccctaataatgccttaaattatggctatgccattttacgcgcaatggttgccagggcattggtaagtagtggcctaaatactaccttaggtatttttcaccgcaataaatacaatgcttactgtttggcggacgatattatggaaccttaccgcccctatgtggatgcattagtactagaaatactaaaaactgaacccatacctgctgaactaaccacacagttaaaagcaaaattactatccattgcaacggttgatgtgcagataatgcaaaagacaagaccaatgatggtagctataacaagtaccaccgcttcgtttgttaaatgtttgatgggagaaagtagattaatagcctatccaatcctttattaatgaattttacacgttttaatgcatatcaaattatgtgggttttagttttttttgatttaccaaccgaaacgaaaaaagaccggaaagctgcttcaaaatttagaaaacgtttattggatgatggttttaccatgtttcaattttctatttatttaaggcattgccccagcagagaaaatgcggaagttcatattaaacgaacaaaaatgaatttaccggcacatgggcaagttggtatattaaaagtaactgacaaacaatttggcaatatggagatatttcacgggcataaaatttcagaaaatccggcacctgtgcaacagctagaattattctaggattaaaaaaaatccttcaacgtaatgaggataataaaaaacaggagttttttaaattataaaaaccgattaaaaacacctgattataagtgtttttaatcgaccttgtgattcctcactgtaaaattacaaaaatctgaaagcaaatcacaacatgttggctatgttgttaagagtagaaaaacttgtgattcctcactgtaaaattacaaaaatctgaaagcaaatcacaaccaatacacgatatggttgacaggcttaatgcttgtgattcctcactgtaaaattacaaaaatctgaaagcaaatcacaacgacctattgacgggtataaatgattcatttcttgtgattcctcactgtaaaattacaaaaatctgaaagcaaatcacaacactggactagataagtcttcctttgctttacttgtgattcctcactgtaaaattacaaaaatctgaaagcaaatcacaaccattataatctttatcactccaaatttggtcttgtgattcctcactgtaaaattacaaaaatctgaaagcaaatcacaacacctcattacaactgcctgcattccttacccttgtgattcctcactgtaaaattacaaaaatctgaaagcaaatcacaaccttggataatctgccatgtttaaaaccgcacttgtgattcctcactgtaaaattacaaaaatctgaaagcaaatcacaaccgtgatggtgtccacggtgaattgtaccaacttgtgattcctcactgtaaaattacaaaaatctgaaagcaaatcacaacacatttgtggacaggaaacaattaaagatacttgtgattcctcactgtaaaattacaaaaatctgaaagcaaatcacaacctcttgtaatttcttaatttccttttgcaccttgtgattcctcactgtaaaattacaaaaatctgaaagcaaatcacaactgtttatcgttgccatttaattatctgttacttgtgattcctcactgtaaaattacaaaaatctgaaagcaaatcacaaccaccacgaccacaacgtcgaaagctatttacttgtgattcctcactgtaaaattacaaaaatctgaaagcaaatcacaacaataccacaataaataaaattaaataaaaccttgtgattcctcactgtaaaattacaaaaatctgaaagcaaatcacaacctttaatgccttcaaaggatgatgagatagcttgtgattcctcactgtaaaattacaaaaatctgaaagcaaatcacaacccagtgtccacgtttgtataacggtctgctcttgtgattcctcactgtaaaattacaaaaatctgaaagcaaatcacaacatattcttctaaaccgtcttcaagtttacgcttgtgattcctcactgtaaaattacaaaaatctgaaagcaaatcacaaccgtttctctggtcgtctataaattctaatacttgtgattcctcactgtaaaattacaaaaatctgaaagcaaatcacaacatattatatcggttaaacgtgcgtctattccttgtgattcctcactgtaaaattacaaaaatctgaaagcaaatcacaacaagaacccgtccattatcaaaggtcgttcacttgtgattcctcactgtaaaattacatcccgcaagcgttcgcgcttaaaagtaaattatattttgacacttcgtaagcgcatgctcagcacaaatactgtatttcattagtaatcaagttaaaaaatatgtcttgcgcgttagcgaactgataaaaggcttggaaagtaaaaaagcctcaaactaatagtaagtggttacgctttagcaaataaaatattccactaactttatccaaaaaataatggacttatctcttttaaaaacctgggaaccggttttatcgacagaatttaataaaccttattttaaagcattgtctgattttgtaaatcaagcatatgcggcgcatacctgttacccaccaaaagatcagatttttgctgcctttgactattgtccatttgataaagtaaaagtggtaattattgggcaagatccttaccatggtcctaaccaagctaatggtttgtgtttttctgtacaacaaggcataaaacagccgccttccttggtcaatatttttaaagaattaaattcggatttgaatttaccaataccgctgtctggagatttaagtccctgggcaaaacaaggtgttttattaattaatgcaacccttactgtagaagcaagcaaagctggaagtcaccaaaaaaaaggttgggaaacttttacagatgcagtaattgaaaaaatttctgctgaaaaaaaaggagtggtatttttgttgtggggtggttttgcacataaaaaaggcgtaaaaattgacagtaaaaaacacgttgtaattaaaacgggtcatccttctcccctaagcgccaatagggggtactggtttggaaacaaacatttttctaaaaccaatgattacttaataaaacaaggggagcaacctattgactggtcacttaattaggcgtaaggcttcttttttacttaaattacttagtttgttttcatgatctcttacaaaatcaataacggcctcagggtatagcctggtattttctctcaaaacccatccaatggctttatggataaaaaactccttggtgttgggtacttttaaaatggtttcaaataacaaatccaaatcggtactctctttgtatttgaggggaaataaaatggcacagcgcaccaaccaaaagtcatttgaagtaaggcatttctcaatgaatgcttcccttttttcagggaacaacaaaaagtaattacccataagttttggtgcaatcacatcaatggagtcccaccactgatttttggtggccatccaaataaaaaattctaggtctttttctgcggtgttttttttaaaataatttactgaaatgtctaaagctaaatgatgtaattcacggtatgctgttgcccataatgccgtgactaaagttttaatttcggatttagaataggttttagttgctgtaataataggtttagtaattagcttccttgttgggctgcggataccatagaatttgaattgatgtttcaaataagcactcattttatcactcgctactttattttgttcctgttcaaataagtcaataatcttttttaaggtaatcatgtttataaagtattgtagataaaagtatagtaattaacgattaatagctatttttgaggcataaagaagaattattaaagttaagtctctttctaaagcatgaaaaaaacacatcaaaaattatacttactccttgccatatgcatgttaggggttgcttgtaaaaaattgggtaaatataataatcctgatttaatttctaatggatcttggaatccagaattagcggtaccattagcttttgctgaatttggggtctatgatattttagcccaaacagacagtactgatttattggttattgatccaaattcaggtcagttggcactagtttataaaggggagttggtttctttttcagcagaaaactttatcagcataccagatttgttggttcaagtagatttttcttccagtgatcttagtttagcgcctatacctgtatttagtagtacagctacagtaacacaagatgaaaatttagtttttccattagtaaatggggtggaatttcatacggtaaaatttaaaggaggctcccttaatcttagtttagtcactgactttaaacatgacataaatataactgttttatttccaggtttaataaaaaatggcaatgcagtaagtgttaatttaaatggtacttatactggtaatagtcctactgttgtgggtggaacgcttgatttaacaggagtgagtgcagatttaaccttagctggaacggttgtcaatacatttaaggccgaaataaccactacaataagtggtacaggagctgctatagtaggcacagaatcgatttcattaaatatggattttgtaaatctagcgtatgaaaatgcgacaggttattttgggaatcaaaattttgatttggggcaagattcaattctaattaaaatatttaacaatgccttagatggctattttgagcttacaaatccaaaaattaaattggaaatggttaattcttttggatttcctgtgcaggtagctttaaacaatttaagaacagagaatgtaattaatggtaacacctttgttttatcaggttatcaaaacccaattgatattttggcaccacaaataatgggagatgctaaaacaactatcctggaattaaatagtaccaataccagtaatatttcttctattataacgccaacaccaaagtacttttattatgaagcagaagctacttctaatccaaatggtcctactgcgaaccttaattttatattagatacttcaaaatttaaaattaatgcagagttggaattgcctttggaaggttttgcatatggttttgaattcaaagataccttggcatttgattttacagacgacatagccgaagtgtctgctatcttatttcgaattattatcaacaatggttttccagtaaatgtaagtgctaaaattaactttacggatgagcactatgttagtttattagaaattacagatggatttgagttagtggttgcaagtggtgaagtgaatgcggatggtatagttacttctcccaccgaaaagttaacagacctagtagtagagcgtagtgatttaccaaatatagatgctgcaaagcacattattattactgtgctaggggaaacaacagatggtaataatgggcaagtagttaaaatgctagacacttacaaaataggtcttaatttaggcatgaaagtaactggttctgttcagctttaaaaatacaaaatgtataaacaaataatattagtgttaggatttgtgtccgttttcttttttgggatgacgcaagcaaatttttctcaatacaacatcaacaatactgcacaatcacaatacttaaatccagcattccgcccatcttctaaagtggggatttctattgcgccttttagtaatttattgaatgtacaattccttcatactggttttgctttaaaggatgcttttacgccaaggacaaatagtgatacgttagatttaactttgggcaaattggtggataatttaaataaggtaaattatttagattttaacatgcaaaatgaattgctggcatttcaagtcaccaccaaaaaaacaagtgttaattttaccgttaatagtgtttttaggtcgggattttcatacccaaaagatctattgagatttgcctattatggaaacggtggagaggagtatttaggaaaacgtgttgcttttgataatattggttttgatgctttatggtatttagaatttggtgttggactgaatagaaaaattggtgataaattaacggttggcgctaaggttaaatttttaaagggaatagctagttttcaaacagcagaaagtcagtttggactttatactgatcctaaaacgtatgccttagaagtggatggggccatggcgttaaattataacaatttagctgccttagaaggtttgcaaaataattcaagtgatttgggtgccatttatgatagtgtgtctaccactaaaaatataggacttggattagatttaggggcaacttttcaattgacaaaaaaaataatgttatcagcaagtgttattgatttaggtgctattaaatggaaagacaacgttactaattataaggtaaatccttttacttttgaatataaaggggttgatgtagataagtatttaaacgatacctcagattattttcaagaactagtggactctttaacgcagcttacaactgtagttaccacacataatacctattctacaaaactttattcaaagttttacattggtggtagttatgacctgacaaagtttttgaatgttggtgcggtatggtataattcttttaatccaggacgctatattacggcacttaatctatctggaaatgtaaaattgaaacattggataggggtttcgggaaatgtttctttttataattacaaagatgtcaatttaggagcaggaataaacctgaggggtggaccgtttcaaatttattttatgacggataatgttttgtcggtcatgtaccccgaggcagcaaaaaatgttcattttaactttggaatgagttttcaaattggaaaaacaaaagaatataaaaaaaagggactgtcaattttgtaacaaattaggacttcttttcgtttatatacagtaattttgcaaacaaacctcaacctaactattttgagggttatttattgaaatgaaatctttattcacctgcactttcttattctatttttcgcttacttttggtcagattttaaaccattctaagggagagttatttacagaagatccaaggtttaatcctaccttcattaaaaataataaaattaagtctattaagggttactattccaccaaggccgattacgatagaattagaccaaccaataacgtgtacgtctatgaatttaaccaagaaggttatttggtgcaagattataaaacaattagacgggataccattgtaagggcttacgaatacgataaaaaccataacttaattgtacttcgtcagtcggatcaatatggttttcaatctttccattatacttacgattccttgaaccgtttaattgaaaaagaatataggagagatgttaaccataaaaaaagtaaagttgattttgatttaggcgaaagttacattatttcaaaacatacttttggatatgaaaatgttaaagcaggactaaagaaaagttatttcaactctttagggaaggtttatcaaaccgaaatattttacgcggacataaatgggtatttatacaagcaagagtcacgatcattgaccggtgttggtagtgctaaaactgattaccaatacaatgaaatgggcttgctaagagaatgtaaaacagagacagttttaaacagtaaatcgagttcaagaattaaaatagaatacgacaataatgaaaatataatggcccaacattattatagaaatggggtgtacaaaaccgagtttcaaattgtatacaacagtgaaaatatgcttttgaatgcgctactgtcaagagatatagaaacaaatgtaatcaccatattaaaatttgcagattacactttttttaaggattaaatttaattacccgaatactccactatatttctttctgtttcaaataacttgattctcaaatctaattcggtagctaattttgcccgtaatatgttccaaatgactacaacaatgttttctgcggttggattcaggtctttaaattcaatggtgtctaggtttaaatttttatggtcaaacctttcttctacttctgcttttactaggtcttttaatttccctaaatcataaacataaccagtttccggatcgatagcaccagttaaccaaatttcaattttgtaattatgcccatgataattagggttgttacattttccaaatacggcttgatttttttcaaagtcccaatttttattgtacaatctatgggcggcattaaagtgtgcaattctacaaatacttactttcattctcttgcggtttggtacaaaaatacagcttaaatgcgtttataaataccaaattactttatttttatgtgtaagctaacttcttcttaaaattctaatttaaacaaaattctgctttttatatcccaaccctcccatgatgataagaaaaaaattagtttctttgtattaaaggcttaatttttgcattaagttttttgctgtaaggaaatagaatgaagtatatattaattgcactatgtttatttggtgttgtcttggttgcttgtgagcataaagcagtggtagatgatgtaaatacaccccaaggtatagcgggtgaatttattccgttagactccgtagacatgcaattaatttctttgattgattatgatttaaacctttctattcaattacccattgtggcaaattcactaggtaaagtgattgaaccagtagttttacatgatgatggagattacttatggtttatccacataggagattattttaaaattgtagttgaagactatgccaacgagtttggtaaagtagtggccgctaaaaagctgaatgaatctcaatccaatatgtttgaatttgtatatttcatagatgagatggatttaattttttacagtcgccaattgattggtgagaatgggggagaaaaaacctatcattgtttacgagagatgaaaattgatggctacaattatattttaagaaccgaaaaaacgggtagcagtttaaagtctgttgttcaagatatggttagcgcgattaaaacagcaaagcacgtcaaataaaggcataaaaaaacccatacttttcagtacaggttttaatattttatttgcggttaaacttaataaagtttctttttcaaccaagttctcatttcttttatttcttctctgttaaaagtattttcagattgacgcgttaattgtaacaaatacactaagttttcttgatctgttcctggctctaata

SEQ ID NO: 2238 - DNA, 24146 bp, synthetic construct
  source 1..24146: mol_type = other DNA
  misc_feature 1..24146: note = Synthetic
cgcttgaatacaagggaccggaacttcatgttgtgcgcgagacgatgcgtcccacgcggtggctttgcggccgcctcacgacgcagacgcttgtgataggcggcgtggcctatacacactcgcccactgacgacggcaaggcatggagtgcgcaggtcgacgcgtgtttcggttatcactataattggacacccatgcccggcctgcggctgatggcaggtgcacaacttgccggcggattgggcggacagtaccatacacgcaacggtaacaaccccgcgcaggcacggctggacgtggcgctgaacgcatcggtaatggctatttaccgtttcaggcttgcacgtcgttggtttacggctcgcgcgcaactggacgccccggtggtgggagctatgtttacaccaaactatgggcagtcgtattacgagattttctcacttggccactatgaccgtaacgtccgcttcacctatcccggcaatgcccccacgctgcgtggcctgctgacgctcgatgtccctgtcgctacggcagtggtgcgattgggctatctggccgacatccgccagagcaacgtgaattacttgaaacgccatgcgtggagccatgccttccttgtcggttgcgtcaagcatttctcgattatccgtgcggccgatccgcgccgcgaagacatgatctattgaagttgggttaaagtcaggctgtaaacaaataccaattgagaaaagggaaaaggtcgtggcaatacgaaataaaaaccgattagggcaaaaagacagagaaggaggtgattatggagccgatatcaacaaaccacaaagtcaatatgctgatagaggaattcgacaagatatttatagcagatagggatgaaaccttgaaggacggggacaaacggggaatcagtttcgccatgttacccatgcataagaaaagaatagaagaggcagggacaagtgtttgggcatcttctgtccttgaataccaatccgacgattgtaaacagtgatgcgaccgatgttccgttacctcacccttgcgtgtgtcctttcctgtctgttttcatcgtgcattacggaggacgtggccgataatacggctctcgggaatttcgatgccttgtggaccacgatggatcagcattattgttttttcgaggagaaacaggaggcctacgggcttgactggcaggcggcccgcgaggaatatcgtgccgccgtggtgccgggaatcacttccgcacagttgtttgaagtgatgggagcaatgctggcggagctgcgcgacgggcacgtgaatcttgtggccgcacatgatgtggccagctacacggcatggtatgacgactatccggcaaactattccgactcgctcgaacgcatttatctcggacggggcgatgattattttacagctgccgggctgaaataccgtgtgcttgacgataacgtcggctacatacgctgtgagacgtttgagaccctcttcggcgacggaaacctttatgaagtgatgagttatcttgctccttgtgacgggctcattgtcgacatacgccacaatggaggcggaatgcttacggcggctgagaagttggcatcgcttttcgtgaaccagcgcacctgcggcggttatatgcgccacaagaccggaccggggcacggcgacttttccgagccgcagccgctgtggatcgagccgttcgcctcgttgcgctggcagaagccggtggctgtactgactaaccgccggacgttcagcgcggccaactcgtttgcaatgtacatgcacggcctgtctggtgtggcactcatcggcgaccgtacgggtggcggtgccgggatgccgttctcgtccgaactgcccaatgggtggggtgtgcgtttttcggcttgtccgatgtatgaccgtgacatgaactgtactgagatggggattgatcctgacgtgaaggtcgacatctcagccgaagattatgcgcgtggggtcgacacgattatcgaggcagctcgggcatgggtgaaagcagccacctgtgacgcagggcgttgagacctatcctttgtcgggctttcttcgtgtctcgtgcccgtagttcgtaaaatttcatccaaaggttcagtttgcccgaacgtatcacatcgtatttccgaagcagtatgatgtgaggtgattcgtaggtggctgtaagcagaaggaacgtactgtctttgggtgactgccagcggatgacttctttctgcgattctacgattacgagttcctgtcgtggtccagtttcggcggtcagtaatgctgccattttccgttcttccgcatcggggccgagaaggacgagccggtggcagacgtccaggtcaatggcgttcgtgcgtgatttgtaggaaataaggtccgcgttgaaacatgtggcgaggctgcaaagagcaacggcgggcaacacgcgcggcaggagtgtggacataaagaaaaggagcaaggtcagtcccggcgcaaggaaacgttcgtctttccacggtacaacgaacatgtagacggcaacccacaagcacaggccgagccacattccccacggaatgtttacattatggtaacgtctatgtctgacagtgagccacagaccgacaacagccagcacggtgccgaccggtgtgaacacgcgcaggatgaaaaggcgggctgttcctttgatcgtcatccacagttcggctaagaatgaatatgcttgcagtttttcggaagtccgctcaatgcgcgggtcgagcacgtaattgaagaaaccttggtagactgcccagcatgtcgcgacagagagtacaccgacggtgcagaggaaaatcgccgttgtgcgaaggtgtccataccggtaagcccggacagtgagccacacagcccacagcacgacaagaaaggcattgacatatccgctcgaaagagccagtgcgaccgcgccaacagtgcctagcagcgtgagtgggcgcaggagcgggcgtccgtcgctgaggcggtcggagaggtgcaggacacaataggcgaggacaacgatggccatctcggctaacgcgtattcgcggaggaacagcgtgttggacaccgcaatggaattgagatagcccaaagctaatgcaaaaactggccacatctttcttccacagcgttcgcacagcagcctggcggctgtgaagaaactgatcgtaaagaaaagcagattcaaggcgcatccccaccagatgactgcttcggggctgggatgggtgacagcagtgagcgcacagcgaagcagcatgtaatagagtgaggcgtgcggcacgtcttgattgtcgtgccataaggcgcggagatcctgactcagaccgctccatcctcctgtctcgtcggcgaagaagtgcctcagttcgtcggccgagtatacccggtgggcgtcgtgcatcagattgcctttgccgtcgacaccattccagacaatgctcagtgaggtcagttcgtcgccgtggaagcctgtcttctgcgccacccaatacagacggacgcccagagccagcagaaagacgagaaagatagcgaccctttggaaccaaacgctatgtaactcggaatgtagagagggggaggatccgttcattttcagctttttagcggaaggaggggcttattcgtcgccgataagcgtgattccctcgtcatcgatgaggatgcggcgttgtttgtagagcgtgccgacagcgcgcttgaatgtttttttgcttacttggaaatgttcggcgatggcttcggcatccgtcttgtccgtgaagggcaggaaaccgccggcggcctgcaacttgcggagaagcgtttctgagaaatcgcggaagcggcctttccccaagcgctgcaatgagaggtcgagcttgccgtcggagcgcacctgcacaacgtgggcacggaggcggtcgccagtgtgtagctcgtcatatatctggtcgtcatagatgagcccggagtagcggttgtcgacaatggctttgtagcccaacggagtgcgttgccagatgagggcgtcgacttcgcggtccttgtggtagctggcgggagcagattcgaggtagcggtctaccttggcggagccaacgatgcggtgagtctcggggtcgatgtgtacgtgtacaagataggtgtttcctttgaccattttgcgtttctgctcgctgaatgggacgaaaagatccttcatgagcccccagtcgaggaaagcaccgaactggttgacccaggcgacgcgcaggaacgcgaactcacccacttgggccagcggctgttccatcgtggcgacgaggcgttcttcttggtcaagatagacgaaaacgtgcacctcgtcgccgggccgcatctcgggcttgacatagctgcgaggcatgagtatttctcccgtctcgcctccgtcgacataggcgccgtggtcggtgaatcgtgtgatggtaaggtcgttccagcggcctaattgtatcatcatgtgtgtggaacttagaggggatagttgtcaaaatcgaattcgtgtgtcgagaggtaacgttcgcccgtgtcaggcagaatgacgacaatccgcttcccgcggaatccgtcgcgccgggccagccgggtggcggcgtcgagagctgcgcccgacgagatgccggccaggaggccttctgtggctgccagccggcgggcggcacgcaaggcgtcgtcgtcggcgacggtgattacctcgtcgacgcatgatgcgtcataatttttcgggacgaagtttgcgccgatgccttgcagctggtgtgggccgctgtgtccttcgctgagaagcggtgatgcggctggctcgacggcgacgacatggatggaggcattgagctgtttgagtgtccggccggtgccgctgatggtgccgcctgtgccgactccggctacaaggacgtcgacggtgccgtccgtgtcgttccagatttcgcaggccgtggtgcgggcgtgtgcctcagggttattgggattgtcaaactgtccgaggatgacggatcccggtgtttcccgacagatgtgttcagccagggcgactgctcctgccatgccctcctttccggatgacaaacgcagttctgcgccataggcgcggataaggtcgcggcgctcgcggctcatagtgtctggcatgacaataatggctttcagtcccatcgaagaggcaatccaagccagtgctacgcccatgttgccgctggtaggctcgatgatggtgcctccacgctgcagtttgccttctgacagggccgaggtgatcatggagagggcagcgcggtctttggcgcttccgccggggttcttcatttcgagtttggctacgagcggtatgccgagcccggcctcacggctgtaacgttcgagcgagagcagtggtgtggtgccgataagttcagtcagttgtttcgctattttcatctgtaatttgagtgggcgtttctgttgtggccggtacgattcggccatcgaccatgtggatggtgcggtcggtgattttcgacagttcctcgtcgtgggtgacgatgacgaaagtctgtccgaaatggtcgcgaaggcggaaaaaaagattgtgcaactcggccttgttctggctgtcaaggctgcccgacggctcgtcggccaagatgatggcagggtcgttgataagtgcgcgtgcgacggctacgcgctgttgttcgccgccggaaagttcggagggcttatgggcggcgcgttctgaaagtcccagaaaatcgagcagctctgctgcacgttgctttacctcgcgtgtcgggcggtgggccagcagtccggggagcatgatgttttccaaggccgagaactcgggcaggagctggtggaactggaagacgaagccgagcctccggttgcggaaacgggctagttcgcggcggccaagtcgcaggacgtcagtcccgtcgatgcgcagcgagccgctgtctggccggtagagtgtgcccatgatttgcaggagcgttgtcttgccggctccgctggggccgacgatactgacgatctcgcttttgttgatgtgcaggtcgatgcctttgagtacttgtaacgaaccgaaagatttggtgataccgttgacttcaatcatatgaggaaacgggtgggggaaacactcctgtacggacaggctgcctcccgaatgtttgtcgtgtaagtccctgcatggtgagcgctatggcgtccggccatgcagggactttgagcggtttgtttacttttcggggatgttttcgagcgtggccacgacgaagcggtagtatttgtccacgctggggatgtggcagcgttcgtcaggagtatggggcgagcgcagtgtcggaccgaagctgaccatgtccatttgggggtacatggcaccgatgaggccgcattcgaggcccgcatgcaccacctgcaccttgttgtcagtgccgaagagatctttgtagatgccctccatgatgccgactatctggctggcgggattgggctgccaggcgggataggctccgtcgagttcgacgctcatgccagccatggcgaaggtggcggtgagtgtgtcggcacagcagtcgcgcatggagtcgcgtgaggagcggatgaggaccttgaacatcgcttttccttcggcgatggagacgatggccaggttcgacgatgtctcgacgatttctgggatggccgggatatagcgcattacgccgttgtggcagcccatgagcgcgttgatcaggttgtcctggacttctgccggcacgatagtggcgggcagcttttcgtcggtgcaagtaagggcaagggccggttcgataccggcatattcgtcggtgaatatctggcgccattcgtctacggcctccttgaacgcctctacattttcagacggcagagtgaatacgaggtcacaatcgcgggggatggcgttgcgcatgttgccgccttcccacgaggcgaggcaggcctcgtattccgacacggcgtcggcagctatgcgagccattagtttgttggcgttggctcggccttcgttgatttccaggccggagtggccgccgcgcaggccgctgaggctcactttaaccgctgcgtcggtcgcgtcgggtgcggcggtggagaactccatcgtggccgtcaggttgacgccgccggccgacccgatgaccatttcgccttctgtctcgttgtcgaggttcaggagaatgtcgccagtcagcgtgccaggctccatgtggttgactccgtacatggtggtctcctcgtcgacggtgatgaatccctcgatggggccgtggcgcagggtcttatcctccatgacagccatgatggtggccacgcccatgccgtcgtcggcgccgagcgtcgtgccgcgcgccttgacccattcgccgtcaacgtaggcttcgatcgggtcggtctcgaagttgtggggactgtcgctgagtttctgtggaaccatgtccatgtgggcttgcagggtgacggttttgcggttctccatgcccggggtggcagctttgcgcatcactacgttgccggccttgtcaaggaaagcctctacgccggtttcgcgggcaaagtcaagaagaaattgttgcactttctccacatgccctgaggggcggggcacgcgtgtcagggcgtagaaatgacgccaaatggaggcgggttgaaggtctttgatctcggtcatagtcgtaagatttatgaatgtctcagttttttcggatagtcagcggttcgcggaaagtgtactcctgcgtctgatgagtggcaggtcgacgagcgcatagacgccaagcacgacgacgagcatcgtctgcaatgtgtggactacgagggcaaaatccgccgctgccacgccgtctacgccgtagagcacaagcatcgtcttgacggcaaagtgccacgggccggctccgttgggcgtcgggacgagtacggcgaacgaccctacgcaaaagatggccaaggcagctcccggccctatgccggaggtgaagtcgaagcagaagaaggcgaggtagaagtggaggaaataggctacccatatgcccaccgaataggctatgtagagcggcaggttcctgaccccgcgcagcgacacgatgccggcccaaaggctgaggaagacgccgcgtgcccggctgaacgcttcgaggcgggtcatgagcgcgtagagacccgctccgagcgccacgatgcagatggcagtcacaatgtagcccgtccctgtgaagcgccctaaggcagcgccgacgtcggtgcctgtctgttcgaggaaacgggccagtgtaggcagctggaggaggaacgcgagccccgtgaaggcgagcagcacggccgaatcgacagcgcgctcagtcaccacagtgcccaatgagcctgcgaacgacgtgccctcgcgttctttcagcgtgccgcaccgcgtcacttcgcccacgcgggggatgacaaggctggcggcataggacaggtatacggcgtcgatacacgtccgccggcgcggacgttcgcccaagggggcgagcgattgccgccacctcagggcacggaacacctgcgccgccacgcccggcaccatcgaggccgccatccattcccagcgcattgagcgcaccgtttgccagaggcgcggccattcggcgtcgcggtacatccaccaaaggatgcccagccccaacacaaagggaagggcaagttttaacaggcttttcagcaggcgtgcacctgctgtattcttctcgtcttgtttttcgtccatagaaaaagtaaaatcgctgctaccggcgtgccgggcatgcgaacggcagcaaatgtagtgaaaaagcgccacactcgggccacgcgctccacgaaaaaacgttctgcgtcctgtcaggcgcctgtcgggtgcggaaaaaacgctaactttgtgcccaaaatgtccgtcgcctgcaaaaaaagagaatccatgatgagaaacgtccgccccaagaagtcgctcggccagcacttcctgaccgaccagccaaccgcccgtgccatcgccgacaccgtcgacgcctgccccggccttcccctgctcgaagtggggccgggcatgggcgtgctcacgcagtacctggctgcgaaggggcgtgtgctgaaagtggtcgaagtggaccgcgagagcgtggcctacctgcgcgagcactttcctgagctcgacggctccattgtcgagggcgatttcctccgccttcccctgtctgaagttttcgccgggagtgccttcgtcctgacgggtaactatccctacaacatcagtagccagatattcttcaagctccttgccaaccgtgagctcatcccctgctgcacgggcatggtacaacgcgaagtggccctgcggctggcctcgccgccgggcagccggacttatggcgtgctgagcgtctttgtgcaggcgtggtacgacgtccactacctctttaccgtcgagcccggagtgttcaaccctccccccaaggtgcgcagcgccgtcgtgcggcttgaccgcaacgggcggcgggagcttgggtgcgacgaggcactgtttgcccgtgtggtgaagggtgtgttccagcaacggcgcaagatgctgcgcaaccccctgcgtgcgctgctcgcccagctcgacggtcccggccctgcgcgcggccacgatgcttttcttgcccgccccgacctgacgcggcgccccgagcagctcagtgtcgacgagttcgtcgccctgacgaacgatgtccagcgcgaactgggacgctgatttcccgggaaacggcgccctggcggaggagaaaggagatgagaaaagcgacccttccaccgccttgggcaggagcgccgctttgaatgttttcacaacggaataatccttattgtgatttgcttcgtggcaaaggtagcgttttttcttgattcacccctttgcttgagaataaaaacttatatttgaggccttaaaaacagtattatgaaaaagataataggccttgacttaggcaccacaagcataggatgggcttacgtgcacgaagccgaatcagcacaagagcgttcagagatagtccggttgggcgcacgcgtcgtcccgttgaccacggacgagcaagatgaattcaagaaaggaaagagcatcacgacgaatgctgcccgcctgtcaaagcgcagcctgcgccggaacgccgaccgtttccaacttcgacgcgacgaactggccggagtgatgaaagaagcaggatggatcgacgaaacgaccgttctggccgagcaggggccgcgctccacgttcgaaacgttgcggctgcgggccaaggctgccagtgaagaggtcacattggccgagttcgcccggatcctgcttcaaatcaaccggaaacggggttataagagcaaccggaagacggacggcgacgaggagggggcgctcatcgacggaatggatgtttcgaagcaattgaacgcgagcgggcagacaccgggcgagtgggttttggcacggatgcaggaggggaatgcggttattcccgcattttattgttccgacctgtcggaagagctcgaccggatatggaggaagcagcaggcaagccatcaggcatggatgactgaggaactgcacaccgtcctgaggcatgccgacggcaggagcgccatacgcctgatggacaaggccggcgttgtgcctgattccgtaaatgtcaaggaacggcggcgcgttatgtatgaatggcgggctgcggctgtccgtgattgtctgccggcagggcgggtggcagctgccttgatgcaggtttcgaaagaaatcggccgggcagacagctatctcggccggatcggagaccgcagcaaggagctttatttccaccgccagaccgtggggcaatacctgtggaggctcatctgtgataatcccaatcagagtttgaaaaacttggttttttatcgtcaggattatcagcatgagtttgaaacgctgtggtccactcaggcaaaatatcatgtcgagttgaccgaagacctgaggaagcgcgtcggccgcatcatattcttccaacgtcctttgaaaagcaaaaagggtttggtcaaccgttgcgagttggtgcattactccgtgtgtgaaaacagtggggatgatctcatggagaaggttgatgtcgggccgaaagtgtgcccgaagtcctcacccctgttccaagagttcaaggtgtggcaggtgctgaacaatgtggaggtgattcatccgagtacgcaggaagcgcggcgtctggaaatggaagagaaagaattattggcttcggagttgctctttcgcgacaggatgaaaaaaatagacgtgctgaaactgttgttcagtaattggcgcgacttggacttgaactacaaggaactggaaggaaaccggacgatggctgccttttaccgggtctatgaacaagtgattgcgcaaacagggcatggcgattatgatttcgcgaaaatgcgggccgccaaggtgaaggagttggcagagggtgttttcgccggactcggtttcgaagtgggccttttgactttcgacgccgaactcgatagccctgcttatgagcaacaaccgtgttaccgtttgtggcatttgctttattcatacgagggtgacaagtcagcaacggggaacaagtgcttgctgaaaaagttgtgtcgtctgacggggatgaacgcggagcttgtcgggctgtttatgcaaatccgtttttccggcgattatggaagtctgagcacgaaagccatgcgaagaatcctcccctatctgaaagcagggaacacctacgacgtggcttgtgaatatgctggtttccgtcattctgcacgttcgttgacacgggaagagttggctcaaaaagaatataaggactatctggacctcttgccgcggaactcgttacgcaaccccgtggtcgaaaagatccttaatcagatgattcatgtggtgaacgggctttcttcgacctatggcaagcccgacgaaatccgcgtagaaatggctcgggagttaaagaagagtgcaagagagcgtgaagagatgacgtcggccatttcgaaaacgacaaaagagaacgcggagatcactgcgattctgcaacgcgatttcggactccggtatgtgagccgtaatgacatcctgcgttacaagttatactgtgagttaagaataaaaggcaatgggtgtcgtacgttgtattctaatacatatataaatcccaatgaactcttttctcgggagttcgacatcgaacatatcattccgaaatcccgcttgtttgacgattcattttcgaacaagacgcttgaaagccgcaccgccaatttggaaaagggcgacagaacggcttgggattacgtgaacgaaaagtacggtgccgaaagagcggatgagtatagggctcaggtagaagcgctttatcgagacgggactatatcgaaagccaaacgtgacaagctgctgatgccgggcgataaaattcccgaagatttcattgaccgtgacatccggaatacccagtacatcgcgaaaaaagcgttggagatatttgaggatttcgtaccgtctgtggtggcaacttccggaaatgtgactgcccgtttgcgcgaggattggggacttgttgacgtgatgaaagaactgaactggtcgaaatatgaatcccaaggaatggttcatatagaatacgaccgtgatggccgcccgataaggcgcattgtcgactggaccaaacgcaatgaccatcgtcatcatgccatggatgcgttggcggtggctttcacgaaacgaagttacattcaatatctcaatcacctgaatgcccgtaaagaagcgacgagtgtcgcttatgccattcagcataaagagatggaactcgatggctcaaaccgctggcggttcaagtgtccttttggcgaccgttctgcattccggcgcgaagccaaagcacaattggagcggatactcgtatccataaaatctaagaacaaagtgcttacgccgtccgtgaaccggacgaagaagcggggagggtttaataagaaagtagagtggacgcctcgtggcgcactgcacaatgaaaccgtgtacggaagaatccgccggtatgacgtgaaagaacttcgggtcggatcttcgtttacggcggaggtgataggcaaggtcgcggacagccgttatcgcgcggccctgatgcaccgattggctgaatttggcggcgatccgaaaaaggcttttacgggcaaaaacagcttggagaagaatccactgtacacagacgaagcacatacggcctgtgtcccctcgagcgtgaaggtggtgtcgttcgtggaaatcggtacgatacggaaaggagtggatcctaaccttaatgttgataaggtggtagatactcatataaagaatatactcttagcccgactttctgcttacggcggcgatgccaaaaaggcgttctcaaatttggacgctgatccaatatggttgaacaaagagaaaggcatagccataaagcgggtaaccatctcagataacagtgaggtaaggcccatacacgtcaaacgggatatgcgtggccgcctcgtctgcgacgagcacggacggccggttccttctgactatgtccaattgcgtaacaatcaccatgtggccatcttccgcgatgcgaacggagaactcaaagaacgtgtggtcacctttttcgaagccgtcgagcgtgtgcgccagttgaggagcgaaggccgggcggttgaagtgatcgacaagaactataaatgcgaggagggatggacattccttttctccatgaagataaatgagtacttcgtgttccccgatgcggcttcgggtttcgaccctcgcgagatcgacctgaccgaccccgccaactacgcgctgataagcccgcacttgttccgggtgcagaagttatcctcaaaagattattatttccggcatcatctggaaacgacagtgaatgacgtgaaacaattgcgggatataacgtggaagcggatttcatcattgcaggacttagcaggaacagtcaaggttcgcgtgaatcatatcgggcagatcgtggccgtaggggagtattgaacgaacaaagccaccgacatgattaagaagacgctttattttggaaatccagcccggctgtcgttgcgcgacgggcaaatcgtgattgagaaaccggatgcggaaaagcggcggccggccacggaggtctggttcgacgaggcgcgcgtcacccggcccgtcgaagacgtcggcgtcgtggtgctcgaccatccgcaaataacgctcaccgccgtgttgatggaagctttgttggaaaacaactgcgcccttattacgtgcgacgggcggcatcttcccgtcggcttgctccttccgctatacgggaatacgacgcaaaacgaacgtttccgccagcagatagacgcatccgcccccttgcgtaaacagttgtggcagcagaccgtgcgggccaaaatcaggaaccaggcagctgtgctgcgtgcagccggcgtggaggccggatgcatggaagcttgggcacgcgacgtgcggagtggtgaccccgataacttggaagctcgggctgcggcctactattggaagtgggtgttccgtccacgccaaggcttcatccgcgaccgtgagggggaatatcccaacggacttcttaattacggctacgccatcctgcgggcagtggtggcgcgcagtctggtggtgagcggcctgctcccaacattgggtattcatcatcacaaccggtataatgcatattgtctggccgacgacgtgatggagccttatcgtcctttcgtggataaggtcgtggcaggcatggcgctccatgacgaaggccatgaactcacgccggatgtcaagcggcaattgctttccatcccgacgcttgacgttgtgctggacggacgccggagtcccttgatggtggcggccgggctgaccgcctcatcgttgaacaagtgtttctctggcgagttgcgccatgtcctttatcccgaatggccgtgaacaggattagtcagtatcgtgtgatgtggattcttgtcttctttgatttgccgaccgagacgataaaagagaagaaagcttatgcactcttccggaaaaatctgcaacgtgatggtttcactatgttccagttttccatttacgtgcgccattgcgccagctatgagaacgcagacgtacatctacgtcgtgtaaaatctattcttcctccgtatggaaagataggtctgctttgcatcacggacaagcagttcggcaatatggaacttttctttggccgtgcgccgcatgatgtttgtgcgcctggtcagcagttggaattgttctgaaacaaaaaaactccggtttgttaaactggagtttttttactgcggccatttttttctttcctcgttttgtgctctaatgatttcttattcagctgtttgtggtgtttgagctgtcgcagatactgcaaaggtaagaatttgaaagcaaatcacaacgttacttactggtgcaggaagcatgttgaagctgtcgcagatactgcaaaggtaagaatttgaaagcaaatcacaacgttttgtccttttccctgaaaatcgaacgcgctgtcgcagatactgcaaaggtaagaatttgaaagcaaatcacaactgttgctcgtatctctttccagggaggtcagctgtcgcagatactgcaaaggtaagaatttgaaagcaaatcacaacatctccgtcatgtacccgtgtcggaaatttgctgtcgcagatactgcaaaggtaagaatttgaaagcaaatcacaacgtagaggtcttcccactctttgacggagcgctgtcgcagatactgcaaaggtaagaatttgaaagcaaatcacaactatgcgccggaagatgtcctctgccgtctggctgtcgcagatactgcaaaggtaagaatttgaaagcaaatcacaacgagagaaaagagggtaatatagaggagcttgctgtcgcagatactgcaaaggtaagaatttgaaagcaaatcacaacagtgttttctatcgaaccttattgtgaatagctgtcgcagatactgcaaaggtaagaatttgaaagcaaatcacaactatcggtgcgtaggagcatccagcgagcgcgctgtcgcagatactgcaaaggtaagaatttgaaagcaaatcacaacacagttgctgcccaagcatttccttaaaaggctgtcgcagatactgcaaaggtaagaatttgaaagcaaatcacaacagtatgcgtaatttcctaattaaccgagttgctgtcgcagatactgcaaaggtaagaatttgaaagcaaatcacaactctttcaagtgtagatgaagtgcacggatcgctgtcgcagatactgcaaaggtaagaatttgaaagcaaatcacaacgacgccgtgttattgtgaggaagtaattccgctgtcgcagatactgcaaaggtaagaatttgaaagcaaatcacaactgttaggaccttgttttaattttgcgcattgctgtcgcagatactgcaaaggtaagaatttgaaagcaaatcacaactgttttttcaatcgaaccttattttgattagctgtcgcagatactgcaaaggtaagaatttgaaagcaaatcacaacgtcaccgcccacggccccaccttgcctctggctgtcgcagatactgcaaaggtaagaatttgaaagcaaatcacaacgtcacatacacttccgccgggcgcttcatgctgtcgcagatactgcaaaggtaagaatttgaaagcaaatcacaactgtgtcgttcttcgcgatgagcagcacgcagctgtcgcagatactgcaaaggtaagaatttgaaagcaaatcacaacgtcgtcgatcggctcgttgctgaaccccgtgctgtcgcagatactgcaaaggtaagaatttgaaagcaaatcacaacgtcacatacacgtcggcctcagccttcatgctgtcgcagatactgcaaaggtaagaatttgaaagcaaatcacaaccgaaccaagttgatgcagataacgcaattgctgtcgcagatactgcaaaggtaagaatttgaaagcaaatcacaactgatggtgtaacatatccgattgaagagggctgtcgcagatactgcaaaggtaagaatttgaaagcaaatcacaactaacccttgtccctaattttctactatcccgctgtcgcagatactgcaaaggtaagaatttgaaagcaaatcacaacgtcgtcggggagcggcaaccaggcgaactagctgtcgcagatactgcaaaggtaagaatttgaaagcaaatcacaacgtcacagcgtcgaacaatgtctcatagacggctgtcgcagatactgcaaaggtaagaatttgaaagcaaatcacaacccttttgcagcacggtgcccttcatctgcagctgtcgcagatactgcaaaggtaagaatttgaaagcaaatcacaacccttttgtgcatttatcgttcgctttgtgagctgtcgcagatactgcaaaggtaagaatttgaaagcaaatcacaacgcggtcagcaaaaaatatacgacggctacggctgtcgcagatactgcaaaggtaagaatttgaaagcaaatcacaacctgcacgaggttctccgtcatcttcccgccgctgtcgcagatactgcaaaggtaagaatttgaaagcaaatcacaaccacttcgcatttcttgttatcttcatcccgctgtcgcagatactgcaaaggtaagaatttgaaagcaaatcacaacgttatacttcaaatctaaaatatctatatggctgtcgcagatactgcaaaggtaagaatttgaaagcaaatcacaacttaccgatgaagggaatcaatgtgggttttgctgtcgcagatactgcaaaggtaagaatttgaaagcaaatcacaactaacttcgggtgggaaggaatgagtgggatgctgtcgcagatactgcaaaggtaagaatttgaaagcaaatcacaacaaatggcagcgcatggcgtgccgattagctgctgtcgcagatactgcaaaggtaagaatttgaaagcaaatcacaacggatgttggattgtccttactgaaagaggtgctgtcgcagatactgcaaaggtaagaatttgaaagcaaatcacaacaaaggtattctgttatgggcaacagtatttgctgtcgcagatactgcaaaggtaagaatttgaaagcaaatcacaacggatgttggattgtccttactgaaagaggtgctgtcgcagatactgcaaaggtaagaatttgaaagcaaatcacaacggtttctactaatttatacacatgactttgcttacccaagcgaaagctaatcatataacagtcagttttgatagattcgtattaataactcgcgaattagtaatactcatcaatcatgtgtaggtagtttacagaactctaccaaactctaccaaactccaaatgcagcctttttcacttcggtggtctatgctgcctaaccacgcctacatatgtaggtattcgctacaaaaacacatagtatgaaagtttaagtatatacgcttccaactattaagttaaacaataaatgctcgtctattccgagccgccaattattcctaaccattttacgtgaggcgaataataaaggactcacaactcagtattagatactattgactgagaaatccagtgtatgtcctggcggtttatttccaactatatttactgatcatcttcttaaagataggaatatcagaaacagatgcaaaaagcaacatgcaacaccttactttaattgcatcattcccaaatatctcataaacagatttctcgttattgtaaacagcttcagtagcctctattaacctttcccttaaaataggattttcaagataggcttcagcttcatccctacctcttattccaaagtattcggcattgtaactactgcctaaccccaccatttgagggaagataaaccatacccaatgggttttcttctttccagctttaatttcttctaaagctgtttcataagtatcccacttgttttgggctgtaatgaagcgatttaagccctcacacacagctcttattgtaggaacaaaatcttctctaaatcgacctgtttctctgtcgactaataagtctctgtcccccaaagccaaccaatcggcagttttgttgatgaattctttatttgtattatctttcttactcatttagatctacgttttaaaagtttacctccattatatagaaagggattcatctaggatagctgtcgcagatactgcaaaggtaagaatttgaaagcaaatcacaaccatcttgggatgtacctgccgaaaaacttcgctgtcgcagatactgcaaaggtaagaatttgaaagcagacacaatgcattaataattctgtgttgaagtcgttgggattactgtggcggggccaaaccatgtgcgtcgaaaaaacgaggctttgtccgatgctggccgtttctgatgggccggaatgatgtcgtagccgtagtcgccccggtgtggagtgataagcttggccggcacgaggctctcgccttgctggatatgggagagtgggatgtggacagcacgctgttgtgccctatgtccgaactgcacggcctctttatcgcaggcccacaagcattccggcgtccatgtccggtggttgtttcgtttagggttggcggggtgggggactgttgtcggcgtgggcgtctttttgagtctttcgtcggtgagtcgggggtcgtcgtgtgtgggtgcgtaggagtcgtcctcggagccaggcgaaccgtgtgcctgctgcgggcggcgagctgcccaatgaggcatgcaggcgcgcgtgggctggcaggggttacaactttttaactgacagtgcttgtctataagcatagaaatgccgacctttgcgccggtttttgaacagctggaatgtagggctggcttccgtcccatctcgccgcctctttcggcaagtcccgccatcgggcggggcttttcgggacaatggggccgacacgcttcgcccctccccctttcctcgcagccgcgacacgttcacaaggtctgtcttttttgtgtcgcgcgattccggcgtaaaagaagaagcatgaaaataacgaaactgatttttttcctaatgacaatggtggcgtccgtcctcgctgcggatgctcagcaggtcggcgacgctacctattattccaaccggcttcacgggcgatacacgagcgacggctcccgctatcatcgcgacagcctcacctgtgcccacaagacgtatcccctcggcacgtatctgaaagtgcgtaacgcccgcaacggtcaggaggtaatagtcaaggtgacggaccgcggcccctaccgccggggggctatcgtggatctttcctatgccgccgccaaggagatcggcatgatcgcagccggggtcgtcccggtcgaggtggagcgggtggaatcgccatccggctacctagccgctcctgagggcgagacgctcaggctgccggagctccgcgtgcgtgacgccgcaacgggcgagtattacaccgtgtcggaatgggctcgccggaatgaggaggaaaaggcgcgggctcgcgaggcggaagccgcgcgccagcgtgcacgctatacggccaaggctcagaaggagaagcggtggcgcgttctggctgacaaggtgacggcccagaacgccttgaagggttcggcttcgacggggttgttccgccgcagcgcagcacccgtgcagtgatgtcgggagtgcggagcggcgggacgtgtcccgccgcgtaggaccacaccttgtgggcgacaattccggagaggctatacgccgcggggttgtcgccccgcatgatttttccggcagatagtattgttatttcacccatatgcaaattttcaagatatgagcaagaagatgaaacccgccacactttgtgtgcaggccggctggacgccgaaaaacggcgaaccacgcgtgctgcccatttaccagagcacaacgttcaaatacgatagtacggaacagatggctcgtctgttcgatctcgaagagtcgggctatttctacacgcgcctgcaaaatccgacgaacgacgctgtcgcctcgaagatcgcacagctcgagggcggcgtggctgccatgctgacgtcaagcggtcaggctgccaatttttatgcagtcttcaacctctgtgaggctggcgaccattttatcgcttcgagtacgatttacggcggcacattcaacctcttcggcgtgacgatgaagaagatgggcatcgcctgtacgttcatcgacccagactggaccgacgaggagatcgaaaaggccttccgcccgaacaccaagtgctttttcggcgagaccatctcgaatcccggcggccatgtgttcgatatcgagcgttttgcccgtatcgctcacaagcacggcgttccactcatcgtggacaacacgttcgccacgcctgttcactgccgtcccttcgagtggggggccgacatcgtgacccactcgacgaccaagtacatggacggtcacgccacggctgtgggcggcgccattgtggacagcggccacttcgactggatggcccatgccgacaagttccccgggctctgcctgcccgacgagagttatcatggcctgacttatgccgaggccttcggcaagggcgcgtatatcacgaaggctactgcccagctcatgcgcgaccttggatccatccagagccccgagaacgccttcctgctcaacctcgggctcgaaacgcttcatctgcgcatgaaacgccactgcgagaacgcacagcgggtggccgaattcctgcaagccgatccgcgtgtggcatgggtcagctatgccggtctgccgggtgacaagtattatgagctgggccggaaatatctgcccgagggaggatgtggcgtcattgccttcgggctgaaaggttcgcgtgaggataccgtccggttcatggaccacttgaagctcatctgtatcgtgacgcacgtggccgatgcccgcacctgtgtgctccatcccgccagccacacacaccgccagctcagcgacgaacagctcgtcgaggctggtgtgcgtcccgacctcatccgtctttcggtgggcattgaggacgtcgacgacatccttgccgatttgagccaggcgcttgacgaactggcctgatcgtcatctgatacatccagaggcaaagcacccgtttccacaagagggagacacaagtcctcctgcgtgcggaaacgggtgctttgccgtttttgacggacagccgtccgctttttcctctcagcaggccggcgcctgctcttcggcccagcgggctttattctctgagagccagggacgcagcgtccgcctgccgttcccaatcaagcagaaagcgcttggctgcgagaccgcctccgaagcccgtcaggctgtggtcgctgccgatgaccctgtggcagggagcgaagatcgaaatggcattggcgccgctggcgtttgccacagcgcgtacggccgtggcgaggccgaggcgccgggccagttcgctgtaagaaaccgtgtggccatagggaattttgagcagctctgcccagacttccttttggaacggcgtgcccacgaagagcagggggatgtcgaacgtatggcgctgtcgggcaaagtattcgtcaagttgatgcgcagcctcgcgggtgacgtcgctgccgcccgtggtgtattccgcagcgagcgcccgttgcagccggcgggcgattcgtccgggatgtttctcgacaatccaattgcaaaggcatagactcccgtcgtacgacccaagtaacaggtcgccgcaaggcgaacagtagggttggatggatatcgtttttttcatctctttgtctgtgtctgaggaggtccggctgctttttcttccgggtgtacggaaggttgccgggggaatgcgatgttacggtagcaaagatacgcaaaggaaagagccggggaaagaaaaagcccgctttttcgcagacctgtcagggccgcctccccgcttcgtgcggaaagtaggtgattgccaataagggaaagggccgaaatgcgcataaaaaccgtagtcatggcacatggcggtgaaacggttcagtcctgagtgattttgtattacttaatcaaactttcccttttttcttacggaggaaagtcctaattttgcccaccataaccataaaagttaaacggggaagttgtgtccaagtcaggccgtcacgagcagtagataggctcagtcttgccttttggacgctcttttcaaatatagtttaaccttattcttagagatattacggtccttcaataaaaagcatgacagcatatatgacaagcgatacgatttgtgcgcccgccacagcatcgggcggcgcgttgtgcgtagtccgtgtggcgggtccggaagccatcactgtggccgacagggtctttacgccccggcatggggaagccctgcgcgggcgggcaggttacacgctggtttttggtgatgtgcgaaggtccgacggcagcctggtcgatgaagtcgtggtcagtgtctttcgtgcgccgcattcctatactggcgaggacagcgtggagatttcgtgccatggatcggcctacatcgtgagtgagcttatgacacggttggttgaagcaggctgtcgcatggcccgtccgggtgaattcaccgagcgggctttcctgaacgggaaaatggacctcagccaggccgaagcggtggccgacgtgatagcctcgacatcgcgcgcggcgcaccaagtggccatgagccagatgcgcggtggattcagcagggagttgactgcattgcgcgaccgactgttgcactttgcctcgttgatggagctggaacttgacttttcagaccatgaggatttggagttcgcagacagaagcgaactgttggcgctcgccgaagagattgaaggggtcatagg

SEQ ID NO: 2239 - DNA, 24143 bp, synthetic construct
  source 1..24143: mol_type = other DNA
  misc_feature 1..24143: note = Synthetic
acttgctttaaactccataccagtaagttcgcttaacttctttgcacacactttagggaaacctggtgcagcatttaagcctgtaccaatagctgttccacccatatttatttcgaggaacatatcggcactcttgtttaaattctctatttcggcttcgagcagattggcaaacgcattaaattcttgtccgcttgtcataggaacagcatcttgtagctgtgtacgtcccatttttatatcgtgcttaaactcttcagcctttttacggaaagatgctacaagctttgctagtttctctactaatgttttgttcatacgaagcaaagctacatgtatagctgttgggtatgcatcgttagtagattgaccgcagttagcgtggtcgttaggtgcacaatatttaaattcgcccttattatgaccaagtatctcgcatgcacggttggctataacttcgtttgcattcatatttacagatgtacctgcaccaccttgtaccatatcggtaacaaaatcttcgtggaactttccatctataatttcgcgacacgcctgtgccattgcatcacaaatttcgttgttaatttcgcctaactctcggtttgtttcaacagctgctagcttaacgtatgccattgcgataacgtagtctggatagtcgcacattctctttccagagatatgatagttatttactgcacgttgtgtttgcacgccatagtatgcgtttgctggtacttgaagttcgcctaaaaggtcgctttcaatacggaagtttttgttgtttgtttcgtttgccatttttatatgcaacttttattaattgaatgttatgtttatgttagttctgagagaatgtttggaaaatctctaaatacattgtagaaatattctttactatactttgagcttttcgcgattctattctctttgccaggttctttgtcagatgtcgtagccaataatgtgtaattacagcctatctttcttttcttcgctcggcaatgcaaatgtaccaaattattagttggtgtgggaagttttataatgaaacattttaatgttagcaatatttaactaatatgtttactgcttgataaacaacagaatgtgaatataatatatagttttgataattatttgttttattttgtgcgtgtatgtatttcagatggtatgcaaatatattttaatctttgcttaatgttaataccatttttattatcaaaaagtaaaatcagtgctatagatatatgcagaattggttgtgtattataaaagtagatatctgttacgaaaaatatagtgtttctcagtttcttttataatgcgatttacaataatgaactgtatgcgagaaaagcatctccccacagagagatgcttatgcgatgcgcctttttaaaaggctactttttggttgtgtatatgttttattttgtattaactactttcacagactttgttgttccgtctgtatatctaacggttttaatggttaagcctctaccaattttagacaatctgcgaccagaaaggtcaaaataagtttcgtttacaacgtctttgttcgtatctgttgctactgatttaacacctgcggggtcgtttgttcctacggtgagtgcatcaccacagtagaagagtttattgtcgctccaatagcctgcaagaatcttaattttggcattccctgcttcgtctttctgaaccattgtgccatctagttttatggtattaccgtcaataatgtatttaatatcgccatctacgggtgtaaactttccgtcaatcaattccatataacctacttgcaatccatattcgccatcgtcagcctttccgtatatcaagaattgtccagaagggatagttatggtgtttccttcttttgtgccttttatccatgcgttgagcttatcacccttaagacatgttgcatacgacaaggcatattttatgtaaactgttttaccatcagcatctgtaacaacaactaaatcgcctacgccttctttattttctgctaatttcttgagatcgaacatactaatttcagcttgttgcgtctctttgttcttcgtaatagcaaacatatagccactaatgcgtttgtagtttacggcagtacctgctggttgttctttaatgatagttggagcactttgtgcttgggtttgaatactaaagattgctgcgagagcaaagaataatagttttctcataattttaaaatgtttaagtaatacgatatatgtgggcttctcccacgaactaaaaaatatattgacaaatagatataaatgaaagtgtatatgcttacttttctacatttgcaaaattaaacaaagttttatgttataacaaatttttatacttcaattttgatttgtttaacatattcttaaccagtaaataatgtaataaatttcttaacaaagaccattagttgtgaaatgacggtaaatgttctgaacttgatataagtgcaccgaagataggttcaatagaaaacgaatagaacatttgtaaactgtgtttgcaggtatttgcaaatggaataactttctctgatatttataaaaaacagccaaatgttagtagcttttgttttagatatctgtcacgttcgtctcagatatctgtcacgttcgtcttagatatctgtcggttgtgttttagacgtcatagcaaattagaacctttatgaggttatgttgtaatggctgaaagttgtttttttagatgaagctgaggtaaactttcattctgcaatgtttcaattttagtgctattataggcgtgtgcacaataatatgttgccaaatagtttgttatatattgtggcatataatgatggaaattattacattcgctcactttttcaacgatattctacatcttctatattgagccaagatatagcgtgtcaaacttttattaataatatcttgttttttttattttatttaatcttttattactatctttgcacccgcaattaggttcgcattagcgattaatagagaatcaggtgagaaacctgaacagtccagctgctgtaagtcgtcgttgtagacacaaacagataccactgggtagatattatctgggaaggtgtttgtgatcagacgataagtcagaagacctgccattgcgatacttctataaagcttctgtgggttaggttgagaagtagcaaacaatatattattataacacaccaattatttcggctcagagcatacgctatagagtgtttgtaaaaaagctgaaaagcatatctgtatgctatgtatgctatagtgtgcagaatgtaaatgattatagctaaacaggtaaaagagatttttaattaattatatagtatttatgaacacaaaattactattagtgtcggtatttatggcactgtcggcagtatctacgcccacaatggcacagagcacgcctacagagattaatatatcggacactaaacaaacaattactgttggcgacaatagtattaagttctatgacgagggaggacctacagggcaaactactcctcggactggtacagtgaaacgtgttagcgaaattacgtttgtaccagctgataatgcgaagaaagtaatggtgaacttcactaagatggacatttttaagtctacattaggcgaagcgaacagtcagtttgtaaaggtatatagcggaaaagaagctaaaccagcaaacttgctaaaaactttcacgcagaaagaaacaggcattgtaaggtctacagccgatgatggtgcactcactatcgtcttcgagaacgattatgcaatgaagagagatggttgggaagccatcgtttcacagttcacaccacaacaaatgaaggtgaatggcttcgatgtaaagcagttcactgacggtactgtgtgtgcaggcgataagggacagcagatacttagttttaacattaaagctatagaaactctaaatccgcttacaaccactagctttaagtttaaaaccaatggtacgcaggcacaaatatcccacgccacactctactcaacaaaagcatcagacaagtttacttcagcaacgaagataggcgatgtagatgtgaataacgatgaattcgaaattaccacacaagcaactacactctttgaaggcgacaactggttctggctgacgtacgatataaatgcaacagcagaagaaggacaaaagatagatgcagcgcttgtgagtgccactcttagcgatggaacacacgcagttgctaatggcgacccaaatggagatagaactgtaaaaaacattgtagagtttgtagcaggcaacaatacacgaacagtaaacaacaaacttacttttaaaactaaaaattcgagcgcttatagcaaacgctacgaaggttcaacagacgaacgtactatgacattcttaccaattcatacgggtaagaaaatacagatagacttctctcgtttcgatattatgtattcaagtagtacaacttatggtgttcgtgccgaatttgcagtttatagcggacacgataagacaggaacactactttggaaactcgatagtcacgaggcagcatcagtaggtcctaagaagattctacgttcaacggctaccgatggtgctttgacagtagtttttaatcctaaaacctatacatcttcttacacaggcgatggcttcgaagcagaagtaaccgaatacgaaagtaaaccactagcgttcaaagaggctgttgtaaatcaactttcaaccgatattgctgcagctggtgctaaagatttagatattatcagctttaatgttaaagcagaaggagatcaaggcgaactaaaactacacggcataacactaaaccttaaagattcaaagactgcaataaacaaggtaacagtgttgagcacaggcgataatgaagctgcaacaaactctgcgaaggtagttgcaaccgttaccgatttaggtacaaataatacactcaacattcagtttaccgaaccacttgcacttgtagaaggaaacaattggttgcgtgtacgctacgatacaaaagaagatgctgaagctgatacaaaactcgacgcagcacttactacactcgacttcggtgcagcaaagcaaaatattactgatggagatcctacaggcgaacgtgttataaagaacattgttgtgttccacaatggtgagaatgcaacaaaggttatcgcaaatggtagttcgttaatgttctacgatgatggcggtgctaatggaaaagaaacaaaagattttgatggaacaataacatttgctcctgcaagtccaggttatggtattaagctcgtagctaaacaatgggacgtagccggtcgtaatagaatgtatatatattatggtggtgagaagaaagataaagcagaccttgagtttagtcgttatgataagttagaacaagttactacaaaatctacagatggtaaactcactattcgttataccacaacttatgcaagcgatggctttgcaatagaagttagcagcgttaaactctctgaacttgccgtagcttctgttaagacagaaagcgttgcaacagaaaaaagcctgaaaggtactaccgatttcgctatgatgcgtgtagacgtagaagcaacaggcgactatggtactgtagatattaagaagtttaatgtaacagcaacagatggtactattgttaagaatgtaaaggtgtatgcaaccggacaagtagatgctttctcaccagttaatctcttcggacaaactacaacaagtccttacgaagttactggaaattacacaatcggagatcgtggtatataccatttctggattgcttacgatcttgctactaatgcaaacacaggcgataaagcttcggcagaacttacttcaattgtaaccaatgttaaaacagaaactcctgtatctgcagttactgccactactacgattaaggctggtaagaacggaacattggaagttggtatagataaggaatataagaccatacaggcagctatagatgcattgcacgatggtattgacggtcctgtaactatcagtattcagccaggcgattacaaagaaaatgtacttgtacctgcaattgctggtatgtcggcaaataacacattaaccattacttcgtctactggtaagtactctgatgttaagattcacaacgataagtatgatgcgaatggttactctgatgataagatggcaaaagagataggtgtatttacttttgatggtgcaacctatactactctgcgtggtgttgatgttacaatagatggaaatgtaaaatacccatcagttgttcacgttcgtaaccagagccgacatgtaactgtggaagattgctacattcatgctaaaatgactactgactatcaaagcaagatagtgcttgttaatatgtatgcacttaacgaagccaataagaacaacgactacttcacattgaagggttctactctggaaggtggacagcaaggtattaacttaggtggtactagctatgtagcgttaccaaaggaagtaggtggaaaggttcttaacaacacatttaagaataatggtagcttcgctatctatgttagtaaagaggataacgccgagattattggtaacactattatcaatacagaaagcgataaagccgaatttaaagctattgatataacttctaatggacaagttaagatagaacagaacaatatatacttaaagactaaaaagtattctggtgctattgatattcgttctattgtggctgatgcggcaacgcctgcaactgttgttaataactctatcataaacgagacaagcaacaacagatcgtatggtattatgctcgatagtagagaaccatcatcgaacattaattttgcacacaataccattttattccgtggtacagctaaagaagctacattgttggaactaccaaccaatgcaactaatgttgtggttactcagaatattcttcagaacgaggctggtggttatgtctattctatcaatggaaaggctgctattgatgctattaagttcttaagaaacgatgcctatacaacaggagaagtatttgccacatacggtacaactaaatatgcaaactttaacgattggaagactgcttctaaagaagcaaacagctacaacgataaggttgaattcttaaataccgaagtgttagaaccaaaagaagtaggacatttggtaaacacagtgttgcttgactatgctaagactgatatcaacaacaagcaacgcaacgctgaccacccaacaatgggtgcctacgagttctcttctgaagttctaatacctaaatcggtagctggttatcctgaagttgtgaacattaccgacaactctgccgatgtgaaaataaaggcagacgaaaatggtaaggcttatattcttgtaaagaagcaaaccgaagaggctccttctgtagacgatgttaagagcaatggtactactatctctgtaagcaaagacaccgaaactgtgcatgcgcttactaacttaacaaaggacgagacttatgtggtatacattgtttacgaaggtacgcgtggtggcgatagtaaggttgaagctacacaaccattcacagttacaaaaccaacacctataccagaacctgtagttactacagagaatataactgtagaagcaggacaacctgcaaacttgaaagctacagttaccagtggaaccgaaccttacaccataacatggtataatggtaaacgtcagaaggtagaaaccaacgttgttcctactcagtgcgaccaatacactgtagaggtggtagacaagaatggtaagactgcaaaggctgtttgtgatgttattgtaaagggcaaggctgtaacagcaacgctcgagaacctttacttagacagcgaaagctattggaacggcagcaagggttgtggctatttcttaagtggttcgtataagttccataatggagcagacgataaatatagttactattacgattgtatgtattctaaccaaactgcaacaacatttgttggtttacaagaccaatggcgcaatgtagttggtaaaggttacgataactctgaaaactatggtgttgtatatccgcagcaaggtactattgatgttctgaataaagaaaatggcgatagtattcgcggtttctatattacgaacacaccttatgcgtatagttctataaagaatggagattctatgtctggtgccttccagaagggcgattactttaaacttattgtgataggtaagaaagccgatggtacaaagaaacaggtagaatactatcttgccgactatcgtgcagagaaagaagccgaccgctacattgtggatacatggcagtgggtagatcttagctcgttgggcgaagtgaaatcggtatcgttcaagatggaaggaacaaagaaaaacaattatggactaaccacacctgcttactttgctttcgacaactttaatggtacacgcaacgaaaagatgggtactgctattgcagcacagaaccaacctgtagacgtttctgctaactttacacctgatggtagcaatgccaccattaagtatgctgttgtagaactcgtaccaagcaccactaaggcgcaagttactatagacgaggctacaggtaagcttaccattaagggcgaaactaacgaaagcttctctgttgttgtaagtatgacacaagcaggaaaaacacagtatgtaaacattcctgtaacttatacttctggcattagtacacttgccgaagacaacagcaatgcaactgttagtgttcagaatggcgaaattgtagtgaatggtgcagccgataactacagtgtagaagtatactcaacatcgggtatgttggtaggtaaggcagaaggaacagcaaacaatgcagttcgtatgccaagcactgccaaaggcttatatattgttaaggttattgctggcaacaagaaaacaacgaaaagtattcttgtgaagtaaagcacaacactgctatacaaatattatttgggctggattccgtacataggagtccagcccattttagtttacaacgaagtgtgttcaacagccgttataaaccatagatagttacaattagtccgttagctactcagcagatttttgtttttattatagaacaaattgataaactttataacgaaggcatagcaggctaaagtaaggtagaaaagcaattaagaagactgccaagagggtgagaactgaagaaaagaataatacaagcaatatataaattgtattatgctctaatgaataacttagcttaattctatcaatattagatattcattaaccaactttctttgccaatattacatcttttttgttgcgtgtaatgtgttgttgttttcttctaaatacgagcataaagtttcagatatctgtcgtgttcgtttcagatatctgtcacgttcgtctcagatatctgtcgtgcgtgttttagatatctgtttttattccccctgtaaactaatacattttctttctacgaaagtggtgtgcatacttgtttaatcttcgataatttataaagaacttagtatgtcttatggtattgttgcgcatattgcaactctttataccgcaatagtagtgagctacacacaactataaaagctataaagaaagctggtaagaaaacattataaagaatctcaagctaaatatccctaatctaaaatatacatataataggcaatagctaagacacgagcataaaaaagccccgttttataggacgaggcaacctgatgttctcacaacggaattatccttattgtgaatgctttaaaaattagtactgcaaagataagggtttattacacaatgcgcaagtttagaataatattttttatttaaattaaaataaattcgtaactttacgcagaatatttaaacaatcgattaagacatgaagagaatattaggattagatttagggaccacaagtattggttgggcgttagtgaacgaagctgaaaataataatgaaacatcttccatagttcgactgggtgtaagagtaaatccactcactgcagacgaaaagagcaatttcgaaaaaggaaaagcaatcactactaatgcagaaagacaaaaaggacataccgcaagaataaatcttcagcgttataaacttcgccgacagaacctttataattgtctgaaagaatacggttggtttggcaataatgcattgttcgaagagggcaaagcgtctacttttgaaacttataaacttcgagcaaaggcagctgaagaagaaatatcgttgcacgagttagctcgcgtattgtttatgttgaataaaaagcgtggctataaaagcaaccgaaaagcaaacaacaaagaagacggacagcttttcgatggtatgactattgctaagaaactctacgaagaacatcttacgcctgcagagtattcacttcagttgctaaataaaggcaaaaggtttacgcaaggttactatcggtccgatcttaacgcagagttagaaagaatatggaacgagcagaaaaagtattatccagaaatactcacagacgagtttaaacaacaattaaaaggtaaaactaaagtaaatacaaacaaaatttttcttgcaaaacatcatatctactctgccgatttaaaaggctcagataagaaaatgcagtctttgaaatggagagttgaagcgttacggcaacaagttgataaagaaattttagtttatgtaattagcgatttgaatggacaaatagccaatacaagcggactgcttggtgccattagcgatagaagcaaggaactttatttcaacaaacaaacagttggacaatatctttgggcttcgttagaagaaaatccgcatatcagcataaaaaacaaacctttctatcggcaagactatttagacgaatttgagaagatttgggagacacaagcagcgtttcataaacagctaacaccagaattgaagcagaaaataagagatataatcatcttctatcagcgtccgttaaaaagcaagaaaggtcttatttctgtttgcgaattggagcagcgcaaagttaaaacggtaattgatggaaaggagaaagaaataacaataggtccgaaagtagctccaaagtcatcgccagtattccaagaatttagaatttggcaaaacataaacaaccttttgcttataaataatgatacgaacgaaaaacgttcgctaaatgaggaagagagaaacttgttgtatcaggaactaagcataaaggcaaagcttagcaagaccgatgcgctgaaagtattaaataagaacggtaagcaatgggaacttaactataaggagatagaaggtaatcgtacacaagccattctcttcgattgctacaatcgcataataacactaacagggcacgaggagtgcaatttcaaaaagttaaaggcttcagagattcgccattacgttacaaccattttcaagaacttaggtttcaacaccgatattttagactttaatccattgttagagaagcatgagctggaaaagcaacctatgtatatgctgtggcacttgctatattcttacgaaagcgataattcgcgaacaggcaacaattcattattaagaaagctagaaacaacgtttggttttccagaagaatatgctactgtgctttgcgatgttacttttgaagacgattatagtaatctcagtgtgaaagcaatgcgcaatattcttccttatcttcaggcaggagacgattacagtcaggcgtgtgcacatgcaggttataatcattcgcgtcgttcgcttacaaaagacgagttagaggaaaaggtatataaggacaaattagaactgttgccaaagaacagtttgcgcaatcctgtagtagagaaaatcctcaatcagatgattaatgttatcaacacaatcgttgcagaatatggaaagcccgacgaaattagaatagaaatggcgcgcgaactaaagagtagtgcagccgaaagagagaaaataacccgtgctatcagtcaagctaatacagaaaatcagcgtatacgtgatatactggaaaaagactttgcactttcttacataagtcgtaacgacattataaagtataaattgtatgaagagcttgaagcaaatggctttaaaacattatactctggaacgtatattccgaaagaaaaactattctccaaagacttcgatgttgagcatatcattccgaaagcacgcttgtttgacgattctttctcaaacaaaacacttgaagcacgcaatataaacatagccaaaagcaataaaactgcttttgattttattaaaggagagtatggtgacgaaggtgctgaagtctataaaaagaaacttgatatgcttttgtcaaaggacgttatcagtaaagcgaaatacaataaactattgatgagtgaggcggatataccgtctgaatttatagagcgagaccttcgcaatactcaatacatagcgaagaaagcatacgagatattgagcgaacttgtaagaactgttacaccaacaacaggagaaataactaaccgcctgcgtgaagattggcaattggtagacgttatgaaagaactgaactttgaaaagtatcaaaagcttggtttagcagaagttgttgaagatagagacggaaggaaaataaagcgtataaaagattggactaaacgcaacgaccatcgccaccacgcaatggatgcactgacaatagcttttacaaaaccagccttcattcagtatttgaacaacctaaatgcacgaagcaataagagtagcagtatctatgcaatagaaaataaggagttacatagagatgataataagctgaaatttaatgcaccaatccctattaacgagtttcgtgtagcggcaaaacaacaccttagttctattttaatatccattaaggcaaagaataaggtgatgacgcagaatgtaaacaagattaaaacaaaacacggaataataaaaaagattcaacttacaccgcgtggagcacttcataacgatactatttatggtacgaaaaagcgtcctattataaaaaaggtgaaggtaggtgcagcgttagacgaacttacgataaataaaataagcagtcaggctattcgtgaggcccttcttaaacgtcttagcgagtacagtggtgatgcgaaaaaggcttttactggaaagaatacattagagaaaaatccgatttatctgaacgctgggcgaacaaaaacagttccctcattggtcaaaacggtagaatgggagtctttccaccctacccgtaagctaattgataaagatcttaacgttgacaaggttgttgataaatgcataaggaatattctgaaaacccgcttagaagaatttaatggagatgcgaagaaagctttcagcaacttggaagagaaccctatttatatcgacgaagcaaagaaaatagcattaaaacgagttagcatagaaggagttttaagtgccattccattacatacactgaaagatcaagcaggtaaacttattattggaaaagatggaaaacctgtattaggtaattatgtacaaacaagtaacaatcatcatatagctttctataccgatgaaaaaggaaacttgcaagacaaagcagtatctttctttgaagctgccgaacgtaaatcgcaaggtcttcctatcgttgataaaaactataatcacgataagggttggcgtttcttatttactatgaagcaaaacgaatactttgtgttccctaatgaagctacagggtttattcctacggaagtgaatttaatggacgaagccaattatgatatgataagtccaaatctatacagagttcaaaaggtgtcaagaatcgagaaaggagcgtctacttcaagggattactggtttagacatcacttagaaactattctgaatgatgattcaaggcttaagaactctgcgttcaaacgaataaattcattaaagcctttagaaggtatcattaaagtgcgtattaactctattggtaagatagttgcagtaggtgaatacgattaatatagatagcttatgataaagaaaacattatgttttagcaatcctgcctatttaagtttacagaatgcacagttagcaattcgtttgcccgaagtagaaacctgtagtaatatttctgatagctttaaaaaacaatcggagcgtactattccaatagaagatattggagtagtactgttcgataacaaaagaataaccattacttcgtctctattagaagctttaatagaaaacaactgtgcagttataacttgcgacaataagagtatgcccattggtcttctgcttcctttatgtggcaataaaacacaaagcgaacgcttccgagcgcagatagaggcatcgctaccactaaaaaagcaactatggcagcaaactattaaacagaaaataagcaatcaagccaaactattaagcagatatactaaggttgatactggttgtatgtacgtttgggcagacaaagttagaagtggcgaccctgataattttgaagcaagagcagctgcatattattggaaaaatatcttttctgatattcctaactttgtaagaggacgagaaggagaacctcctaataatcttttaaattatggttatgccatattacgtgctgtagtagcacggtctttagttgccagcggattgcttccaactttaggcattcaccaccataataagtataatgcttattgtcttgccgatgatgtaatggaaccttatcgcccttacgtcgatggattagtcttagacataatggaatcaacctacgattatagcgaacttacgaaggaaattaaaatgaaacttcttgctattcctgtgctcgatacaaccattggaaataagaagagcccattgatgatagctacacaacaaacaacttcttcgctttacaagtgctttagcggagagcaaagaagaatggtttatccagaattataaatactatttggtggaaacttatagatttagtcaatacagaactatgtggttaatggtattctttgatttacccacagatacaaagaaggaaagaaaggctgctgctgtctttcgtcagaacttaataaaagatgggttcactatgtttcaattttccatctacatacgccattgtggtagtaaagagaatatggaagtacacataaaacgaatatcttcttttattcctgcatacggaaaggttggaattatgggcataacagataaacaattcgcagaaataaaactcttctatggacagaaaccacaacttcctaaggctccaggtgcgcagttagaactcttttagtctctctttgaaacaaataaagttccattcgtttaaaatggaactttattttgcttgcatttttctatctctcgaaatgctcataatacattaatactaaatgttttaagccaaatgagttgtatatgcctatgcaaagatactaattttaaagcaaatcacaacagaatgctatcaaatgaatactataagctggttgtatatgcctatgcaaagatactaattttaaagcaaatcacaactacttttttattgattttacatactcatcagttgtatatgcctatgcaaagatactaattttaaagcaaatcacaacacacctaatcggtgattttttaagcgtttcgttgtatatgcctatgcaaagatactaattttaaagcaaatcacaacaattgttggtttattgaatacgaccaatccgttgtatatgcctatgcaaagatactaattttaaagcaaatcacaacgcatattacctaatgccatatatgggttaagttgtatatgcctatgcaaagatactaattttaaagcaaatcacaacaaaatccatcttactaaaagcatctatatggttgtatatgcctatgcaaagatactaattttaaagcaaatcacaactgcgaatatacggtagcgaccagccatacgttgtatatgcctatgcaaagatactaattttaaagcaaatcacaactttaagttctgtgtcctcctgcaagttgagttgtatatgcctatgcaaagatactaattttaaagcaaatcacaaccgtacgaacaaaatcatctaccttaaaactgttgtatatgcctatgcaaagatactaattttaaagcaaatcacaactctttacacctcttacatcttccatataaagttgtatatgcctatgcaaagatactaattttaaagcaaatcacaactcgaacttatcatattcttctttttgagcgttgtatatgcctatgcaaagatactaattttaaagcaaatcacaacccattaatcataatattaatatataaatttgttgtatatgcctatgcaaagatactaattttaaagcaaatcacaactgaaaatactctatctataatctattttctgttgtatatgcctatgcaaagatactaattttaaagcaaatcacaaccactagagaagatgttggaaagaacaagaggttgtatatgcctatgcaaagatactaattttaaagcaaatcacaactacgactttcgggaactttaaagccataatgttgtatatgcctatgcaaagatactaattttaaagcaaatcacaactcagatgacaacgtatccgaactactgtacgttgtatatgcctatgcaaagatactaattttaaagcaaatcacaacgaacaaaggctacataaaatgatttgctgggttgtatatgcctatgcaaagatactaattttaaagcaaatcacaacatgctattgaagcttgtaatatgatacactgttgtatatgcctatgcaaagatactaattttaaagcaaatcacaactgccaaagaagttgataatctcgataagaagttgtatatgcctatgcaaagatactaattttaaagcaaatcacaacacaagtatcgggacataacgtcttcgatgagttgtatatgcctatgcaaagatactaattttaaagcaaatcacaacttctcattatggcagtgccgttgtatctgagttgtatatgcctatgcaaagatactaattttaaagcaaatcacaaccgtagggatagctttttatcttttcatctgttgtatatgcctatgcaaagatactaattttaaagcaaatcacaactatgaacgaaatatttcctcaatttgatgcgttgtatatgcctatgcaaagatactaattttaaagcaaatcacaacacctcccaaaatctaccatcagccctatatgttgtatatgcctatgcaaagatactaattttaaagcaaattattgctaactttcaattataagtgttatatttgctggaaataaatgttttgacaatggatatattttgtgtaatacttttctttttaatatcgcttgtgctgatgccgttctttacacatggtgaaccatggattgtaaagttgttctatttagcgctatgtgtatgctttacgccaataataggtatactaatatacaggcatttcgctaaatagaaaaaattatgtcctttagtctataactgtatgttatactatatttgggcataatagatatttgatggctagaataagcagcctaccaaaggtctattactaaagcctgtgaggtatcagtctgtcgaatgtcattacatctaattgttatattccaaccagatataaacagaagggcgactctacatatttttggtagagccgccacaaggttttcatactattagtattctattttattagaactttcttgccgttgtgaatatagatgcctgactgagttggcttcgttatgcgctgaccagaaattgtgtaatagtaagtatttggattggctgtatgcttacttactatgttttctatgtttgttgtaactacatttactttgtgctttgtgtctgtcttctcactcgatatattaataaaggtggttgtctttatgttttctatatctacagtttgtggtgtacctgtaccaacactgaacacaaagtttacggcatcgttagaggttgttataagaaactcttttgttagccactttttaccgtctactgtttctatagttgttatggcatcgcctggccacgttcctttcactgttgtgtgtgtgccaccccatatccaaaagtttatagatgggtggacatttgtggtttgtgcacttgcccacgctgtgcctgcattgtcggcattcacatatacctttatattataaggtttaaagtctatgatgttatagttgcgcgtaattatattcttcaccgttccatctacaagtaagcctactttcagaacggttatacctaccggaattgttagttgctgcccattggttgcttttttgctatttgctgttggttcggtgccatcggtggtgtacacaatttgtgcattagcattgttgcttattttggttagtgttacgttttgttcgccatcgtaagtaccgcttgctaaattagcccatacaatgtttgctttattcttttctacgtagtatgcccaatggtatcctcctgttagcttctcccacctatttgtgtttgtgaaactcttggcaggaccaactacggttagcattgcaccgtttgttcctgtggtggtaaatgcataaaagtcggttccgttgctgtatttcactgccttgctttcgttgttaatgcctatgagcttgcgtacgctaatcatattcttaatatcgtttttatatgctttatagtgctttaggaatatgcatggcgtaccaggcattgcaagaatgtaggcatttgctgctaatgtatctttcttgatagggtcttgatgattattgccaccacggtcttcggtgtcatggttttctacaaaagttatagcatagcgtgcgtagttggcttcttttgccagacccacaccgtcgagtgcagcccaattgccattgtttacggcatcgcgaactgtataacgcaatggaaagtcgaaagcagcactggttggaacgccatctattttggtgctttctatccatgctttcactttgtttatatctccgtcccaatattcgcccaccgaaaactctggctgcgaagccttattgtatagtgctgtgaacttaccagcatagccttttaccatatcgtatcggaaaccggcatagccaaatttgtctttcagcatttgcagataggctttcacagtgttttgtacgtttatgctattatggtcaagatcgcgcatgccgtcccaatcttcgcctgagtctaagttggaactaagttgcactccctctttctgtgcttctgttaatgcttttccaccatcgtcgtttttggcaacatcttccgatgtcattgtgtacgtaacgttgttgtaggtttcagttggaaagtcgaaccaacctgcagtggttgctctatggtttatcaccacatcggctatagtatttatgccgttggctttaaatgtaccaataaggcttaatagttctgcctcgttgccaaaggaactattatagttgctaaaccaatagtagtcgtcatatcccatagatggcgtgttacgtgcttgtgcactttgtggtagccatacaagattgaagtatgcggcaaggtcttttgcttgtgtttcaaggtttgtccatttcgaatcttgatacgaatcccaatagaagccttgcagcattacgcctccatagttggctttccagccttgtgcaaacattgttgctgctatgcagagaagtgaaaacagagtagatattcgtttcataatgatgattttgatttgttttagttctaactgtttgtatgtttgcaaatgtactgacttattttgagttgtgtttcaacttgacatagaataagtagtaatattgttgcaaacgtttgcaaaagccttgtttgcttgttgcttcttgaatagatatatattggtggaatgataattaggaactgttgcaacgacagtcaaaaacgtctcttgtggtagtatttgtatgtaagcctggctatttggtacggtgaattaggtatgcgtacataatagtaaaaatattgttgttaatgtgttatagtagagagctataaatgcttaaacttgctgtgatatatgatatgtaaattacagatgtctaaagcgcaactgacagatatctgagacgaacgttacagatatctaagacgaacgttacagatatctaaaacaaaagcaactataatcacagattttttatatacataagcaatgcttttttctggcttttattaaacaatgggcagaaccaataatcttctcacctatattctactgatgctctatgaatagtatattttcttaagaaacataaaaaccacatagaattcatatatactataaagtgtctatagtatgtaagaactctatgtggtctatacgttctacaaatttttatttacacaaactaagccctttgtttgtctttaataatagatacagatagcgcaccaacaacgagcgcaccgccagcaacaatcatcatatcgctttggttagagcctacaagttgtaatataactccacccaaagcagcagcaataatttgtggtatacagatggttccattaaataagccaagataagcacccatgtgtccatagccttccagtgcattggttacaaaggtgaacggcattgaaagtatggcagcccaggcacaaccaataagaacgaatggaataaacataatatattggtcgtggacaaacgaagtcataacaaatcccacaccacctaagaagagagagaaaccgtatgcaaacttgcgatttttaaacataggcaacaccactgcccaaagtacggagcctattgcttgtatggcaaacaatattcctacccaatcgccagcttgctgatattttaatgttgccgaagcattgcttgcactcatgtctactccgaaacagttagcagcaaccgttcctgttgtataagtccacataaataagaatgcaaaccaagagaaaaattgcactaatccaaccgtccagaatgtagaaggcgcatttttcagcagatgaatccaattgcttttcgtttcattctcttctgtttttaagttgtgatattctgcgtattcttttggtggcatctccttaacctttaaagtggtatagagcacacatagtataagaatagctgcaccaacatagaacgaataaattacagagtctggcacaacacccttaggtgctttaatagatataccaatggcactaaacaaatatggaaaaacataaccaaccagcgaaccagcgttgcaaagaaaactttgtatggagtaagccaatcccttttgtttttcattaacctcgtcgcccacaagcattttaaatggttgcatcgccatattaatgcttgtatctaaaaacataagcgatattaaaccgaatatcatagccgttgatacagccataccaaacgaaccagcattaggcagcaggcacataacaagaactgcaataaaggcacctataaataaataaggtatgcgacgaccaaagcgagtccaagttttgtcagataaagtccctacaatcggttgcacaagaatacccatcagtggaggcaaaatccaaaaatagcttaagctatgtgggtcggcacctaatgtagcaaatatacgcgaaatgttagcactctgtaaagagtaggctatttgaacaccaaaaaaaccaaaactaagattccatagttgccagaaacttttgtttggacgagtctttaattcattattcatagtttaaagtgtgttagttgctatttgttgatagttgatttatatatttaaattgtaaattccatttatcgtgtagttcctctaataataagtctggtccgcacaatacgcttttctacagtgtcaagcggtaacgagccttccgccttatctatcaatatgcttgcagcctcttctcctacacgtaagccccgttgttctacagtagtgagcatagggtcgcacgatacagcacgtataccatttgtaaatccacagatggaaatatcttcaggaatacgatatcccaagcgtttgcacgaataaagtatgccaagcgcagtttcatcgtttacagcaaaaaaagcatcaggcgggttttgaaagttcaagagatcgggagtaatcgattccgcatcgctacgattatcgcacattcttattaattgctcatctggttgtataccatgtttcagcaaagcatcgcgatagccgttatagcggttctttcctatttccaaattcatagacaaaccgtaataggcaatgcgtctgcaaccagtattaataaggtgatttacggcagagaatgctcccatataatcgtcaataaccacacggctagcattaacaccaatgcttacacggtcgtagaataccaatggtatatgctgatctacaagaaactggaagtgatcgaacttggttgtattcttagcttgtgatacaattacgccacaaaccttattttcgtaaaacgatttacatatctttacttctcgttcgtagctctcgttgctttgcgcaaccataagctgatagccacgcatagaggcttcttcttcaattcctgctaatatagacgaaaaataaaagtgtgtaaattgaggcactataacgccaataaccttcaacggttgcactttgcttttgcgcaaagcttctgcaataagattaggagtaaagttttgttcacgcgcataacgctttatctcttcccgcttttctgccgaaatgcgtgggctatcctttagtgcacgcgatacagtagcaacggaaacacccaattcgcgtgctatatctttcattgttacattactctttttcatcgccaattcgtgaagcttattttctctttttcttatttctatggcaaaaatacatatttttacattatactttgatacaagtcaagaatttatttctatattaacgatgcaaacgtttgcactttttaatttatgtttttaacgaccaaaaagtgctaatacaaaattaacagcttatctttgcaacactaagttctatataaaggtaagaaaagaaaccgtattgtcctattacaaaagatgttacagcggttatattaaggataaaatttactcaatattaatactttaacaacaaaatgatgaagcaggtaaaatgcaaaactcctgtcaggatgctggcacttatgctcggtctattcctgtctatcaatgcctttgcgcaatcaactatcaaaggtatggtgaaagattcttctggcgaaccaatcattagcgcatcagttctagttactggaacccatgaaggtgtgcagacggatatcgacggaaacttcgaactgaatgtagcaccaggcactcaactaaccatttcttacattggatatattaagcagcaagttgctgcaaagaatggtatggttgttgttatgcagccagaagatgcacaacaaatgcaagaagttgttgtcatcggttacggtgcagtgaagaagagcgaccttacaggttcggttctcgcaatgaaacccgacacaaagaacaaaggtctcgtagtaaatgcacaggatatgatgcaaggtaagatggctggtgtgaatgttacaggtgaaggcggtactcctggtggtggcgcaaagattcgtattcgtggtggttcatcgttaagcgcatctaacgatccgcttatcgttatcgatggtgtcgctatggataatacgggtataaaaggtatgtctaaccctctttctttagtaaatccacaagatattgaaagcttcaacgtgttgaaagacgcttctgcaacagcaatctatggttctcgtggttctaacggtgttattattattaccacaaagaaaggacgtgtaaaccaacctctttctgtttcatactctggtagtgtaactgctagtattaagagaaaaactatcgatgtaatgaatggagatgaatatcgtaagtttattactgatatgt

SEQ ID NO: 2240 - DNA, 24143 bp, synthetic construct
  misc_feature 1..24143: note = Synthetic
  source 1..24143: mol_type = other DNA
tgcgcccacttttagcgttagcttatagtcggcaggatagtttgtttcgggaaatatcccttgcgtttcagctgtgaatgtataggctttattttttatttgtgctaatttttggttgttatagttgtcagctattctgttgtgcgtggtgagtttgatgtagttactgttctcatcttctttaaaattaggaagatagcgtgagtttaatagcttgaaatcctcattcgtaacctttccttctctgaaatgattgagaatatctatgaacttttggtcttgctgtcggaacacttttgtgagttctatggtaacgtactgtatgcgctgtaaagcccttgaaccaaagaaataaggtgtttcatagtatttttttagcaattcttcctcgtctgctgtaaccacaggcgtaagctgttgcaagtcgccaatcattaaaagttgcacgcctccaaatggtttgttgtgttcacgaaatcgtcttaacacagaatctatggcatcgagaatatcggcacgcaccatactgatttcgtcaatgatgagaaggtcgagtgtgcgaaatattttgcgcttctctttaccgtaatcaaatttagattttactctactttcgggtatgaaaggcgatagtgggagttggaaaaacgaatgaatcgtaacaccgcctgcattgatagccgctacgcccgtaggtgctaccacaacaatacgctttgtgctatgctccttaactgctttaagaaatgtggttttacctgttccagcctttcccgtaaggaagatactgataccagtatgttccacaaaatcccatgcgtttctgagttcttcgttcttttccatgattgttcttttatgatttccgaacaaatttagtaaaaaatagtgagttggacaaatatggtgggttctaaaaattagctttgttttaatttgcttttccttttgtgagcaaattgtcaatgagtaagggcgcatagcgagctatgcaactgcacgaattggcgatttgaaccaaaaataaaccaaagaaaaacaaaacgaaatccatatcctaagtatatttcttgcggtggtaatttttagaatctaccatatgtaattgataaaaatcaaatgaattgacacatggcaataaatcggcaatttgtggagtttcatttcttttctgtgccttcaaatattgtaattgttgtaactttgcacacacaaacaggataatgaatgacggagaacaaagggttctctatttaaatttaggagaaaatagaaatgatgacattaattttagtggtagctgtagttgctacaagtatttttcaggtaataaaaattaataagaacttagtttcatagttttatagatatagtggattgagaaagcaaaaccccattttcgtttttcgaagatggggttgtttttttagggtataaacccttttgaaatgcgaaagagcctgttttgagcttcaaaataggctcttttgtgcttcaaaacaggctatattgaaaaataaagtcgttggtttatctttgtgaaaaaaaaattattttattatcctttggcttgttagttcggaaaatatccttatttttgcatcgtatattaatgtgtacactattcgaaacaaaatggcttaaagtcatatattacggaggtaatttttagaaaccaccttttataaatacaaacccataaattgaataatgaaagaagttaggtgcttacgaaaactactattaattatagctttggtgttggtaccattgatagaaatacatgcagatgaattaaaccaaagcgaatttccaccgaaaagttcacctattgtttgcgatactttgaagcaagcgaacgataccattcccactgaaataaaagatactcttaaaatagataagatttcagatagtcgctttggtcggatagtgagctatactgctccgctttttgtagctggtatggtggctggtgggcaagatgctcatttccgaagtctacgcaatacctatctgccacagtttcatgaccatttagacgactaccttcaatattctcccgcagccgtcttggttggtatgaaagcgttgggtgtaaagggcagaagcagttggacacgaatgtttttgtcagatgctttttcggtagctattatggctggattagtcaattcgttgaaaatgtcagcccaagtagaacgccccgatggctcaaataaacgctcttttccttcagggcacactgctacggcattcatgaccgccaccatgctcaccaaagaatatgggcatcgcagtccgtggataggcattggtgcttatagtgtagccatagcaacgggcgcaatgcgtatggcgaacaacaaacattggttgagtgatgtcattacaggtgctggaataggcatcttatcaacagaattgggctattatattggtgatttgatattcaaaaatcgtggcttatattacaaaagaacggcagaaacattcgagaaaatgagcaaaccttcatttcttagtttaagtcttgcggtgggcattccattaagtagctatgatattgaaggagtaaaattgaaaacctcgtcagactgcatggttggaattgagggcgcttacttcctaaatccttattttggagttgggggtaggacttcgcttagtcgcatgcgtattattgtcaatgatgttaaaactgaagataattcagttgatgccttgaaattgggcataggagcctatttctcttacccactttctaatcgttggttagtgggaagtcgcttgttaccagaatttgtacattatcgccccaacctaaaatccatagaaacaagtactcattcaagaataggaataggcacaggtctttcgcttacttataaagccagtaaaagttatgccgttcgtgtcctatttgattacgacctcctgcctccaaatagcaaaaagagtggtgaatacatgcattttttagccattggaacatcatatcttattagcttttaatgaataaaatcttattattacggaaaaacaaaccatttttatatctgtaataaatatgtaataattttgtaggattttgataaaatcatagtaacgattctgtaatattgctctcgtacctttgcatcgtcaataaaaattcgataaataaggaatgaaaagcaaaaaaaaattagtagcaatcgctacgctacttttggtaaatttaaatgctatggcacaagagatttgtggcatggtgaaggattctaaaacaaaagaaccattgattggggctactatagaaatggaagggggtaaacttttaggagtaaccgatattgatggaaagtttttgctcaccaatttgaacgagcaaagctatgtattagtaattaaatatgtgtcgtataaacccaaaaaagtaagtggcatacgagcagaaaaagaaggtaaacaagttcttaatatagagttagaccaagacgaacaaatgttagtcggggttacggtaacagctaatggacgacaaacaacccaagcatcggttgtacaaatggcaaagaatagtccatttatgatgagtaacatttcggcacaagaaataacaaaaacacaagattccaatgctggtgaagttatcagacgtgttccaggaatcagtttgatagaagataagttcgtaatggtgcgtggcttatcgcaaagatacaataacgtatggataaatgggggagctgtgccaagttcggaagcagactcacgcgctttctcgttcgatattattccaagttcacaaattgataatttattagtggtaaaaactccctcagctgagtatcctgctgattacagtggcggctttatcatcgttaatacaaaggaaataccatcagaaaactcgttttcgttgagccttggtggtaattggaatacaaaatcggcctttcaagattttaaaagtaacaaaggttcgagtacagattttttaggatttgatggtggtttacgtagtttaaaaggtggaatcaatggggaattaaagaagttatcaggcgatttgaccgaccttttgaataacggttttaataataattggttagttaggactaaaaagccattaggcgactttaagttttctgccaattggaaccatcagtggcatattggtgacaacaagttgggtatgattgcagtggtaagttataacaacgagtaccgaagttaccgaaacatggaaaataatctttttggaatttacgatgctcaaaacgataaggaaaattatctaaggcattcgaaagacgaacaatttaatcacaacgtgagattaggtggtatgttgaatttaacctatctatctgccaatggaaatcacaaatttcatttaaaaaacatctttaatcagctcggcaatcagcgttatacttggcgagagggcgtgaatgcacagtcgaataaggaaaatgctgctgaagagtactatcgtagtagaagtatttttaatacgcaattgacaggaaaacacttgttgaatgaagacaaattagattggagtgtaggatatgcttttgcaaatagaagcataccagaccgtcgtcgttacttgatggacgatgctattgaaactgataaaatgggactttctactggaaacgatatttctcgcgaatggacgaagctaaatgagcatatcgtttcaacaggagtaaactacaaacaccaatttaattttaatggttgggaaccatttttgaaagtgggaggctatggagaatatcgcacaagaaagtataaaacgcgcgaatttatttacaattggaatgtagcatacaatgaaatgcccgctggattcagatatatggatttaccaaccttgctgagcgatgaggctaactttggtgagaataagctccatttgttagaacaaatgcatttccgcaatgattatgacggacacaacaccttgggagcaggctacattacggtatctttgccttttggaaagttaggcgtttatgctggtcttcgcttcgaacacaacaatatggagttggtttcgaacacaaaagacacggaaataagtcatgtaagtacttactataaaaccaatgatttcttcccttctatcaacgcaacgtataagtttaacgacaaacatcagttgagattgtcttacggaagaagtattaaccgaccagaatttagagaagtttcttcatcagtattctatgatttcgacctcgcttccaatgttcaaggtaatccaaatcttaccaatgcttatatcaacaacgttgatttacgttacgaatattacccaagcagaggtgaacaaatttcttttgcagcattttataagaatttcgaatctcctattgagtggacttatacggttgcaggtggtactgatttgatatattcttacaagaatgcgctttcagccaataactttggagttgaacttgatattaaaaagacacttgatttcatcggactttctaactttagttggtcgtttaatggagcattgataaagagtaaagtgaactttgagaaaggtgctaaagaagaaaaccgtccaatgcaaggtcaatctccttacttaattaacacgggaatattttataatgatacaaaaaatcagcttagtattgctttgctttataacagaatcggaaaaagaatcattggtgtgggacgcagcgaaggcacttcttcaggtaacgatgtaaattctcgtgttcctgatagctacgaaatgcctcgcaacatgatagaccttactgcatcaaagaaatttggtgaacactttgaagtgaagttaagcattcgtgatttgttggcagagaaggtttattacaaacaatttgcgaacgttacttatccaaatggtgaccataaagagataacagaagtttcacgttcataccaacctggacaaaacataggtatctctgcaatctataatttctaagataaaacttaaaaaaggaaataaaattcataaataaaatctcttatttaaaagcaaatattatgatgaaaaatttgaaaactttaggattcatggcaatccttgccgtagcaacaggattaaccgcatgtagtagcgatgacgaaactgttgtaacaccaacccagccaaccgcttatcaatggggtacagagggctctatcaaaacatgtagcaacgttctgtttaccaatggcaaagaagatgctaatggaaaagaaatcggtaatggcgaccaagaattcattttcaaaggaaaacaaaccttgaagcgtggtacctatttattgaaaggttgggtctatattgctgaaggatctgaacttaccattgagccaggaacgattataaagggtgataaaactacaaaggctgctttgattgctgaacgaggcggaaagttgatagccataggaaatcaaaaagcaccaattatatttacatctgcgcaagcaaaaggtagcagaaaacctggcgattggggcggaattattctttgtggacgtgctgtgaacaaccaaacggaaatgcaaattgaaggtgggcctcgcacaaaacatggtggaaatgacaatcaagataattcaggagcgttgagttatgtacgcatcgagtttgctggcttcccattcgagaaagataaggaaatcaatggcttgacacttggctcagtaggtagcaaaactcaacttgaccatattcaagtttcttactcaaatgatgactcttacgaatggtttggtggtacagctaatgcaaaatatcttatagcttacagaggttgggacgatgattttgatacagacaatggatttagtggtaacgtacagtttggtttagtaattcgcgattctaaaattgctgatacttcacagagtaacggcttcgaaagcgataataatgcttctggttcagacgtaaaaccttacacaacagcaaaattctctaatataacattcgttggtccaaagatggacaaaagttttgtaaattctgtcgattatattaatggtggtacaatgaatccaaacaatggttcagcactcggaaaattccaagcagccatgcacattcgtagaaattctcgcttgagttgttacaactctttggcagttggttatcctattggtgtcatcttagataatgaaaagggtgcaacccaacaagcagcaacagctggtgcattgaaattgaacaacatttggcttgcaggtatggatattgttggttcagattacaacaaaatctacaaagatgagttggtaactgattacaaaaacaaggtaaccgacccaacaaagccttcattcacatcaactttctttaaggctcaaagtggtaataatatcttgccaacatgggaaacacttgtaggaatgaacggttacacaccacttgcaacaagtcctatcctcaatgcagcttcattccaaaatcttacaggtttcatctctgttccttacgttggagctttctctgcaaacgacgattggacagcaggttgggctgagttcgacccacagaatgcagactattaatgggcaagaataatttttaactgacataattcaatttgttaggcaagcaagtgaggttttaaaaccaagtttgcttgctttttctaatatattgtttgaaagacaaaacagcctgttttgaagttcaaaataggctgttttgaagtgaaaaacagcctatattgatagaatttgccggattcagatttgggcaatactatcatcttatgatagagtcgaaactgaaacccaacgaaaaattataacgtttgacaaaatgcaccagttattctaatttcattaatatcagatagtaaatgaatatttgcatttctaaactttattctatttgcaattggtaactgttacgataaagttcacaaaagcgaaaaatgcccaacaaaatgttgaatttgtgtattttaaattatctgttaaagtttgctaacttataaatgtttgatagcaaattttccctaaccaactaataatttgctacttttgcatcgttaatcaaagatgaaagcaaaaagtcgtaacaacaaattgttggcacgctcaaagtaatgaaaaaggcaatgccaatattttgaaaacgcaattgataatactataaaaagcaaatattaaaatggtgtctacaaccaaggctttgaggtatttttcaataatttttcaccaagaagaaacaaaacatacaactaattaataaatttgcaactaacatggcaaacgaaacaaacaacaaagagttccgtattgagagcgaccttttgggcgaccttcaagtaccagctaatgcatactatggtgtgcaaacacaacgtgcagtgaataactaccacatttctaacacaagaatgtgcgactacccagactacgttatcgcaatggcttacgttaagttagcagcagttgaaactaaccgtgaattaggcgaaattgatggcgctatttgcgacgctatggcacaggcttgccgcgaaattattgatggtaaattccatgaagatttcgttaccgacatggtacaaggtggcgcaggtacttcagtaaacatgaatgctaacgaagttatcgcaaaccgtgcttgtgaaattctcggacaccaaaaaggtgaacacaaatattgcgctcctaacgaccacgctaactgcggtcaatctacaaacgacgcatatccaacagctatccacttggctttgattcgcatgaacaagacattggtagaaaaacttcaactcctcgttgcttctttccgcaagaaggctgaagagtttaagaaggatattaagatgggtcgtacacaactccaagacgctgttcctatgacaagcggtcaggaattcaatgcttttgccaacttgctcgaagctgaaattagcaacttgaaccaagctgccgacatgttcttagaaatcaatatgggtggtacagctatcggtacaggtttgaatgctgctcctggtttcccacaaatctgcgctcgcaagatgagtgagtttacaggttacgccttcaaagcaagtgaagacctcgttgcagcaactcctgatacaaccgatttagtaaactacagcagcgcaatgaagcgtttggcagttaaactttctaagatttgcaacgaccttcgtcttatggcatctggtcctcgttgtggtcttcacgaaatcaacttgcctccaatggctccaggttcaagtatcatgccaggtaaggtaaaccctgttattcctgaaattactaaccaaacatgcttcaaggtaattggtaacgacacaactgtaatgatggctgcagaagctggtcaattgcaattgaacgtaatggaaccagttatcatgcaatgcttggtagaagatattacatggatgggcaacgctatggatactctccgtgagaagtgcatcgatggtatcactgtaaaccgtgaacataacgctgaaactgtaaagaattctatcggtatcgtaactgctcttaacccatacatcggctataagaacagcacaaagattgctaaggaagcactcgaaacaggtggttctgtttacgaccttgtactcgcaaagggtgttcttgcaaaagaacaactcgaccaaattctttcaccagaacacatgttggattcagaagaaagagtaaagtaagctgaaaataataattatattattataaacaaaaaagttccatgcaaaccagcatggaactttttttatttatcttattgctactgagccatatacttttaaaatatcgctccaaatttaattaaaaatagggcataaaaaatgccccgttaaaggtcgaggcaaacctaatgttttcacaacggaataatccttattgtgaatgctttaaaattagtattgcaaaaatacgcttttttatgacatttgcaaacttttttatgttaaatgttgctatttaaaatgtttttcgtaattttacacaaaacattaatacgttaatcatgaagaaaatcttaggtttagatttgggaaccacaagcattggttgggctttagtgaatgaagcagaaaccgaaagtgaaaaatcgtctattatccgtcttggagtaagagtaaatccattgacaatagatgagaaaggtaattttgaaaagggaaaagcaattactaccaattctgatagacaacagcgacatagtgcgagaataaatcttcaacgctataaattgcgtagacaaaatctttgtgattgtttacaaataggaggtttactcggttcagaatctatgtatgaagaaggaaaagaatcgacttttgaaacttataaacttcgtgctaaagctgcaacagaaaaagtagctttacacgaatttgcccgcattctgtttatgctcaataagaagcgtggctataaaagcaatagaaaagctaatagtaaggaagatggacaggctttcgacggaatgactattgctaagaaattgtatgaagaaaatttaactcctgctgagtattcgttgcaattgctaaataaaggcaaaaagttttcgccaagttattatcgttctgacttggaaagtgaattaaatagaatatgggaggagcaaaagaagtattaccctgaaatactgaccgatgatttttaccaacaattagaaggcaaaactaaagtcaatacaactaaaattttccttgctaagtatggcatttatactgctgatttaaaaggattggataagaaaatgcaacctttaaagtggcgtattgaagcgttgaataaacaagttgataaagaagttttgacttttgtcgttagtgatttgaaaggacaaattgaaaaaacaagtggacttcttggagaaattagcgacagaagtaaggaactttatttcaataaacaaacagtgggacagtatgtttgggcttcattgaaagaaaatccacatgtaagcattaagaataaacctttctatcgtcaagattatttagatgagtttgaaaagatttgggaaactcaagctgcttttcataaagagctaacacccgaattgaaaaaagaaattagagatattattattttctatcaacgcccattgaagagtaaaaaaggtcttatttcaatttgtgagcttgaacagaaaaaagaaaaagttataattgaaggcaaagaaaaagaaatacttattgggtcgaaagttgctcctaaatcttctccaatgtatcaagagtttagaatttggcagaatttaaataatgttttacttattgatacagaaataaatgaaagtcgtccactcgacgaagaggaaaaagcattgctctacaatgaattaagcgttagagcaaagttgagtgaaacagaagctttaaagacgataaataagaaaggtaagcattgggatttaaattttaaagagttagaaggtaatcgtacacaagctgttctctttgaatgttataatcgtattattacacaaacaggacacgaagaatgcaattttaagaaaatttctgctgaagatattcgtcattatgttgcaacaattttcaagaatttaggtttcaatacagatattcttgattttaatccatcgttagagaagcatgagttagaaaagcaaccaatgtatcaactttggcatttgctgtattcgtatgaaagcgacaagtcaagaacgggtaatgaatcgttattaaataaactggaagcaaactttggattccctcaagaatatgcttctgtgcttgccgatgctacgtttgaagatgattatggtaacattagtgtgaaagccattcgtaaaattttacctcatcttcatgatggatatgattatagtgaagcttgtgaaagagctggctataatcattcggttcgttcgcttacaaaagaagaattagcacaaaaggtttataaagatagattggacttgttgccaaagaatagtttgcgaaatcctgttgttgagaagattcttaaccaaatgattaatgtaatcaacgctattattgtcgaatatggaaagcctgatgaaataagaatcgaaatggcacgtgagttaaaaagtagtgctgctaaacgtgaagaaagaaccaaatcaattaatcaaaatgctgctgaaaataagcgtattactgaaattttgcaaacagaatttggcttatcttatattagtcgcaatgatattgtaaaatataaattgtatcaagaacttgaggctaacggatttaaaaccctctattcgaatacttatattcctaaagaaaaacttttttctaaggattttgatattgaacatattgttccaaaagcacgtttgtttgatgattctttcggaaataaaactattgaagcacgagatgtaaatcttgctaagagtaataagacagcttttgattttgttaaagaaaaatacggcgaacaaggaatagaagaatataaaaagaaacttgatacgctcttaaaagagaatgcaataagttcagggaaatacaaaaaactgatgatgtcggaagctgatattccttctgattttatcaatcgcgaccttcgtaatacgcaatatatagctagaaaagcctatgaaattttgggtgaattggttaaaacaataacccctacaacgggaaaaataactgaccgattgcgtgaagattggcaattgattgatgtaatgaaggaattgaatttcgagaaatatgatagattaggtctaaccgaagtcatagaagatagagatggaagaaaaataaagcgaataaaagactggacgaagcgtaacgaccatcgccaccatgcaatggacgctctgaccattgcctttacaaaaccttcttacattcagtatctgaacaatcttaatgcacgaagtgataagagtggaagcatttatgcaattgaaacaaaagagctacatcgtgaaaataatactcttcgcttcaatgctcctatgcctttaaacgaattccgcaaagaagctaaacgtcatcttagtgccattcttgtttcaataaaggctaagaacaaagtaatgacgcaaaatgtaaataagataaaaacaaagaatggtatcattaaaaaagtgcaacttacaccacgtggagcgttacacaatgaaactatttatggtacaaagatgcgtccaataataaaaatggtgaagattggagctgcattagatgaggctactataaataaagtaagtagtcctactattcgtgaagccttgcttaaacgtcttaacgaatattctggtgatgcgaaaaaggcttttgcaggtaagaatgcaattactaaaaatcctatttatctcaatgcagaacacacaaagactgctcctgcaatggtgaaaatagtagaatgggaaatgtattaccctatccgtaaacttatcacaccagaccttaaaatagaaaaagttattgacaacggcattaaagaaattctgaaaaaacgattaaaagaatttggcggagatgcaaagaaagcttttagtaatttagatgaatgccctatttatcttgacgaagaaaagaatattaccttaaaacgtgtcagcatagaaggcgttttaagtgctattcctgtgcatacgctgaaaaatcatgcaggcaaggaaattaaggatgaagatggaaaagctgtattaggtgattacgttcaaacaagcaacaatcatcatgtggcaatttatcaagatgcaaaaggtaatttgcaagacaatgtaatatctttctttgaagctgctgaacgtaaatcgcagaatgtgccaattgttgataaaaacttaaatcgtgataaagggtggcatttcctttatacaatgaagcaaaacgaatatttcgtattccctaatgaagaaactggattcgtaccttctgaaattgatttgatggacgaaaataattatgaaatgattagccctaatttattcagagttcaaacgatgtcaagagttgattacggaaaaaccataattcgagaatatgtatttcggaatcatttagaaacgattcttaatgataatttgaaacttaaaggcttagtatttaagaaaataaaatccttaaaggctttagaaggaatagttaaggttcgtgtcaatgccattggtaaaatagtagcagtaggtgagtatgattaaaatcatggcttatgataaagaaaactttatgcttcagcaatcctgcttatttgagtttacataacgagcagcttcttattcgtttaccagaagttgaaacatgtaaaggattgccagattgtttaaaaaaagaaacagagcgtacaattccaatcgaagatattggagttgtattgcttgacaataagcgtataacaatcacatcatcggctttagaagctttaatagaaaataattgtgctgtcattacttgtgatagtaaaaatatgcctattggtcttcttttacctttatgtggaaatactacgcaaaatgaacgtttcagaactcaaatagacgcatcattgccaataaaaaaacaattgtggcagcaaacgataaaacaaaagataatcaatcaagctaagattttaagtatttacaccaatactgacgtggcatgtatgtacgtttgggcgaataaagttagaagtggagaccctgataattttgaagctcgggcagcagcctattattggaaaaatatttttactgatattcctaattttgtaagaggacgtgatggtgaacctccaaacaatcttcttaattatgggtatgctatattgcgtgcagtagtagcacgctctttagtaggaagtgggctacttcctacattaggaattcatcaccataacaaatataatgcttattgccttgctgatgatattatggagccttatcgcccatatgttgatggattagttttagatgtcatggagtcaattaaggattacagcgagcttacaaaagagataaaaatgaaactcctttctattcctgtacttgatacaacgataggaaataagaagagtccattaatgatagctacccaacaaaccactgcatcgctttacaaatgctttagtggtgaacaaaagaaaattgcttatcctgaattataaacacaaattgtggaaacttatagatttagtcaataccgaagtatgtggttaatagtattttttgatttgcccaccgacacaaagaaagaacgaaaggcagctgctgtttttcgtcaaaatcttttgaaagatggatttactatgtttcagttctccatctatatacgccattgtggcagtaaggagaatatggaagttcatacaaagcgcatatctacttttattccaacgtatggtaaagttggaataatggggataaccgacaaacagtttgaggaaataaaattattttatggaaaaaagccacaaaaaccaaatgcaccaggagcgcaattagaattgttttagcaaaaataaagttccacctttaacaagtgaaactttattttgcttgcatttttcttttccttgaatctttcgtaatacatctattcgtcagtgtattatacgatttaggatggttttgctaatgcaaagatactaattttaaagcaaatcacaaccgtcgctttgtactaactccattgattggagatggttttgctaatgcaaagatactaattttaaagcaaatcacaaccttttaaacctacccccgatgaccattctggatggttttgctaatgcaaagatactaattttaaagcaaatcacaacagacatcacaaacgaatttaagtgatttaggatggttttgctaatgcaaagatactaattttaaagcaaatcacaacataattaactagggtctgctgaattattatctcttcacagacagagggtagcagacgtagcccctcatagtgacgataatgatgaaaaaccaccagatttcggtcagggcaagacaaagttccctgaggaacttcatcacgtttttaacgaagtagcacattcctgtccagcatcgtgctgtatctggaagcttggctcttatgtcattggctcgatagattctcttgccagtaccgaatgagcattcgatttcattgcgctccccgatggctttggccattctggatttcatctcatctgaaggaggatccttcggtggtcgccctaacggtttgcagtatgaatggatttcaaaatcctcaagtatatctcggtttgacctgtttaggtaaatcttatccgcaaggatggtggccggaagatagccgaagcgttctttgaaaagttgaatctgtagcaagagatcctggctctcgttgtaggcatcccagctgtggtggtcgatgaacgtatagccctcgactatgcttgcacctatcttggccccgaactcagtccttgccttagcctttccacggacaatggcacggacgtgtggctgaaagatgctcagtatgcggtctgcacaagtatgagtctttgacctgtacatctcctcctgctgatggtacatcgtgaggattgcagtcaaggtgcgtttctcatataggaataggctctcgtagtacgtcttgttctttgcaagcaagtccattaagatgcggatgtccttgcgcaagtagttgagcatcaccccgatagtatcacgcaccatcttgcctttcttcttggctttcttgacaagctgaaggtatgcctgacgtgcatgcttgtagttcgtgcgtggcttgtgcagctcaaacatctcgcacacctttataatatagtcggtaaccttgcggcaaccatcatgtattatatcaacgtcaacaggataacgcatctctgcatcggcacaggtagcatcaatcttcagcactcccttgtgctcgcgaccttttgagtcggtgaaggaagcggcattcggatcctctggtttcggagccggcgggtcctcatcattcctcttcgcctcttcttcttcacgcttgcgtttctcttcaagaagacgcctctgcttgtcgagaagcttgactgtcatcttgttgagttcttcctctgagattcgcttgcgtatcgtgacgaataggctcgggtcgaatataggcttgtcggtgaactcatgcaatccacaaaagtactgcatgtagggactctctctgataatctcgatggtctcggcatcactcaggtttagtttgtgcttgataatcattgcgccgagaatcatgcgtgccggcttgttccctgcacctttcttctgattgtccaaccttgagttgtattccttctcaagttctgtccatggaagaaggtcaccgagagccacccatcggtttgtcttgtccaactcatcaagggatgagcggagcaaaccgaggtcaagttgcttgtattttggagcgtaaaacttcatcttgctatggatttaactatataaaggtacgattttctagttaaacaaacaaagaaataaagttatataaacttaaatatcagagagttataaattattcagtaaacactaactaaatattaaagggttagatagatggttttgctaatgcaaagatactaattttaaagcaaatcacaacatgatgaagcaacaacagaatttgatgcggatggttttgctaatgcaaagatactaattttaaagcaaatcacaactttatgttaagtgtcgtaaatgtaagtcagatggttttgctaatgcaaagatactaattttaaagcaaatcacaacttaatcattgtaagtccttgaaatggtaaagatggttttgctaatgcaaagatactaattttaaagcaaatcacaacttagctggcattggttttcagaacgcagcagatggttttgctaatgcaaagatactaattttaaagcaaatcacaacatataagttattcgcttgcatcgctcgcccgatggttttgctaatgcaaagatactaattttaaagcaaatcacaacgagttttttgcattataatttataaaaatagatggttttgctaatgcaaagatactaattttaaagcaaatcacaactagctccttatacataagctgtacctttctgatggttttgctaatgcaaagatactaattttaaagcaaatcacaacttacttgtgcgtttcaaggatattgcttatgatggttttgctaatgcaaagatactaattttaaagcaaatcacaactgctggtcgtcgggtatatatgcccaaaatgatggttttgctaatgcaaagatactaattttaaagcaaatcacaaccgggaaaccttcacagcgactagcacctctgatggttttgctaatgcaaagatactaattttaaagcaaatcacaactgggaagccttgacacaaaaacaattcatgatggttttgctaatgcaaagatactaattttaaagcaaatcacaacaaatggactggaagtatccagccgaagttagatggttttgctaatgcaaagatactaattttaaagcaaatcacaactcaagctggagttccactcgatgcgatgaggatggttttgctaatgcaaagatactaattttaaagcaaatcacaacgcctccgacaaaacactgacaatcctcgcagatggttttgctaatgcaaagatactaattttaaagcaaatcacaacggaaagagtgtggttattacccccgcttaagatggttttgctaatgcaaagatactaattttaaagcaaatcacaacaccctgacgataaacctataaatgcctttagatggttttgctaatgcaaagatactaattttaaagcaaatcacaactgcagtcggtaaggttagctgcgaatttctgatggttttgctaatgcaaagatactaattttaaagcaaatcacaacccactctatatccactgtgatttacttttagatggttttgctaatgcaaagatactaattttaaagcaaatcacaacaattaaaagcgttgaaagagcaacaagacagatggttttgctaatgcaaagatactaattttaaagcaaatcacaacttgaaacgcgccaaaccaatagccggaataagatggttttgctaatgcaaagatactaattttaaagcaaatcacaacttagacctccttttgccgttgcggatataggatggttttgctaatgcaaagatactaattttaaagcaaatcacaacacatacacgcagaactcgaacgtggcaagcgatggttttgctaatgcaaagatactaattttaaagcaaatcacaaccaaagcaaattggaataaaaactaaacgcagatggttttgctaatgcaaagatactaattttaaagcaaatcacaactgggtaggcaggttatataatgagtgtaaggatggttttgtgtctgcaaagttactacaaaaaagtgaaatgcggaaagatatagtgatagaattgagttacaagggttttggttgaagtggcgataatccgtgaagccattacaatccctgccgaagccaaatcctgacgccgctacgttacttgttcgtaaccatgcccgaaaatgcgacaaacgggtacgaatagcgaaacaaggctctaaggaatagtgagttatccataactcatgcgaaaaatcaggttacggaaaaagattgcgccgttcctccccgttttgcgtaccaacaccggactcttcaccaactaattttgaaacccaaaaattaaggacaatgaagagtacattttcagtaatctactacctcaagcgtcaggtagtgaaaaaggacgggacagttcccgtcatgggacgcatcacggtggacggcagccagacgcagttcagctgcaaactgactgtcgatccgaaactgtgggacaccaaaggtggacgtgtcacgggcagaagcacggcggcactcgaaacgaaccgtatgcttgacaagatgcgggtacgcatcaacaggcattatcaggaaatcatggagcgtgacaacttcgtcacggcggagaaggtgaagaacgcctttctcggactggaacaccgctaccacacgctgatgcaggtgttccgccagcacaacgaggactacgagaagcaggtggaggcaggcatgaaagccaaaggcacgctgctgaagtaccgcaccgtttacaagcacatgcaagagttcctcgacatccgctaccatgtgaaggacatcgccctaaaagagcttaccccggctttcatctccgacttcgagatgttcctgcgcacggacaagcactgctgcaccaataccgtgtggctgtacgtctgcccgttacggacgatggtattcatcgccatcaacaacgagtggctgacgcgcgacccgttccgcgagtatgaaatcaagaaggaggaaacaacacgcagtttcctgaccaaagatgagatccgcctgctgatggaggggaaactgaaaaacgccaaacaggaattgtaccgcgacctctacctgttctgcgccttcacggggctgtcgttcgcggatatgcgcaaccttacggaagagaatatccgcacctacttcgacgaacacgagtggataaacatcaaccgccagaaaacgggcgtggtgtccaacatccgcctgctcgacatcgccaaccgcataatcggcaaataccggggactgtgcggggacggcaggatatttcccgttccgcattataacacgtgccttgccggtatccgtgccgtcgccaagcgttgcggcatcaccaagcatatcacgtggcatcagagccgccacacggcagccacgacgatattcctctccaacggtgttcccatcgaaacggtcagctccatgctcggacacaagagcataaagacgacgcagatttacgcaagtgcgcccagattggtcgcttgataaatacttctgtagtaagaagttaggattgggttcaatataatcctatcgtcaatcagcttatccgacggggaaacctaacggggagtgtagcatgctgattaaagccctgagtctactaatagccaagtagcgactgaagggcaagacgaaacgacatatataaggatgaagccttgattggttgaacgatagttcggtggtaccacatcttgcaatagcggaaggcttttatatacgctatttcatagtactctggctattttgtgcgttagtgcagagcattaagaaccgactatgacacagccgcaataagcggacaagaacgaaagtcgcatccgacaatatgtcacgctaatagttatcaagtgaaactaactggggattgcctaagtcagaacgcctcaaaggctatgagagctggtctctgaatatctgatatggcaacggagttcccatagtagtccgagcaagttaacggcttgtacatggcgaaggggaacagtccataactttagtacaaacaaaggaaaacgtgagagacgtatgagaaatcccgagcaagtattaaacattttagctgaacacagcaacgagtcaggttacaaatacgaacgactctatcgtattctgttcaatgagcagatgttcttagtcgcatatcagcgcattcatgcaaaaccaggcaatatgacacccggtactgatggacagacggaggacggcatgagcattgacaagatacacgcattaatagacagtctcaaaagcgaagtctataggcctaaaccggcaaagagggtttacataccgaagaagagcggaaagttacgtccgctcggtatccctacgtttgcagataaattagtgcaagaggtagtgagaatggttctcgaagccatatacgaaggatattttgaacggacttcacatggtttcagaccacacaaaagctgccacacggtacttaagagtctacagaataatttcaacggaacaaagtggttcattgagggagacataaaaggtttctttgacaatatcaaccatggcgtgatgatagaaattctgagggaacgcatatctgacgagcgtttccttcggttaatacgtaaatttctcaacgctggatatttggaagaatggcacttcaatagaacttattcgggtacgcctcaaggtggaattatcagtccaatactggctaatatctacttggacaagttcgataagtatatgaagaagtatgcacaagatttccataagggtaaagttagacaccgcaacaaggatatcggcagactgaacaatcgagttcactatctaaagaagagaatgaaggaggtgacgaacgttgataaattggaagcaatgcgagaggaagttcgtaataagcaacagcaaatactgactatgccgagcggtaacgatatggatgagaatttccgtagattgaattatgtacgctacgctgatgatttccttataggggtcattggaaataaagcagagtgcgagaaaatcaaggcggatgttacacaatttatgcaagaaaagctaaagttggagatgtcgcaagaaaagaccttgataaccaacgcacaagacagtgcaaaatttctcggctatgaaatatcagtccgtaaagattacacaacgcagaaaaatgcaagaggagaaactcgtagacatcgtaatggtaatgtgatactacacgtatcacgagaagtaataaagaagaagctactgagtcttgaagccatgaatgtgaaaacacgaaatggcaaagaagtgtggagttctaaaggtagaacatacctgatagacaatgagccacaagatatagtagcacgtttcaacacagaaatcagaggattctacaactactactccattgcaaacaatgcatcggcacttggacgttcatttggatgtatcatgaggttcagtatgctaaagacatttgcgcaaaaacttaacagttccgtcagaaccataacaaacaagtatcgtgaagatgataaatttgtggtgtggtatacggacaagaaaggcgaacgcaaaccaagggtgttttacaatgagggctttaagcgtattaccgacttgggaactcaaaaatgtgataacttgccctacctgttcaacactccatctatgagtctggtcgaaagactgactgcaaataagtgtgagttgtgcggaaaagaaggaaatgttgtgtcacaccacgtcaggaaactctcagaattaagaggcaaaaccgaatgggaacgtaaaatgctcaaaatgcatagaaaatctttaatcgtctgtgcagaatgtcataacatgattcatgcggagaatagctaaaatgccgttatgggcggagagccgtatacatggagacgtgtacgtacggttcggaggcaggctgtcggaaacctaccaccgtaaggtggcatggcgccgacagccgagcctacagataaccaaagagaagctcaatcaggacatggagaaccttgccgcaagattgaacggcgtcgaggaatttgcaggttgcaccatctaaaaagaaaagccatgaaacgtgacacaatcatcatcgaggacaaggcagtcagcgtaaccggtaacgacgtgtggatgaccgccaccgaaatagccggattgttccatacgaccgtcccggcagtgaacgccgccatcagagccgtccgcaagtcggacgtgctgaacgactacgaggtgtgccgctacatgcagcttgaaaacgggctgcacgcggacgtgtacgcccttgaaatcatcatcccggtcgctttcagggtgaatacctacaacacccacctgttccgcacatggctggtgggaaaggcactctcacaagagaaacggcagacatacgtgatgttcatacagaacggaaaagccgggtattgctgattgcacataccccataagacaagtaaacgggtagcaccacaaaaggtgtcacccgtttactttttcatgaaaccgcctcactccagcggcttgcggtagttcgcttccagtaccccgcgcagccccgtttccgggtaaagcaccttccctcccaaaagtatgaagggcaacacgcggttgttgcggtattcctgcaaggtgcgccggctcacacggagcagttccgacacctcgccgtccgtcaggtaacgttccccgtccagcggaggacggtagctttccagaaatgcggacagccatttcgagcctttgcgcatatcctgcaccacagaggctatcgg

SEQ ID NO: 2241 - DNA, 24143 bp, synthetic construct
  source 1..24143: mol_type = other DNA
  misc_feature 1..24143: note = Synthetic
aagagtgaataatatcataagttagtccataaccaaataatatatttgatattagattatttccctccttcaaaatagcagccaaaaaatgttccgtacctatttcttctaatcccaaattggtagcttccaaaaaagacaatttaataactctttcagtttgttttagtaatgggacatctttttcttgattcaatgcttggaatacatcagtcttttgaatagcttgctctatttctttttttattacctgtgggtctatattaaaatcagctaatatgtgcattgccttacattctttctgtcgcaccattcctaaaaataaatgctctaccccaaaaaaatcactccttagtcgcattgcctcatcgctgccttcttttattaccttttttgcgttatctgttaatttagcatccataatttatttataaaatatctttcaaaagtactaagaatatcttaaataacaaccttttaataaattattattgatatggattaatataaaactcattctaaaacattattaatcaaatttcaacataaaataattattttaaactttaaactttctttccttgtcttataaatcaatctcccttttaaaatagcaatagaaaaatagaactaagagataattttttagaatcaagagataaattattagaatcaaaagataattttttagaatcaaatagtaattttccacatttaaatattagagtattttatgtaattattttatcattaaacctctttttcttttcttttcttctatgtttgaaaagaaaatcttaactttgcaaactaattaaaatttattacaaataaacattttatataaacaataaacaaaaatagaaaaatggcaagagttaaggcttttaagggcttacgccctccggttgagattgcagaaagtttggcatctttaccttatgatgtgatgaactcacaagaggcaagagttaaagctaagggtaatgagtattcattattacatattactaaggcagaaattgaccttccagagggtgttgatgaacactctaaggaggtgtatgataaagttgtagaaaacttccaaatgtttaaggataagggctggcttgttcaagacagtgaacctaaactatatatctatgctcaaactatggatggaagaactcaatatggtattgttggctgcactcatattgaagattatttcaataatgttatcaagaaacatgagcttacacgtaaggataaagaagatgatagaatgattcacgttaatattacaaatgctaatgttgaacctgtattcttcacctatcctgctcataaggaaatagaccaaatagtttcaagcgttattgataacgaaaaacctatttacgatttcgttgctaaggatgatggttttggtcatactttttgggtaattaacgataagactaagataaaaagattagaagaaatttttgataaagagatagcttctctttatgttgctgacgggcaccatcgtactgctgctgctgcaagggttggtcaagaaagaaaagcaaataaccctaaccataccccagaagaagagtataattattttatggcagttatattcccagacaaccaattaaaaattattgattataatcgtgttgttcaagatttgaatggtttaaccgaaaaagagtttattacaaaacttaatcactcatttgtaattgaagagatgggtaaagatatttatcgtcctgcaaagttacacgagtttagtatgtatatgaatggattgtggtataagctaactgccaaagaaggtacttataacgacaacgatcctattggagttttggacgttactattctttctaatttggttttagatgaaatattagacataaaagacctacgcacatcaaaaagaattgactttattggaggtattagaggtttgggcgaattaaaaagaagggttgatagcggagaaatgaaggttgcttttgctttatatcctgtttctatgcaacaattaattgacattgcagatagtggaaacattatgccacctaaaacaacttggtttgagcctaagcttcgctcaggattggttattcatgaattaaaatagaaatttaattatctaataatcatttattaatagaaaaagcaagaaattatttagccgatattgtttacaatttcggcttttttgctgttatatatgttgtaaaaggattgtattaataaattatttttcgtttctttgcaaaaaagattattaactaaaaattatatgatatgaaaagaatacttattatttctgtaattattgctttactatctcctgttttgttttggagctgtaaagatgaggatgagcctgcaattgataccaattttatgaattctgttccttcatcagggatttattttaaggctaaaataggaagcaatattacttgggaaggaagtaatattactgaaatgtatgccaagaccgagcctttggaagatacaaacaaatttgtagatatagttgtctgcacagaagaccaaacaagtgcaccaactgtaattggtcaatggtgttacgctcatgtaagcattaatgatgatggtagcttttctaattatgcaataaaatatgcaaagaataaaactacgggatatccattttcttttgaagagtatatgaataatcgtccaggttcaggaaatttacagattattgaaaaaacggcagaaactattacagctaaatttaaagggaagctctatagagtaaatgataattcagaggtggatgtaataatgtatttccaagaattcccattaagtccagcaaagaaataagctttatgtttaatcatataaatacaaattaaataaataatattatggataagaataaaaatttaattgtccttattataggacttattttagctattagtatattctttgtcggtttatttatctacaaaggacttaaatcatttagcgataaagacagagtggtaagcgttagaggattgtcagaaaagattgttgatgctgattatgttaatttgaagataaaatatattgaaggcgataacgatatgcaaagccttttaaaaaaggttgaagacaataacctcaagatagtaaactttattaaagctaatggcctaactgatgaagagattaatattggagtgccaagcataaaagacaaaaagaataccgaatacaacgataatttctctacaaatacatttagatactattgtgaggtaacaataacaatactttccagtaaggtgaaaaatgttcgagctattgaattatctcaatttgatttatacaagcaaggaataacacttgttcaaaatagatacgagtatgatgccgattcaaaatatactttcaccaagctaaacgatattaaacctaagatgatagaagaatctacagctaatgcaaaaattgcaggtgagcagttttctaaaaactccaatgctaagcttggtggaataaaatcagcttatcaaggacaatttgaaataattccaacagaaaacccattaaagcttaaagtaagagttgtttcctcaattagctatttccttaatgattaaatgtaaacttaatttattagcattataattaacaagtagagggtattgaaaaataccctctatcaatttatacatattatgaaaagaaaaatcttctttaatttattctttgtttttatttcttttatttctatgcaagctcaaacaagattaattgattatgtcaatccaatgattggaacaaaaagcatgggacatactttccctggggcttgtgctccttttggcatagtacaattaagtccagacactgaaacaattcctcataatattgatggaaagtatcaaaaggatacatataaatattgtgcaggatatcagtatgatgataaaacaataattggcttttcacatactcatttcaacggaacaggtcattcggatttaggagatattctaattatgcccgcaataggagacattaaattaaatgttggtaattcagagaatacatcatcaggttttcggtctaactttaatcataataaagaaaaagcagagccaggctactattctgttgttttagatgattataacatattagcagaattaacagcaacccaaagagtaggagttcatcgttatacattccccaaaacatcaaaagaaggtcatatagttatagatttatcttatggaatttataattacgatggtaaagtattaatggcaaacctaagagttgaagatgaatataccctaacaggatataggataacacgaggttggtcaaggatgaattacacttattttgctattaaattttccaaaccaatacttaattatggttgccaaaacgatgaaaaggtcaagtataatggcttttggagaaagtttgatatgagcgagaacttccctgaaatgtttggaactaagctaatcacttactttaattttgatttctctgataaaaatccattagagattagagtagctttgtctgctgttgattgccttggagcattaaagaacctaaatgcagaagctcaaaacaagtcttttgaccaaataagaaaagaaacccaagaaaaatgggaaaaagaactaagtagtataaggatagatgctgataatgacaagaaatctattttctatacttcactatatcatacaatgattaatccttctgtttatcaagatgtagatggaagatatagaggtatagaccataatatccatactgcaaaagacaatcaagttaattattctattttctctctttgggatacttttagggctgagcatcccctaatgaacataataaaacctgcaagaagcaaagattttattaattccttacttaatcattacctgcaaagcgttcataaagcattacccgtttggtcgcacatgggaaatgagaattggtgtatgataggttatcatgctgtttcggttatttcagatgcacttgctaaggatattgaatttgataataaattagctatggaagccttaattaacagctccaatttgaaatactatgatgggattgaggactatgttagcttgggatacgttcctaatgagaagaattactcttcggcttcaataaccttggagtactcttatgatgattggacaatttattcttttgcaaaggctctaaataatcaagaaagaattcgagagtatgccaaaagagcaaagaactatcaaaatattttcaatacttccattggttttgcattacctaagaacagaaatggagaatttaaaaaggattatgatttattggatacacataaccaaggttttattgaaggaaactcgtggaattactccttttttgtgcctcatgatgttaatgggctaataaatcttatgggaggagaaaagagatttattaatcacttggattctctttttacaatggagttgcctgcaaagtattttgaaaacacagaagatataaatgaggaaggaattatgggaaactatgtacatggcaatgaaccaagtcatcatattgcttatttgtatagatggacaaaagaaccatggaagacagagttaagagtccatgatataatgaataaaatgtataagaataaaattgatggcttgtcaggtaatgatgattgtgggcaaatgtctgcttggtatattttttcttcacttggattttatcctgtttgccctggaagcgaccaatacataataggttccccaaaaaacaatgaagctattattaatttggaaaatgggaaaacatttacaataaaagcattaaatcttacggataataacatttatattaagtcaataaagttaaacggcaaagattataagaagcagtttatttctcataaagatatccttaatggaggagagataatatttgaaatgacaaataaaccaaacaaaaaatctgcactttacactaagccattttctttttcagatgagatgaaatagctatgcaagagagcaatcctatcaattacataaactcaaagtcaattctttcaaagctttcctttgttgattcttggtttgggataacttataatatgaatctttacagaggatgtcagcatggttgtatttattgcgacacaagaagtgaatgctatggcataaacgatatttcaaaaattacaattaaggaaaatgcaatagaattacttacaaaagaactatcctcaaaaagaaaacaaaaaggaacaataggaacaggctccatgaatgacccttatatgccaatagaaaaggaagtttgtttgactaaaagagcattggaagtaattaataggagtaaatatcctattcatataataactaaaagtaatttggttgaaagagatattgatttacttaaagaaatttctaaaacatattgtgcagtaagtttcacaataacaacttatgacgattcgcttgcaaagaagatagagccttatgcaagttctacctccctaaggtttaaagccattgaaaatttatcaaagcaaggaatttacacagggataaccctaatgccaatcctaccatttattaacgatagccaagaaaacataaaatccattctacataaagccaaggattctggtgcatcgtatataatacctatctttggagtaaccctaagaaaaggttcaagagattatttctataaagccttagagcaaaacttcaataacattaaagaaaaatatgaaatgacttttgacaatcagtataattgcccttctttaaactataaaaagcttcaagatgtttttaatagcgaaacatataggttaggaattacctcaaaaattgagttttataggccagaacaaagctcgcaactatcaatattctaaataaaaaatcccaaagtagaattgctctgggatttttctttgttttatacgatatttcttttattcaattggaatatatatttctgtctttaatttatgtgcaggagtgttgttaggattattaagatatttttccatccataaagcattgcggaatttataacccttatccttcaaataatcattgtaaataaaatcataaaccttaccaagattatcataagagcccttgtataaaaacatcaagaacttaccaccttcaatttctttaatctttatttcatcggtatcttcaatcttgcgagttatggtaatacaagcatcaaacttgcattcattagcaggagttgtggttgggtcagaagaatatattcccaagaactccattctcatactaaatagtttattcttcttaatgaatggccaaagcttattccataaagaagaataatcaatttttgaataattgccaaaagcagtgattgttgcagcctctcttttggttctttcaattagcttaggagctttaatattaagctcagtgcttatctttttactattaaaacacataatgataaaatttttaaattaacgaaaataatattgcgataacagaaactacaaaaaagtaaccaacatcaattccagctaaggttatataacgcttccaattacttatctgaaatttgagagttgatttcatccaagcagatatagcaataacaactacaacagataaccaaatagagattgaagttaggataaaatacataaaaacgacaaaagctgttgcaattatttgaatcagaaatatcaaagcattagagcttttcttacaagtgcatttttcaccattaacaacatcagctccgcaagcacattcatatttaacggctttcatccatgcttttgagaataaaaaaccataccaaattgcacccacaaaaaaggatacaacaacagcaataccataccataaccacgatattgcttcaaaaggacattgatttgtacaacaagtttccatattaaattattttaaaattatatttgcaaaaataactgaaaatttaatatccaatattatttttctaaataatattttgatggatttttgtttggctaaattatctcttgattctaataatttatcttttgattctaataaattatctcttgattctatttttctgtaattaagtttcatttttaacaaaagggacttaatcaaaaataatcagtgattaaacaaaataaggcttcaattgaattcaattgaagccttattcgttttgcggaaagtgagggattcgaacccccggaggtgttaccctcaacggttttcaagaccgccgcaatcgaccactctgccaactttccgagtgcaaaggtactactttttgaattattgcaaagttttttgttatttttttgtgaagtttttccttataaagaaaaatattgaaataagtttcaaataattatcctatatttgcaaactgaaatattaaatgaaatatattataatttaaagttaaaacaaaagacaaaatggaaaagaaagaattattgaaagatgttgttaaacacattgacataaaaaaaatcaacactactgatttaattgatgctatgcgtgatatgtcattttcatccagagatacagcaacggctactgacatttacgatagaatgattaacgataaggattgctccattatcctcactcttgcaggtagcacctctgctgctggttgtatgcaggtttatgttgatatggttagaagtaatatgattgattgtattgttgcaacaggagcatctatcatagatatggacttcttcgaagccttaggtttcaagcactataagggaactccttttattgatgataaattccttcgctctaactacatagataggatttatgatacatatattgatgaggaagaacttcaaaactgcgacggaacaataaagctaattgcagacaaattggagaaacgtccttattcttcaagagaatttatttgggaaattgggaaatggctttctgagggtaatgcaaagaaaaaagactctctaattcaagcttgttatgagcataatgtacctatcttctgccctgctttctccgattcttctgctggttttggtttagttttgcaccaagttgaaaaccctaactctcatctaagcatagattctgtgaaggatttcttagagctaaccaatattaagataaaggctggcacaacaggtttatttatggttggaggcggagtgcctaagaacttcacacaagacactgttgtttgtgctgaaattcttggtcatcaagttgatatgcataaatatgccatccaaataactgttgctgacccaagagatggtgcttgttcatcttcaacccttaaagaagcttcttcatgggggaaagttgatactacttatgagcaaatggtttatgccgaagccacaaccgttgtacctttaattgcttcttatatatatcataagaatgattggaaaaacagacaggcaagaaactttgctaaaatgttttaaagaataaatcttattttgcttttagtaataacgcttactcattctgagtaggcgctatatgttttatacttattcccttgacaaaattatagaaataactttaaatacactcaaaagtttttgaagttagaacaggggtaatataatagtcattatattcaatcttaaaaagaaattctatatttaaagtgtgatggggctcaactatcacgcatctattaagactaattcaacgaaggaataattttcttagtctattcaatcaatatgagtattaactaaaatctgggtagaataaaagcaaaaaaaacgaaagtgaaatataaaacttcacttccgctttaaatgttttcacaacggaataatccttattgtgaattgctttaagtttgttcggcaaagatagaaaaaaaaactatacttgcaaattattttgaaaaaatttgaagatataaaaatatatttatacctttgaacattgaaataactaacgaataattacatattattatgaaaaagatattaggattagacttaggaactaacagtataggttgggctttagtaaatgaagctgaaaaagagattgaaacatcatctattattaagcttggagttagagtaaatcctttgactgtcgatgaacaaaataattttcaacaaggcaaaagtattacaacaaatgcagacagaacttcaaaacgttcggcaagaagaaatttacaacgttataaattaagaagagagaatctgatagaattactcaaagagaataatgttattaatgataatactatacttgctgaaacaagtaatttttcaacttttgaaacatataaacttagagctaaggcagctaatgataagattagtttagaagagtttgctcgagtgttgttaatgattaataagaagagaggatataagagttcaagaaaacttaaaggtcaagatgagggagagttggtggacggaatggatattgcaaaggaattatataataatgatatgacaccaggtgagtatatgcttggcttattgagtagaggaaagaaaaacaaacctgagttttatacatctgaccttaaacaagagttgcaaaggatatgggaaacgcaaaaacaatactatcctgagatactaactgatgaattcaaaaatcaaattataggcaagagtaaaaccaacacatcaaagatatttttagctaaatatggaatctatacagccgaaaataaaggaaaggataaaaaggtagaagcttatcaatggagggttgaagcattaagcaaaaaagttgaaaaggatgttttggtttttgttattagtgatttaaatggaataattaataatacaagtggttatcttggtgcaattagtgatagaagcaaggaactatattttaataagcttacagtaggacaatacttaatgaatggattcaatgataatcctcattttagtgtaaagaataaggtcttttaccgacaagactatttagatgaatttgaaaagatatgggaaacacaaaagacatatcataaagaattgacaaatgagcttaagaaagagataagagatataattatattctatcaaagaagactaaagagtcagaaagggttaataagttattgtgagtttgaaaatgaaaagatagcaatagaggttgagggtaaaaagaagaatattacaattggctcaaaggtatgtcctaaatcatctcctttatttcaagaatttaagatatggcagatacttaataatcttatagtaaaagatgataagaagaatggaagaggattatatcaagaagaaaaagagatattatttaaggagttaaaccttaaaaataaactttcaaaatctgaagctcttaagctattatttgaaaatcataataagttagatttaaactacaaagatattgaaggaaatagaactttcaatagcctatttaatgcatttgctcaaattgttgaaatgagtggtcatggtgagtatgattttaataagatgaataccgaccaaatattagatattgtaaggactgtattcacatctttaggcataagggtagatattcttaattttaatacagatttagaaggagatgagtttgaaaaacaacctataatgaagttatggcatttgctttattcttttgagggagataattcaaaaacaggaactgaaaatcttttaaagaaactcaataaagaatatggttttgaaaaggattatgggaaagttattgctaatattagctttcaagatgattatggtagtttaagttcaaaagcaattaaaaaaatcttacctcatctaaaagaaggtaatggtttcgatactgcatgtttgctggcaggatataggcattcaaaaagctctttgactaaggaagagttagataagaaagaattaaaagataaacttgatatactccctaaaaatagtttgcgtaacccagtagttgaaaagatactaaatcaaatggtaaatgtggttaatcaagtaatagatacttatggtaaaccaacagaaataagaattgagttagcaagggatttgaaaaacaatgctgaggaaagaaaaaatatgaccgaagcaataagtaagactactaaagagcatgaggaatatagagatataattaaaaaagaatttggcttttcaagtgttagtaagaatgatttaattaggtataaactatatttagagttaaaagaaaatggttttaagactctatattctaatacttatatccctcgagaaaaaatattcgataagaattttgatattgaacatattattcctaaagctaagctatttgatgattccttttctaataaaacattagagcttagaactgcaaacatagaaaagagcgaaatgacagcttatgactatgttaagaataaatattcagaagaaggattaaaagattacttaaatagaatagatttgctttataaattgaaggctatttcaagaacaaagtacaataaattgaagatgcaagcttctgaaataccttctgactttattgatagagaccttagagattcacaatatattgctaaaaaagctcgccaaattcttcttgaaatatctaaagaagttgtttctacctcaggacaaattactgatagattaagaaaggattggcaattagtagatattatgaaggaattaaattgggataagtatgataagttgggtatgactgagatagttgaaaacaaggattcagagagaatatataggattaaggattggactaaacgtaacgatcatcgccaccatgctatggatgccctaacaatagcctttacaaaacataactatatcaattatcttaataacctaaatgcaagagctgataaatcaagtaatgcttatgcaatagagcaaaaagaattatatagagattctcatggtaatttgaaattcatacctccaatgcctttaaatgattttagggtgcaggctaaacaacaacttgaggatattttagtgtcaattaaggctaagaataaagttgttacaaggaatattaatacaactaagcaaaagggaggaacgaataaaaagcttcaacttactccaagagggcaattgcatcttgaaacaatttatggagaattaaaacaatatgtaactaaggaagaaaagataggctcaagttttaatgaagaaaaaataaatatggttgccaaaaaatcatatagagaagctttattaaggcgattaagagaaaatgacaacgatacaaagaaggcatttacaggcaagaattcattagataagaatcctttgtttattgatgctttacaaaccttcaaagtgcctgaaaaagttaagttagttgaatttgaaacaggatatacaattcgtaaggaaatatcccctgacttaaaaatagataaagttattgatgtaggcattagaagaaagcttgaagaaagattaaaaaaatatgatagtaaccctaagaaagcatttacgaatttagatgaagaccctatttggcttaatgaagagaaaggtattcaaataaaaagtgtaaagataagaggaattagtaatgctgttgctttaagaagcaagaaaaatcataaaggagaattaatcttagataaagaaggaaatcctcaaaaagttgattttgtaaatacaggtaataaccaccatgttgctatttacaaagatgaaaaagataatttacaagaaaatgtaatttctttctttgaagcaactgcaagagcaaatgcaggcatcccaattatagataagtcttataatcatgataaaggatggcagttcttatttactatgaaacaaaacgagtactttgtctttcctaatgaaaaaactggatttaatccaaaagaaattgacctactaaatccaattaattactcattgattagtcctaatttgtttagggtgcaaacaatgtcaaaagtgatgtatgggaataatgcagttagggattataaatttaggcatcatttagaaactcaattagtagattctaaagagttaaaagatataacttatcaaagtatcaaaagcctttctatttttgagcatattgtgaaagttagagttaatcatattggtcaaattgttagtgtaggagaatattaatatagcttatgattaaacgcacgctatactttggttctggggcttatctaagtgttaaagatagtcagttggttgtgcaattagcagaagataaaaccaatactaagaaaacaatgcctattgaagatattggtgtagttatattcgataatcctcaaattactattactcaaagggtgttagttcaattacttgaaaataatgttgcagttataacatgcaatcaatttcatcatccaataggacttcaattatgcttggatagtaatactttgcagagtgaaagatttcaaactcaaattaatgcctctgaaagtttaagaaagaatctttggcaacaaacaatcgttagtaagatttataatcaagcaatggtgttgaaagattttgatgttccaataagaaatatgattacatggtcaaactcagtttttagtggagacagtaagaatcatgaagcaagagcagctgcttattattggaaaaacttattagaaagtcatgataattttacaagagaacgttttggagaatatccaaataatttcttcaactatgcttatgcaatacttagagccataactgctcgttctttggttgcatcaggtcttttgccaactcttggaattcatcataagaatagatataattcctattgtttggcagatgatataatggagccttatcgaccatttgctgataaattaattattaatattattagaaactatccacaagaagaaactttaacaactcaaattaaacaagaaattctaaaactacctattattgacgttgagataaataaaaaaacaagcccattgcaaattgctatgcaagaaacaacctcatcgcttgctcaatgttttaattcaacaagaagaaaaattaaatatccaatttttggaacaaagatttaacgcttataaaataatgtgggttttagtactatttgatttgccaactgaaacaaaagcagataggaagaattatgcaaattttagaaaagaattattgaaagatggttttactatgtttcagttttctatatatttgcgacattgtccatctaaggagaatgccgatgtacatattgcaagagttaagaggttattgccaaaatatggaaatgtagggatactttgtattacagataagcaatttggaaatatggaaatattctttgggaaagaaccaaaagaaaaccctaatgtggttcagcaattagagatgttttaaaacaaaatgtcatttcattaattagaataaagatccacagaattatatctttaattcatattattataataaagagttagaaaattgaattaaagagtcattttgctaataatagtttcgaggattttacatacaaatctttattaattacaaaattagatgaattagtaaaagcaagtacttatgtttattctaaaccttacgataagaataaagatcaaccaaaccccatggtgataatgtatcactatttcaaaataatattattagggaaggaaagaattttaaatattagagaacttaaaactggagaatattattttcacgcattatctaaaagagaaaagagcaattaactcatatctgctccttcacaataggagagctgttgttaaccactcttttcaaatgcaaatatacaacaatttagaagaaaagtcaagtaaaaaataaaaaaatgaaccctgaccaatttaaaaagcatttaaatgctgttcaaatacagattaaaacctttgctaaaaaagatgctccacgcatagctggcaaggtggcaatagaccactttaaggagaattttcaaaacgaaggttttgagaaaaagaaatggaaagaagttaaacgaagaaaaagcaaatacactaaaggagctaagaaaataagaaaaatccttacaggcgacacaggcgaccttggtcgctcaatagaaaatgcaaaatattctaacaatgttgtgaattgcttttaaatttgtatttttgcggtatctaacaacctcaccttcgttagcgttcccgataattgagttgtgaattgcttttaaatttgtatttttgcggtatctaacaactttggaatttgagttgtagattttcaatagttgtgaattgcttttaaatttgtatttttgcggtatctaacaactttaactctttttttgataaaatggttgtagttgtgaattgcttttaaatttgtatttttgcggtatctaacaactaaagattcttgcaccttgcttaaaagtagttgtgaattgcttttaaatttgtatttttgcggtatctaacaactaggcttcttagggcataaaaggagtaagagttgtgaattgcttttaaatttgtatttttgcggtatctaacaacatagtagagtaaacccaaagctcgaaagctgttgtgaattgcttttaaatttgtatttttgcggtatctaacaactttttttcgccataatcctttgatattcttgttgtgaattgcttttaaatttgtatttttgcggtatctaacaacaattggttcttttgttaaatcatccattttgttgtgaattgcttttaaatttgtatttttgcggtatctaacaactagaggctaactacaaagaatttgaatattgttgtgaattgcttttaaatttgtatttttgcggtatctaacaacaaggtctcacgtgttgttaaacttttgtagttgtgaattgcttttaaatttgtatttttgcggtatctaacaacgtttttattattgtaataataggaatcatagttgtgaattgcttttaaatttgtatttttgcggtatctaacaactcctgttctccaggttctcctgcttgactggttgtgaattgcttttaaatttgtatttttgcggtatctaacaacaatatcccattcccatagcaataaaatcttgttgtgaattgcttttaaatttgtatttttgcggtatctaacaacaccttattgaaaatattggcaattgaaactgttgtgaattgcttttaaatttgtatttttgcggtatctaacaaccaataataaacaatgggtaatttcttttttgttgtgaattgcttttaaatttgtatttttgcggtatctaacaacttaaagaaagggtttaaaaaacttatgcagttgtgaattgcttttaaatttgtatttttgcggtatctaacaacgtctgtcgtcctttcttgcaatgaaattcagttgtgaattgcttttaaatttgtatttttgcggtatctaacaacctatcattgaattaaattctattttctttcgttgtgaattgcttttaaatttgtatttttgcggtatctaacaactcttgctgttgggttagggttagattgtacgttgtgaattgcttttaaatttgtatttttgcggtatctaacaacaagttgctaatgctgcaaaagtagttgagtgttgtgaattgcttttaaatttgtatttttgcggtatctaacaactttgttgttgcaaatccaacacactcgttcgttgtgaattgcttttaaatttgtatttttgcggtatctaacaactaatgtagtattgaagataaagaggcatctgttgtgaattgcttttaaatttgtatttttgcggtatctaacaactattaaattaagttcatcactcatatcactgttgtgaattgcttttaaatttgtatttttgcggtatctaacaacttgttgctaaaatcaaattcaaaatcactagttgtgaattgcttttaaatttgtatttttgcggtatctaacaacgtgcaaaagaaagtcctttgcaccaataatgttgtgaattgcttttaaatttgtatttttgcggtatctaacaacgatttcctttttcaagtcagcctttaaagagttgtgaattgcttttaaatttgtatttttgcggtatctaacaacctatctaaaccaatgtataaagctttgatagttgtgaattgcttttaaatttgtatttttgcggtatctaacaaccttttactctatgagagaaaatatcatatagttgtgaattgcttttaaatttgtatttttgcggtatctaacaacaatgaaattatataagcctctttagccactgttgtgaattgcttttaaatttgtatttttgcggtatctaacaactttgttgttgcgaatccaacgcactcgttcgttgtgaattgcttttaaatttgtatttttgcggtatctaacaacgttttagaggattataacggagataagagagttgtgaattgcttttaaatttgtatttttgcggtatctaacaacttgtaaccgcattaaaattatatcgtatatgttgtgaattgcttttaaatttgtatttttgcggtatctaacaacaataatgtatttagtaatgatagatcattagttgtgaattgcttttaaatttgtatttttgcggtatctaacaaccactcccagctgaaaataaacctcctacccgttgtgaattgcttttaaatttgtatttttgcggtatctaacaacatttaatactgttttgccaacatttgactagttgtgaattgcttttaaatttgtatttttgcggtatctaacaacattaggatcatcaaccaatttttcatcatcgttgtgaattgcttttaaatttgtatttttgcggtatctaacaacgaagttcttgcttcaacagattgctgattagttgtgaattgcttttaaatttgtatttttgcggtatctaacaacaaaaagaaacattttgcctacaaacggctagttgtgaattgcttttaaatttgtatttttgcggtatctaacaacattgattcttttctgcagctaaattaatacgttgtgaattgcttttaaatttgtatttttgcggtatctaacaactacgctccgcagctgtcatttgctctacttgttgtgaattgcttttaaatttgtatttttgcggtatctaacaactctatgtcttttatgtaaataatagcatatgttgtgaattgcttttaaatttgtatttttgcggtatctaacaacgaggtataattaatttatgctccactgttagttgtgaattgcttttaaatttgtatttttgcggtatctaacaacttattggactaaaaaacatcacatcggggtgttgtgaattgcttttaaatttgtatttttgcggtatctaacaacacagaatgtaaacacccacctaattatctcgttgtgaattgcttttaaatttgtatttttgcggtatctaacaacgttttgtctttttgtacctcttctaatacagttgtgaattgcttttaaatttgtatttttgcggtatctaacaactttacttctttcaaccaaattgtatcttctgttgtgaattgcttttaaatttgtatttttgcggtatctaacaacctattgagttttcattgacttataaagaaaagttgtgaattgcttttaaatttgtatttttgcggtatctaacaacgaaattgacatctaagccaacggcaaaattgttgtgaattgcttttaaatttgtatttttgcggtatctaacaacatacttaattttctttccctgttcatcctcgttgtgaattgcttttaaatttgtatttttgcggtatctaacaactacataactttatctttatagtatgcagtagttgtgaattgcttttaaatttgtatttttgcggtatctaacaactgctttctttttctttttctttaagagcttgttgtgaattgcttttaaatttgtatttttgcggtatctaacaacaaatcaataaaataggaacaaatcaaattagttgtgaattgcttttaaatttgtatttttgcggtatctaacaacaaatcaataaaataggaacaaatcaaattagttgtgaattgcttttaaatttgtatttttgcggtatctaacaacgaattaatgcaaagagacgcagaacgtctagttgtgaattgcttttaaatttgtatttttgcggtatctaacaactttccgcccattttcctcaataatcaaaccgttgtgaattgcttttaaatttgtatttttgcggtatctaacaactccctgtaataagttacctttcataattacgttgtgaattgcttttaaatttgtatttttgcggtatctaacaacaatacaattgattttttaccgaaagacaatgttgtgaattgcttttaaatttgtatttttgcggtatctaacaaccccacccacttcgccctccggccgatgcttgttgtgaattgcttttaaatttgtatttttgcggtatctaacaactgagggtaccgcaaaattttattaaacaaagtgttaagatagtgattagaaattgttaaattattcatttttattttgcgagaatggtaaatgattaattaaacaattctattattttatcttttcattataattatccatcttttctattattaatattctgcttttagattaactatatcaatatagcttatcaaaaaattacctttatgttttctaattaaatattttttgtaactttgcagtctgacaatagtgtcagactattttgtaatagattgtatgaattactataaggttggtttagatgttggctctacaacggctaaaattgttgttattaatgatattggaaatattgttttctttaaatacataaggcattgtgcagatattttaagcactgtcgtttctttgtttaatgagatgaaagatgctttgggagagtgcgagttttcattatcagtaacaggttctgttggaatgggacttgcagaaagatatggctttaattttgttcaagaagttagtgcttcggttgaatatgtaaaagcttatcatccagaaatttcaaccataattgacattggtggagaagactctaagatagtttatttgaaagataatgggaatagtgatttgagaatgaatggtaattgtgcaggaggaactggggcttttattgaccagatggcaactttattaggagtttcggttgatgaattaaatgctttggcagaaaaatcaaataggatacacccaattgcttctcgttgtggagttttttccaaaacagatatccagaatttaattagcaagaatgtggatagcaaagagattgcaatgtctgttttccatgctgttgcagttcaaaccatagttactctttctcgtggttttgaagtaaagcctaaaatattattctgcggaggtcctctcacctttattccttctttgagaaaggcttttgtgaattatctaaaaataaatccaaaagacactcttactcctgaaaaagcccatcttattcctgctatgggaactgctatttataagaacgggatatctaaatataggattgatgaagttttaggtattttagcagatacttatcaaacagacttaaaaaccacctcttgtttagaggctcttttcaattccgaacaagactatttagaatggaaagcagaaaaagaaaatcatagtattgaaaaagctgatataaaagatgctgattctgatatatgggttggaattgactccggctctaccacaacaaaggttgtagcaattgacaaagatgagagagttgttttctctttttattctcctaatgaaggtaatcctattcaaactgcaaaaagaggtttagagcaattgattgcagaaaacggaaataaaactctaaagataaaaggtagttgttctactggatatggcgaagatttaattaaggctgccttcaacttagattatggaattattgaaactattggacattacgcctctgccaagaaaatatctcctaatgtatcatttgttttagatattggggggcaagatatgaaggctatgtttatagagaatggggctttaaataggatggaaattaatgaagcttgttcctctgggtgtggttcttttttggaaacgtttgctaaatcacttggatatagtatttcagattttgcaattgcagcttgcaagagtaaatttccttgcgacttaggtacacgttgtactgtgtttatgaactctaaaattaaacaagtcttacgcgaaggagcattaatagaggatattgctgctggattatcctattctgttgtaaagaattgtctttacaaggttttaaagattaagaataataaagaattaggagataatattgttttgcagggaggaacaatgaaaaacgattctgttgttagagcctttgaattgcttaccaactctaatgtttatcgcagtaatatatccgaacttatgggagcttatggttgtgctatatatgccaaaagtaattctcaatcagaaggtgttttattggaagatttaatttcaacagcagattattcaacaaaagaacttcaatgcaaaggctgtgaaaacaattgtattattaataaatatacttttacaaataagaatacattctattcgggcaacaaatgtgagaaaatatttaccaattcaggagaaaagaaaaagaaaggtaaaaatgtatataccaacaaatacaacttactctttgaaagagaagccttagaaaacataaaacaagatattgtaataggaattcctcgtgccttaaatatgtatgaaaactatcctttctggcatactttatttgcaagttgtggcattaaaaccatactttcggagccttctacctttgcaaattatgaattaggagttcattctgttatgagtgataatatttgtttccctgcaaaacttacacatagtcatatatataacttaatagaccaaaagggagataggatattcttaccttatgttatatttgagaaaaatgagactaagaaatctgtaaatacatataactgccctattgtttcgggttattctgacgtaattaagagtgctataaataataatatccctattgactctcctacctttaattttaaagatgatgatttgctaaaaaattgttgcagaaaatacttaaagacattatcaattgatgtaaaaacaattgataaggcaattattgatgcaacaaaggcacaagaagcatataataaggaaatagaaaacctaaataataagatttataattcaaataaaggcaaaaagaaactaacaattcttttagctggaagaccttatcatactgaccctttaatacaacataaaatatcagatatgatttcggatatgggtgttgatgttatttcggaggatatcgtaagaagtaataatgaaatagactttcaagaagctcattatgtttctcaatgggcttacattaatagaattctaaaagcaactcaatgggtagcaaaacaagataactatgtgcatttcgttcaaatgacttcctttggctgtggacctgatgccttccttttagatgaggtaagctccatattgaaacgccatggcaaaagcttaactatcttaaagattgatgacgttaataatattggctcattaaaactcagagtaaggtcattaattgaaagtataaactatcaaaatgaccaaaagcttaaacaagattcttttgtttcaacccttactttcacaaaggatgaacgccatagaaagattatagctccatatttcactgattttgtttcgccattaatgaactctttctttaaattagctggttataattttgaagttctaccaaaaagcaatattctttcagcagaagaaggtttaaagtatgccaataatgaagtttgctatcctgcaaccttgataattggagatattattaaagcattgaaatctggcaaatataatttaaaagaaaccgctgttgcaataactcagacaggtggtcaatgcagagcctccaactatttggctatgataaaaagtgctatggttgaagcaggttttaaagaagtgcctgttatatctgttgcttttggaaaaagt

SEQ ID NO: 2242 - DNA, 24143 bp, synthetic construct
  misc_feature 1..24143: note = Synthetic
  source 1..24143: mol_type = other DNA
gataggatacgtcgccatacgctttttgctgtttagccgttcctgccatagtctcttcaaccacattccgcaaaccgtcaggaagcatattgctcgtatttgaccagctgctgcgttcgtctttgtcatagagatatgctgcattgatacccaattctcccgatttaccaatccggtaaacattgttgaatgtcgcattgtgggagtgattgaaatagtaaaagcgtttatcgatgccaggagccgatggcattgtgatgccggaaattgcatttgtgcgtgaataatcgttatcaaaagagtagagttcctgcgataagtcttcgcctgtgttgttccccttgtaagtagaaagaaactgattgttgcgtttgaaataggtagcaatggcaccattgttccataaggtgttgttaccatagccatttccaagcgtcgtaattaagttgaatacgccttttacgcccgcttttaagcgaatattgatagaggcttgttcttcgggacgcagccctttcagtgcttttatgtcttgatggctttccaatacctgcaccgttcctacatttttggggtcgatattgttcgtggctatattataatgtcctttcattaagtcgagtccctcaatatagaagttcttgataggcttaccttgataagatatttgtccattttttgctaccgcaatgcccggcattttcttcagtacgtcagcaatggattggtcagatgaggaaagaaaagaagccacattgtaattaatagtatcgccccgcgaatatacttttttagccttaacggtaacttctcttagctcaatggtctttgcatctgctacaatattatgttctcctgaccgattcggtatcttcatgacaacaggtttcatctctattcttgatacacggagcagcagactgtcgctgttacagccaacagttacttggtacttgccctgctcatcggtatatgctgatgcgagtatcttgttaggcgattggggatttgcaactataatactggcaaaatccattacttcgccggaagtattctttacgtttccccaaagtttagtttgtgctgtctgactatataatgaacaaggcacaaacaataagaataacatataaagacactttcttcccatttttcttatttgcttagatttcaacagattgtcttttttgtatatctgtagacaaatataggggaaaaaccactactattccaaaattgtctgcatctttttcacagaatttgccttttttcaattttattgtctttctgcttacttgcacaggtaatgctataagaaaatgtacgatgaacaactttcttttctactttttacctaaactggagtatgattgcacgctgccggagtagcattgcaccctgcaactacgaatttatgccgtagccaaacagtgcaaaatcgcctttcagtgggtcgtcgggaaaaactttcaataaagtatcggtcagtcggcgtgctaccgacattgttgccgacgaggtgttcagcagtttcaagtgggttgcttgctgcaatacgtgtgtgtctaatggaattataagcgaccgtttgtcgatgaaatcgtgccagattcccaaatcaacgggggaattgttgcgcaccaaccaacgcagaaacatacagatacgtttgcacgacgacgaggtgtttttaggcacaatgcccactacctgccgttctgcaaagaatgcacacagtgcttctacggcaacaatagcttctattttatcggttgtttcgccgattttctcgcttgcaaaatgttttatatactcggctatactgccatagcggttcagcatttcggcaagcacagagaaaaacgagtacatggtatggttggtataaaggcgataaaagcaagtggaattatcgggaatatctcgccgaaaaccttctttgactatccactcgtagggatttccttttgcacaatcgagcaggaactgaatgcgtggcataaacaccttgcgtgaaccgtagctcaaacacgctgccacaaaagccataacttccttgttttgcctgccatctacttggtgcataaaccacgatgggtcgccgtcaagaaagttctcgttctcgtataaagcagcaaaagctacgagtttttccttcgtagctttgcttattcgttgtgcttgtttcacaattatgcctttattccgcccctaacttcaagatttgttcggcgtgttccttcaccttgatttgctttggagtgaagatttcttctatcacaccctcttcgtttataataaaggtggtgcgataagtgcccatataggtgcggccgcacattttcttttcgccataaacgccaaacgtttcgttcagtgtcttgtccacatcggctatcaatgggaaaggaagattgtatttctcgatgaacttcttgtgcgatttctcgtcctgaacactcacacctattacggcgtagccacgcttctgcatcagctcgtagttgtcgcgaaggctgcaagcctgcgatgtgcaaccgggcgtagaatcctttggatagaagtaaagcacaatcttcttgcctttatagtcgcttagtttaatctcttttccgtcttggtcggttcccaacagttcgggagccttgtcgcctatattcatactttaatgtgtttaaattgttttattgagttactactgttgcaaagttagtcattatttttgtatttattccattttcagggtataatctatataaaattaaagagttggtattgcacactcggaagataagttataatttacaaacgatttgttttttatatgttttaatatcttttggtagcctatacaacactttttacaacatcttggtaacatttttgaccaatattcgaacaaatatgttaaaagatgataataaagagaatgtttttgtcaataaaagtaccaaccatagtataaaaatcttatttttgcattaatacaatacgaaaacaaacgaaaacagtataatggaacttatagtaattgcagaattactcgtggttttggctatgatatttatcggcgcacgagtgggaggaattggattaggtatttatggcatgattggcgtgtttgtccttgtctttggtttcggacttaaaccaggctcagtaccaatcgacgtcatgatgattattgttgctgtaattacggctgctgcagctttgcaggcatctggtggcttggagtatttggtaggaatagccgccaaattcttgagaaagcaccctgaacagattacttacttcggtccgctgacctgttggctgttctgcgtcgttgcaggaacagcacacacgtcttattcgttgctgcctattatttccgaaatagcacaagccaacaagatacgccccgaacgcccgatgagtctgagcgttattgcagcctcgctgggaataacgggaagccccgtaagtgcggctaccgctgcattaatcagtcaggatattctcggtgcaaaaggcatcgagctcggcactatcctgatagtctgtattcctgcatcgctcattgctatcttggtagcagcctttattcagaaccgcgtaggcaaggaattggaggacgaccctgaatacaagcgcagagtggcagagggtatcatcaaccctgaagaagacaaacacaaccttgaaatggcagaagaacaacctaacccacacgcaaaatactctgtttgggcattctttgcaggcgttatcttggtggttatcttcggtttcttccccaaactgcgccctgaaggcgttacaatgagccagacaatcgaaatggtaatgatgtcaattgctgcagtcatactccttgttggcaaggcaaaggcaagcgatgcagtgaatggaaacatattcaaagcaggtgtgaatgccgttgtagccatcttcggtattgcgtggatgggaagcactttctatctgggcaaccaagaatacttgaacaatgcactgtcgggtatgatttccactgcacctttcttgttcacagtggcattgttcatcatgagcattatgcttttctctcaagccgcaaccgtaactaccctctaccctgtgggcgtagccttgggcatcaatcctatgttcttggtggcaatgttccccgcttgcaatggctatttcttcttgccaaactaccctaccgaggtggcagcactcgacttcgaccgcacgggaacgacgcgcgtgggcaagtatgtaatcaatcacagcttccaactgcctggctttgttacaaccatcgtttctattggtgtggctgcaatcatcgtgcagttcctttaaagaataatgaaggtaaaaagaaaactaaacattaacaacttattaaaattcaatttattatgagaagatttaagatttcagttctattggtattggcactgttggtgtcttcagtggtattagcacagaaacctaagattcgtattttggcaacaggtggcacaatcgcaggtgtttctgcatcggcaacaagctctgcgtatggtgcaggacaagttggcgttcagactttgatagacgccgtgcctcagataaaggacgttgcaaacgtttcgggcgagcagattgtaaacatcggtagccaagatatgaacgacgcagtgtggttgaagttggcaaaacgtatcaatcagctgttgaacgaagaaggttacgacggtgtattggttactcacggtaccgacacaatggaagaaacggcttacttcctttcgttgacggttcactctgacaagcccgttgttttggtgggttctatgcgcccttctaccgctatcagtgcagacggtcccgctaacctctacaatggtatctgcgccgtagccgacccatcttcaaaaggacagggtgtaatggtttgtatgaacaacgaactgtttgaagccaaatcggtattgaagacacataccacagactgcgcaactttcaaaggcggtatttacggtgaaatgggttatgtttacaatggcaagcctgtttatttgcacaagccaatggcaaagcaaggacttcaatcagagttcgatgtaaagaacttgaccgcacttccaaaggtgggaatcgtttacggctacgccaactgttcgccacttccgatgcaagctttcgtagatgccaagtacgacggcattgttttggcaggtgtgggcgacggcaacttctataaagatgtgttcgatgttgctttgaaagctgtcggcaacggcatcaatgttgtacgtgcaagccgtgttccgttcggtcctaccaaccttaacggcgaggtagacgatgcgaaataccacttcattgcatctttgaaccttaacccacaaaaggctcgcgtgcttctgatgcttgccttgacaaagacgaaagattggcagaagattcagcaatacttcgctgaatactaatcgccgcatataaaatcgtaaaggagcgagaaggaaatatcgcccctttacgatggaaacattgagagaaaaccacttttcctactcacaacataaagacaaagaattatgaaaaaaacgatacttttaagcgcattgttggcaattgcaacaagcggaatggcacaagacaaccacagctatggtgctggagacggcgatttcaagtcgctttctgaagaagttgcgaagctgaagaagcacaacgacatgttcaacgtttatttcaactacgctgcttcgggtcagatttcacaagatgcaaacaaggattggggcacaaggtttgccaacaagcagttgcgcatcgaaataaaaggtaacctgaccgacaagctttactaccgtttacgccaccgtttgaacaaggcgaacggcgcacagagcgaagacaacttcgccaaggctaccgatattatgatggttggatacaagttcaacgacaaactgaagattgaagcaggtaagatgtgccagatttggggcggtttcgagttcgacgaaaatccaatgtacatctaccaatactccgatatggtagacaatatggacaacttcatggcgggtgtggtactcagctacaagccagtacccacacaagagcttgcctttgaggtgagcgatgcccacaacaacaaatttgcaacagagtatggaagcaaccccgtatcgttggaaaagaacggagtccgccaattaaaggcttcaagaaatccgctcacctacattgccaactggaacggaagcttctgcgacaacaagttgctcacacgttggtcttggggaatacagacgcaggctgagcacaaatactctcgcatgttggttttaggtcagcagctaaaccttccgaaaatgcaatggtacttcgactatatgggcgcattcgacggtttagaccgtttgaagattgcatcaagcgaagcaacggcagtacctgcacatacaggagaatcgtatttcagcgacgttcactacaactcattcatcacaaagatgaactggcagtttgctcctcaatggaacttaatgctgaaaggtatgtacgaaacagcaagtgtaacaaagatagagcagatgaaggactatcgaaagagctacgcctatatgggcagcatagagtactaccctgtaaaaagtcaggacttccgcatcttcttggcatacattggccgcaaatacgactacagcaaggcttcaggattgaaggattacaacacgaatcgcattgagattggattcatgtacagaatcaaagcctactaaaatctaaattaagaaatagagtatgtcagcttcggcatactctatttttactttatgacactgggtaaaatattgtcataaagctaagtaatacagcacttattcagcctgaatgagatgttttccgtccaaaacgaaacgattagtttctcagatgtaagataatgcgtacagaatggtggctttgcgtcttttaaaccattcgttaaatattgctaactttaaaatgtttcgcactaaaacttcccccaccaactaataatttgctacatttgcattgttaagcaaagatggaagactgaactgtagacaacttcttaccagcactattctatctgtgaaaaagacagagtacaacgaacttaaacacaatatctaattaataaaatttgcatacaatatggcaaacgagacaaacaacaaggaattccgtattgaaagcgacctcttgggcgagcttcaagtaccagctaacgcatactacggtgtgcagacacagcgtgcagtgaacaactaccatatctctggaaagagaatgtgcgactacccagactacgttatcgcaatggcttacgttaagttggctgctgttgaaacaaaccgcgagttgggcgaaatcaacgacgaaatctgcgacgctatggcacaggcttgccgcgaaatcatcgacggtaagttccacgaagactttgttaccgatatggtacagggcggtgcaggtacatcggtgaatatgaacgccaacgaagttattgctaaccgtgcttgcgaaatactcggtcatcagaaaggcgagcacaaatactgcgctcctaacgaccacgccaactgcggtcagtctacaaacgacgcatatccttcggctatccacttggctctaatccgtatgaacaagacgtttgtcgagaaattggcaaagctggttgcttctttccgcaagaaggcagaagagttcaagaaggacatcaagatgggtcgcacacagctccaggacgctgttcctatgacaagcggtcaggaattcaacgcattcgccaacctgctcgaagctgaaatcgccaacttgaacaagagtgcagaaatgttcctcgaaatcaatatgggtggtactgcaatcggtactggcttgaatgcagcaccaggcttccctgaaatctgcgcaaagaaactcagcgaactgacaggtatgccattcaaagcaagcgaagacctcgttgcagcaactccagataccacagacctcgtgaactatagcggcgcaatgaagcgtttggctatcaagctttctaagatttgcaacgacctccgtcttatggcttcaggtcctcgctgcggtctccacgagattaatcttcctccaatggcaccgggttcaagcatcatgccaggtaaagtgaaccctgttatccctgaaatcacaaaccagacttgcttcaaagtgattggcaacgacacaaccgtaacactcgcagcagaagcaggacagttgcagctgaacgttatggagcctatcatcatgcagtgcttggtagaagacattacatggttgggcgaggctttcgacactctccgcgagaagtgcatcgacggcatcaccgtaaacagcgagcacaacgcagctaccgtaaagaactctatcggtatcgtaactgctcttaacccatacattggctacaagaacagcacgaagattgccaaggaagcactcgaaacaggcggttctgtttacgacctcgtactcaagaacggtgtcctcacaaaggaacaactcgacaagattctttctccagagcacatgctcgattcagaagaaaaggtaaagtaaggcgaaaaccttatcatacataaagctttaaaaactctgtgcagctttgcacagagtttttttatacgcttatacaacattctaattacaatcaagcccaacctaacggcaaaaccaacaagcaggcagcaaagatatgggcaaccaaagttataaatactgctacgcctcttgaatgcgatgagtaattataagccaagaagagaggaccgataagcggtgcagccatggaaattaatacgtaaatcagcttaacataaaatccttgcccagatactataaattgtgcgagagcgaaaaggaatataaagtaaaaaaaagccaatacacccatagtataatgttttatagtgtaaaactaaagttaattacgatttatttatcatcaataataaaaagagtgagaaagtgccgttcttacgtccgccgtcctaattcttggttcttccacacgtgcaaatccgagtcatacggttggttgtggcacctacgccttctcttcgggttcatattaacacgcattcggttacttcagcccattgaaccacctattacccacaaggattgtatcgctttatcatatccgattttaagtattgcatttgcaaagatactatatttattttgacagaacaacggtagtgctcaaaaaacaatccacaaactattccataaattaaaataatagcaacagaagcgttccaatttattgttctaaaatcaagtaaatggggcaataaatttaacacaagcggaaaggggaaaatagagaaaaagagagcaggaaaataggggtggaaaagcaaaagagccgcttttgcaatgcaaaacaataggttttaccgtgcaaaagcggctcttttggattgcaagaacggcacttttgcagagcaaaaagatgatgatggagcgtgaaatataacctatatgcgaataaaagtgttcattctgcaacataaaaggtatgatttcgttgcacaacactacccaataagcttgcaagaagctatgaacgaagcacttatggtagcacgcaaataatggcattatttgcaaataaataatttaaagtgcagaaaagtgcccgtaattccgaagttgaggttctgaattttaaccattcaggagtcgatttaacaaaagtttagaaacaaagaattaccattgtgcaaccacaaaaaatctattgaacctacaatattgcacacgaaagctaaaatgcagacataaaaaaagccccgttataaggacgaggcaacctaatgttctcacaacggaaaaatccttattgtgaatactttaaaattagtaatgcaaagataagggtttattacataacgtgcaaggtttttcaaataaatttttctctgaattaaaatattttttgtaactttacacaaaatatcaaaataaccttattaatatgaaaagaatattaggattagatttaggaaccacgagtataggttgggcgttggtaaacgaagccgagagcaacaacgaagcatcttccattgttcgattgggtgtaagagtaaatccactgaccgtagacgaaaaaagcaactttgaaaaaggaaaagccataacgaccaatgctgacaggcagttgcgtcatggcgcaagaataaaccttcaacgttataaacttcgcaggcaaaaccttcacgactgtctgcaaaaacaaggttggttaggcaccgaagcaatgtacgaggaaggcaaagcctctacttttgaaacttataaacttcgcgcaaaagcagccgaagaagaaatatcgttgcacgaatttgcccgtgttttgtttatgttgaacaaaaaacgtggctataaaagtaaccgaaaagcaaacaacaaagaagacggacagcttttcgacggtatgaccatcgccaaaaaactctacgaagagcacctaactcctgcagaatattcacttcagctgcttaataaaggcaagaagtttacgcaaggctactatcgttccgaccttaatgcagagttggaaagaatatggaacgagcagaaaaagtattatcccgagatactcacagacgaatttaaacaacagttagaaggcaagacaaaaaccaatacaagcaagattttccttggcaaatatggtatttattctgccgacttaaaaggtttggacagaaaattgcagcctttgaaatggagggttgaggcgttacagcaacaagttgataaagaggttttagcctttgtcatcagcgatttgaaaggacaaatagccaatacaagcggactgctcggtgctataagcgacagaagcaaggaactttatttcaacaaacagacggttggacaatatctctgggcttcgttagaagaaaatccgcatatcagcataaagaacaaacctttctatcgccaagactatttagacgaatttgagaagatttgggaaacgcaagccgctttccacaagcagctaacgccagagctgaagcaggaaataagagatattatcattttttatcaacgcccattgaagagcaaaaaaagtcttatttctgtttgcgaacttgagcaacgcaaagtaaaagcgacaattgatggcaaggaaaaggaaataacaataggtccgaaagttgccccaaagtcatcgccagtattccaagaatttagaatttggcaaaacttaaacaatgttctgcttattgataatgacacgaacgaaaagcgtccgctcgatgaagtcgaaagaaacttgctgtatgaagagctaagcattaaagcgaaactaagtaagactgaggctctgaaaatactgaacaagaaaggcaagcaatgggacttgaactataaggaattggaagggaaccgcacgcaagccattctcttcgattgctacaatcgtatcataacgctgacgggacacgaagaatgcgatttcaaaaagataaaggcttccgagattcgccgtcgtgtttccaccattttcaagaacttaggtttcagcaccgaaattctcgattttgacccatcgttagaaaagcacgagttggaaaaacaacctatgtaccagctttggcatctgttgtattcttacgaaagcgataattctcgaacaggcaacgaatcattgctaagaaagttggaaacaacctttggcttccccgaagaatatgctactgtgctttgtgatgttgtttttgaagaggattatggcaatctcagcgtgaaagcaatgcgcaaaatactgccttatcttcaagcaggaaacgattacagccaagcatgtgcatacgcaggttataatcattcacgccactcgctcacgaaagaagagttagacaagaaggtttataaggaaaggttggaactgttgccaaagaacagtttgcgcaatcctgtcgttgagaaaatcctaaatcagatgattaatgttatcaacgctatcattgacgaatacggaaagcccgacgaaataagaatagaaatggcgcgcgaactaaagagcagtgctatcgaacgagagaatcgcacacgcgccatcagccaaggtaatgctgaaaaccaacgtatccgtgaaattctcgaaaaagaatttgcactttcatacatcagtagaaacgacattataaaatataaactgtacgaagaacttaaaccgaacggctttaagacgctgtattcagatacgtatattcctaaagacaaactcttttctaaagactttgatattgagcatatcattccgaaagcacgcttgtttgacgattctttctcaaacaaaacacttgaagcacgcgatataaatcttgccaaaagcagtaaaacagctttcgacttcattaaagaaaagtatggcgaggaaggtgctgaagcatataaaaagaaacttgatatgcttttagataatgacgttataagcaaggcaaaatacaataagctattgatggctgaagctgatattccttcaggctttatcgaacgcgaccttcgcaatacacaatacatagcaaagaaagcgtgcgaaatcttgggtgaattggtaagaaccgttacaccaacgacaggagaaataaccaatcgcctgcgtgaagattggcagttggtagacgttatgaaagaactgaactttgaaaagtacgagaaattaggcttgaccgaaatagttgaagacagagacggaaggaaaatcaaacgtataaaagactggacaaagcgcaacgaccatcgccaccacgcaatggacgcactggcaatagcctttacaaaaccttctttcattcagtatctgaacaaccttaacgcacgaagcaataaaggcgacagcatttatgcaatagaaaataaagaattgcattacgaagagggcaagctccgcttcaatgctcctatccctgtcaatgaatttcgtgcagaagcaaaacgtcatcttagcgcaattttagtttcgattaaggcgaaaaacaaggtgatgacgcagaatgtaaacaagataaaaacaaagcacggaataataaaaaagattcaacttacgccacgtggaccactgcacaacgaaactatctacggcacaaagatgcgccctataataaaaatggtgaaggttggagctgcgttagacgaagctacgataaacaaagtgagtagtcttgccattcgtgaagcattgcttaaacgtctcaatgaatacagcgaaaacgctaaaaaggcgtttacaggaaagaatacattagagaaaaatccaatttatctgaatgttgaacgaacaaaagtagtccccgcattggtcaaaacagtagaatgggaaaactaccaccctatccgcaaaccgattacaccagactttaaagtcgataaagtaattgataaaggcataagagatattctgaaagcccgcttagaagaatttaatggagatgcgaagaaagctttcagcaatttggaggagaatcctatttaccttgacgaagcgaagaaaatagctttaaaacgtgccagcattgaaggtgttttaagtgccattcctttgcatacattaaagaatcaggcaggcaaacctataacgggaaaagatggaaaacctgtattaggcaattatgttcaaacaagtaacaaccaccatattgcgttttattacgatgaagatggcaacttgcaagacaatgctgtatcgttcttcgaagctgccgaacgtaaatcgcaaagtgttcccgtcattgataaagactacaaccgcgataaaggttggcgtttcctattcactatgaagcaaaacgaatacttcgtgttccctaatgaagcaacagggtttatcccttctgaagtggatttgacggacgaagctaactatggcattataagtccaaacctatatagagttcaaaaaatgtcaaggattgaatatggaaagaccatagttcgagattatgcttttaggcaccatttggaaacgaccgtagaaacaaatgccaatcttaaaggaatagcatataagcaattaaaatctttaccgcattttaaaggtattgtcaaggtacgtgtcaattccattggtaagatagttgcaataggtgaatacgattaatgtagttggcttatgataaagaaaacattatgttttagcaatccagcctatttaagtttgcacaatgcacagttatctatccgtttacccgaagtagaaacttgcaatgatttacctgacagttttaaaaagcaaactgaacgtacaattccaatagaagatattggagttgtactgctcaataataagcggataaccatcacatcgtctgcattagaagccttgatagaaaacaactgtgcggtgattacctgcgacagcaagaatatgcctatcggacttttgctgcctttatgtggtaacacaacgcaaagcgaacgtttccgcactcaaatagaagcatcgctaccacttaaaaaacaattgtggcagcaaactattaagcagaaaataagcaatcaggcaaaacttctaagcatatacaccaacactgatgtaggctgtatgtacgcctgggcagacaaggttaggagtggcgaccccgaaaatcttgaagctcgtgcagcagcttattattggaaaaaactcttttctgatattcctgacttcataagaggacgcgaaggcgaaccacccaacaacctattgaactatggatacgccatattacgcgccgtggtagcacgctctttagtcgccagcggattgctccctacattgggtattcaccaccacaacagatacaatgcctattgccttgctgacgatattatggaaccttaccgtccttatgttgatggattggtgttagatgtaatggcatcaaccaccgattacaatgagcttacaaaagaaatcaagatgaaactccttgctattccagtactcgatacaacaattgggaataagaaaagcccattgatgatagctacacaacagacaacttcttctctttataagtgctttagtggagagcaaagaagaatggtttatcctgaattataaagcctattagtggaaacttatagatttagtcaatacagaagtatgtggttaatggtattttttgatttacccacagatacaaagaaagaacgaaaagcagcttcactctttcgtcaaaacttgctgaaagatggatttacaatgtttcagttctccatttatatacgccactgtggtagtaaagaaaatatggaagtacacatcaaaagagtttccacctttattcctgcatacggaaaagttggaataatgggcattacagacaaacaatttgaagaaataaagctattctatggcaagaaaccacaaaagccaaatgcacctggagcacaattagaactcttttaacccttcttttagaaacaataaagttccattcttgacgagtggaactttattttgcttgcatttttctttctctctaagctttcgtaacaacactgatattcattactttaagccatttgagttgtatttaccaatgcaaagatactaattttaaagctaatcacaacctacaaggtgctcgacttgtttgcacaagggttgtatttaccaatgcaaagatactaattttaaagctaatcacaaccccatttccaagcgatgtttttactaatttgttgtatttaccaatgcaaagatactaattttaaagctaatcacaacgggggaaataatcgagttcggggactttgtgttgtatttaccaatgcaaagatactaattttaaagctaatcacaactaagccaaaacacgcctatttagagcctatgttgtatttaccaatgcaaagatactaattttaaagctaatcacaaccaatggcacacagaaagcgtggatagaaagttgtatttaccaatgcaaagatactaattttaaagctaatcacaaccgccgttatcgcaaagtaatacccgacgttgttgtatttaccaatgcaaagatactaattttaaagctaatcacaacagttgctataactattcatttaaagctgctgttgtatttaccaatgcaaagatactaattttaaagctaatcacaaccgcaagctcttcgcaatgctcatactttttgttgtatttaccaatgcaaagatactaattttaaagctaatcacaactttcagtcgatagaagctctttggactacagttgtatttaccaatgcaaagatactaattttaaagctaatcacaactttcttctcttctttcccattgtttttttggttgtatttaccaatgcaaagatactaattttaaagctaatcacaacgcttgacgcacttgctaaaaattatgaagagttgtatttaccaatgcaaagatactaattttaaagctaatcacaacacaccccgttattgtagtattggggttgtcgttgtatttaccaatgcaaagatactaattttaaagctaatcacaacctgtaagtcgtcttcgttggttgtaaacatgttgtatttaccaatgcaaagatactaattttaaagctaatcacaactatttgcgtataggagaggcaggcacggaagttgtatttaccaatgcaaagatactaattttaaagctaatcacaaccactgggtctaacgcctgctgctcttttaagttgtatttaccaatgcaaagatactaattttaaagctaatcacaacctttatgaactctatgtgctctatcagaacgttgtatttaccaatgcaaagatactaattttaaagctaatcacaacataatttaaaaaatttattgttaattgatagttgtatttaccaatgcaaagatactaattttaaagctaatcacaaccttttaggaagaagcccgtcagcttgcgccgttgtatttaccaatgcaaagatactaattttaaagctaatcacaacaaatggaggttactcctgaagaacaagaccgttgtatttaccaatgcaaagatactaattttaaagctaatcacaacccatcggttactgtatagctgcgctgttcgttgtatttaccaatgcaaagatactaattttaaagctaatcacaacgcaaagaataggttggaaacttccaaaatcgttgtatttaccaatgcaaagatactaattttaaagctaatcacaaccagcacgttggaagcagctttcttgcgtatgttgtatttaccaatgcaaagatactaattttaaagctaatcacaacacctgttgcagacacgagaagagcgtatcagttgtatttaccaatgcaaagatactaattttaaagctaatcacaacaaatactcgggggtcgttatttgatactctgttgtatttaccaatgcaaagatactaattttaaagctaatcacaacactaagccctgaatatgtacttgataagagttgtatttaccaatgcaaagatactaattttaaagctaatcacaacagatacactaattgataacccactaagcgagttgtatttaccaatgcaaagatactaattttaaagctaatcacaacgcctttggaatgtgtagtggcttccattgggttgtatttaccaatgcaaagatactaattttaaagctaatcacaaccgtattgtaatcaactttatttctatttaagttgtatttaccaatgcaaagatactaattttaaagctaatcacaacctgcacactttggttttaaagttcctgaagttgtatttaccaatgcaaagatactaattttaaagctaatcacaactgacagaatgcagatgtggaaagagaaattgttgtatttaccaatgcaaagatactaattttaaagctaatcacaacgaactacttaataaattcaatacagagggggttgtatttaccaatgcaaagatactaattttaaagctaatcacaacaattgcgaccatatcatagaagtagctgttgttgtatttaccaatgcaaagatactaattttaaagctaatcacaaccatcagaggaaactggtactgagaacccaagttgtatttaccaatgcaaagatactaattttaaagctaatcacaacccttcttcaaaggtaatgataacaccgtttgttgtatttaccaatgcaaagatactaattttaaagctaatcacaaccccctaacccctaagttatgaagtttggtagttgtatttaccaatgcaaagatactaattttaaagctaatcacaacaataggaataggttaattaatgctgtaaacgttgtatttaccaatgcaaagatactaattttaaagctaatcacaacgcaattatctttaacacttagtaacggatagttgtatttaccaatgcaaagatactaattttaaagctaatcacaacaatacaaaatggaggcagcgcaaaggcggcgttgtatttaccaatgcaaagatactaattttaaagctaatcacaactctggatcaagagccttttcagagtagtcggttgtatttaccaatgcaaagatactaattttaaagctaatcacaacatatttctaagtgttcttggtaaaagtaccgttgtatttaccaatgcaaagatactaattttaaagctaatcacaacaatctaagtttatagtatttttaaaaaatagttgtatttaccaatgcaaagatactaattttaaagctaatcacaacgcggtgcgtcctaatttgcgtcgtttgttgttgtatttaccaatgcaaagatactaatttaaagcaatcccaactaacgacatttccgatttattgttctaaaatcaagtaaatggagcaataaatttaacacaagcggaaaggggaaaatagagaaaaagagagcaggaaaatagggattgaaaagtaaaagagccgcttttgcaatgcaaaacaataggttttaccgtgcaaaagcggctcttttggattgcaagaacggcacttttgcagagcaaaaagatgatgatggagcgcaaaatataacctatatgcgaataaaagtgttcgttttgcaacacaaaaggtatggtttcgttgcacaacactaccctataagcttgcaagaagctatgaacgaagcacttatggtagcacgcaaataatggcgttatttgcaaataaataatttgaagtgcagaaaagtgcccgtaattcggaagttgaggctttgaaatttaacagttgcggagtcgatttaacgaatattcagactttaacaaatgaaggtatgcaaccactgaaaataaaacacgctacattcaaagctgcttatatggtgaaagaagataattaggtagtaaaacttgattaatcctattttttgccgtacctttgtccccaaagtatagaaaatgaatgttttaagcgttgtttccaaagttttagagaaagtaagctacccgattaggggcaatttctgctttttcttctttatgtatctcgttggtatcgttgtttcttatgcggaacttcctgccaatcaagaggacgcatcggtatatggaaacttatggttggaactgtttttcgacctatacatcgtctgcattcttctttcactgatacccaaacgtgtgcgccgctgggtggttggagcgttttatatcatcgcctacgcaacaagcatagccgaccttttctgttgggttaaattccaatcgtccctcaatccgtcgatgttgctattggcagcagaaaccgacaagcgcgaggcaagcgagtttttcagcagttatatcaattccgaagtgctcgcatcgagcgtcgggttgctgctgctcatcattgttgtgcactgtttactcgcagtttggaatatctaccgcaagcgcaaaggcataaaacacccagtacagctaaacatattgaaagataaaagtgcccatttcatcgggataatcacactctttttcttcgttgtttcggcaatttcgtcgtaccacaacaagcgtgaaatggtgcagatgttctcattgaaaacgattggtgaagtagaacacgaacttacgacacccgattgtgcaacgttctacacgcctgtttatcgacttgtattcagtctttacgccaatcatttggctgcacagcaaatcgacagattggtagaagcgaaagaccgcgctacggttcagagctgcaccttcgatgcaaaaaacatcgtgttaatcatcggcgaaagtatgggtccgcatcattcgcagcaatatggctactttatgaataccacgccacgccaagttgccttggagaaatcgggatttcttgtacctttcagcgatgttgtagccccatggaaccttacgagctttgtgttcaagaacattttttcgatgcacgttgtagggcaaaaaggcgagtggtgcgactatccgctcttcccacagctgttccgcaaggcgggctaccacgtgtctttcatcaccaaccagttccttccgcaagccaaagaggcagtctacgacttcagcggtggatttttcctgaaccacaaggagttgtcagagtcgatgttcgatacacgcaacacacgcctgcacacattcgacgaaggattgcttgccgactacgacaacaagctgaaggcagaaaacaaagaaaataacttgattatattccatctcatcggcagccacgtgtcctacaaccgacgttatccgaaaagccgaaagtatttcaaagcggcagattatgagcaaaaacgcccagaactaacgaaacaacgccgctatatgctggcacactacgacaatgcaatattgtacaacgactcgatagtagaccaaatagtgaaacgctttgccaacgaagaagcggtggttatctatatgcccgaccatggcgaagagtgttttgaaggcaaccgaggcattatatgccgcaaccattctgccgagattgattacgatttggcacgctacgagtttgcagttccgttctggatatactgctcgccaaaatatattgaaaaacacccgaaggtgtttgaacaaataaaagcagtaaggcataaacgctttatgaccgacgccttgccccacttgctgctccatttgggaggcataaaggcaaaagactatcacagtgagtacgacattctgagtccgcaatacaacgagaagcgtccacgaatactgaagaaccaaacgaactacgacgatttggtggctgaacataaacgaaaagcagcgatgaaaccgtagatttttaaagattacaagcaataaaaatggatagcaacactaacagttctgcccacaaaggtatggtcgataagatgctgaaccgcacggaatgcaacatcttgcgaggcattgccattgtcgggatagtgcttcataactactgccattggcttcgccctatcgtaaaagagaacgaataccaattcaaccaacacaatgtggactggttcaacaacgttatggcacacggtttcaacgaacgcacgtttttccatctgctatcgttctttggtcattacggtgtgcccatcttccttttcctgtcggcttacggcttggtaatgaagtatgaaggtgtaaaaacacaaagccttcccgacagcggcagcacaaacgaaccaaatgcgtttagctttttacgctaccactggctgaaactcttccgtatgatgatagttggctttgcagctttcgtattagtcgatgctatgaccgagggacaacaccattacgaagtgatggacattgtggcacaaatgggtttgttcaacaatcttctgcccaatcccgatgacattatatggcctggtccgtactggttttttggcttaatgcttcagctatacatcgtctaccgcttgttcttataccgaaaagactggacgtgggtggtggctttcattgctgtttgcaccattatcgaactgctgtgcgaccccaatggcgagccattaaaccgttggcggtacaattttgtcggtggaatgctgccttttggcttgggtttgctttatgcaaagtatatgcggaacgtttctttgcgcatttatggggcaacgtttatagtctcgttactcttcattcggtttggcagcaaccactttttcacgtggcttttcgtgcctatgtttgtgtgttcggcaggtgtcagctttgtcaagctgctttcgtattggaatacgcactatctcaaatacacttttggaataacaaaaactttcgattggttgggagttatatcggcagcactgtttatctcacaccccattacacgaaaaataattatccctatatcgcgcggtggcgactattggacggggcttttgctctacatcattgcttccgtctgcgtggcgtggttgttcaaggaaataatgaggcgtgtgccttcaccaaaattgtgaaatgaaaagaaaagaaatagaacttgcaaacattagtcggtttcgtggcgaactgatgggcttagcgatattgttcgttatgcttttccacgttggagtgccacgcacggatatgttctttggtcttcggcgtatgggaaacatcggtgtcgatatgtttttcttccttagcggtgtcggactttggtattcgtggacgaaaaatgccgatgctatgcaattccttaggaaacgacttctgcgcatttatcctgcgtggcttatcgtggcatcgctgtattacatacccgatttcctctctctcgcttgggtacagcacagcgggcacagcacaaatattatcgatttaatcggcgatattgcgataaattgggacttttggctgcacgacgaacttaccttttggtacattcctgcagccatgatgctgtatttggttacacctgcctacctgtcgcttatcataaagcacccaacctaccgatggattcctgcacttatgatagcttggtgcatagttgttcagtacgtttcgcctatccacgaggctgttggatacatcgaaatattctggagtcgtgtacctatttacttcatcgggctgaactttggagcggcagtaaaagaaaaaagaacattggaaggcagttccatttggctcatactattgacgtttgcaagtatgcttgcagcttgtatctatttggaacaggcacgacacggacgctttccgctattcttggaacgtatgttgtatattccgctcaccataacaggcatattgctgctttgcattgcattagacaagtggtcaggcaaacgcctacacaaggctcttatattcgtgggcagcataagtttagagatatatttgctgcacaaccacttcatacttatctacatcgaacagcttgggtggcactattgggcaaagttccttgcaacgcttgcaatagttttacccttcgcatggcttctgcacaaaggagtggagaagataacaatgaaaatagaaaggagttaggaaaatgaaggaaattatcagattaatacgaccgcatcaatggattaagaacctcgttgtgctatttcccatcttttttggcaaagctttgggaaacatagaatcgctctacgaaggttgcatcacgatgattgcattctcgtttatcgcttcttctatctactgtctgaacgatattgttgatgtagccgacgaccgtcgccaccctaaaaagtgcaaccgtcctttggcatcgggcaagataagcatcgcacaaggttatgccattatgagcataattgtgattttatcgatggtttcgctactttttctaccccaaaagcgcatagaaacgggcggagtcatcggcttttattgggctttgaacgttgcctactgtttgtatttgaagcaacacgccattattgatgtttgtattgtggcgtttggtttcgtactgcgtattctggcaggaggtatggcaaccgacatacgactgagcaaatggattgtgctgatgaccttcctgcttatgcttttcctttcgtttgctaaacgccgcgacgacgtcttgcgtatgaacgaaacaggcgaagcaccaagaaagaacaccatccgttataatctgacgttcattaatcaagccattaccataacggcaagtgttactttggtgtgctatattatgtacacggt

SEQ ID NO: 2243 - DNA, 24143 bp, synthetic construct
  source 1..24143: mol_type = other DNA
  misc_feature 1..24143: note = Synthetic
ggaatacttttatagttcattccagtctcagtctttccctgctctgccattttatccttattcccatatttcaatatgacattcaataatttatacttcagagttttttttcgtaataattccactgacaaaataagaactccgtttacgactacacctatagaaatatttgagtctgtttcagaaacatttatatccgcaggtattatctcatcaaaattatgatactttttaagaatgttatcagcattaggcggatcgatataacacgtttttttgccatcatgccataaaatccatacttcaaccattcggtcaataggagtagggttagtttcccagtttagaacccagatgctacaattactaaaatgaagtccaggtataataaatccttcaaaaggtaataaattcataaccaatcacgtgtttaaattatttacttatagttatcccaaattctctaactttcaattctatttttcgtatgtttatttttagacaaaaataaacatacttatcctttcaactccttaacaaatgtcagttaatttattacacgtatttattttggagtttaatcgattttaaaactatactatctcccctcacaaaacatcaccccttgagtatgattcgcgagtaaaaatttgaccaaacatcgctttgcttatgacgaatcagcaatatatctattacttaatccgttatatttgtagtatgaaaaatttcatttttaaaagttataaaaggtttacaatattattttggatattgatagccatcctattatggtttcagagtctgaattatcagacttcatttatggaagccattttattgaccttgtgtatattttcttctatatttctgataaatatcttactcagtaattatctattgccaaaagcgatcagagagaaaaaactaggtgtcttttggggacaatttataggtctaacattacttatgggattaataatggttttgattctggcagcatttagacaacttgaactaagtggctttttttcgccttccaatttattctctgactctgattcattttgggttgactttaaaaatcaaatgcctgctagtatcgttataaatcttgctattgtcggattacgattctattatgaacacatgaggttggaaaagatacatttagaatcagaattgcaggctctcaaagcacaaattaatcctcattttatgtttaatgttttaaatcatatatattactacgtcaaaaacaaagatgatatagcaccgactttgcttctgaactattcagacatacttcgctaccagttgtactgtggacaacaaaaagatgtcaatctagaagaagaattacagttcttgaaaaactttataaatattgaaacaatccgatgggaagataaactagatataaattgtttgtggaagatagaaaatacaagtaaaagaataccaccattactattaatccctttaattgaaaatgcatttaaacatgtttctcggagttcaaatgacaaaggttatattaatattaattttgagcaaaaagaaagtatgatttgtctggaggtggaaaattcgaaattagctattcccgtaaatagaaaggagcaatccggtttaggtttggaaaacctaaaaaacaggttggaaattttattgcacaataagtatagtttatccatacaggaaaccgaaactaaatataattctaaactagtaattcaaatataggtatggcaaatatcatttcaaaagagccggattatcagattttaaaatgtttgattgtagatgatgaattggttgctgttaaagatattattagcaacatagagcaaataagctttctaaaagttgaggatacatgttcttctgcaatagaagcagctgaaattctgaaaaaaaaagagatagacctgatgttcttggatattaatatgccttatctttcaggacttgaattcttagaatccttagataaagcacctttaacaatactcagtacggcatattccgaatatgcattggaggggtacaggctaaacgttattgattatttattgaagcctgttgcttttcaacggtttttccaagctgtacaaaaagcacaagggatatttcaaactcaaatcttattacagaagaatgtggaaaatacccaatccactatgtacatccggcaaggtgactcttttcaaaaaataatatgggaggatattttatttgtagaaggaatgcaaaattatttgaaattacatctgaaaaacaatactttcgtgattcatcaaacaatgacttccttagaagagatgcttcctaaagaatcattctgtagaatacaccgctcattccttgtcaatatttatcagattgataaagtgtcgggtggaaggctttttattaataaaaatgaattacctatttcaaagccaagaagggaggaattattaaattctgcggtttataagaatttgataagtaaataatatttaacagccaatatgctcatatttccaaaagtttcatgtatatttgaacctagaagttaggctcacagcggtctgccaaaacaggacaaaaaggcatctttttaatcgttacgaattcgttacgaacttgcttttttgaaaacttaaataattgattactaaatctattacgagataaaaacgtgttcccagcgggatcacttaagggaacagaactaaaagacagttcaaagccaaaacaagacaaacctctataaattaatgatttatagaggttttttcttttctgtaaagacacctctaagacagtataatatcaaattcggacaaaaaatcgttaccaaatcgttacccgatatatcggtaaaaaaatggtaacgatttattaaataagtccttgatttgtcgattattgcccctgttttgtccacaatgtttatgaaagtatcgagtatttttacaaacaaaaaggtaaacattatgaaggcaacttttagaacacttttctacctcagaaaaaaccgcccgaacagcaacgggcttgtatccatcatggcgaggataaccgtaaatggtcaaataacccaattcaatacaaaattggaagtcaatcctgatatatgggataccaaactaggcaaagtaaaaggtcgtaatgcagatgcaactaatctgaacaggctcttggacaacctgcggacaaaaatggacaaaatctacaataaactgatggatacaaaaggatatgctttgcccgaaaccataaaaaacatcctatttggtattgatcccgaaagaaagacacttcttcaatattttaccttacataatgagcagtacaaactcaaagtcggtaaaactaccagccagataacttactcaagatacgaacttacaaaagaacgagtggaggaatttatcaaaaaggaatacaagctatccgatatcctgctccctgaaatagatttcctattcgtggagaaattttacctctcactccgtaacgaccatgattgcagtaacaataccgccatgaaatttattcagcggttcaggtctgtatttactttcagtattaacctaggagcagaagtaaagataaacccctttgccaattttaaatttcataatgaaaaagtacatcggcaggttttgacgcaggaagaaatcgataccatatatagaaaagagttcctgacagaaagattaagtcagataagggatgtctttatttttatgtgctatacgggattatcatacatagatgtcgcccgattaacagaggattctgtaaaaacagcttttgacgggcatcaatggataatgattcaacgtcaaaaaacgagtgtaccttcaaatattcgtctgttggatattccattagagattattgaaagatacaaagggcaacaaacaaaagggcaattgttccctgtatgctctaatcaaaagatgaatgaatatctgaaagaaatcgctattatttgcggaatcaataaaccaatgacctgccacatagcccgtcatactttcgggacaaccgttactctggctaacggagttcctattgaaaccgtatccaagatgctcgggcataccgatattaaaacgacccaaatttatgccaagatagtcgatcaaaaactaagttcagatatggatagtttagctgagacctataggagtagaaaatacgctaataaataagccctatggaaaaaggatatattaaattctcggatgtaggaactgataaacccattattgaagtaaaaatcgttgatggcacagtttggatgactgtgaatgagatcgctgatttgttcggggtttataccccgacaatcaataagcatcttaaagcaatgtttaaagataatttgctgcgagaaaatgatgttacgaaggaatataggtatacccgaaatgaaggaggagagtatatacgcatttattacaatctggaagttattgtctttttgagctttcgtattcaatcactttatacgaaagcttttcgggaatgggtactcaatgccttttgtgagtatagcgtagagcagaaaagccacgaggttattatggtatttagtaccaacacaaagcagcattcacttaaaacctcgaattgagccagtttgatatttataccctatagggtgtgatattgtaaatatctataaatttataccctttatgatataatttattgcttaattaagtatattagcaccctaaagggtatatttatggaagacctattattatcaggatatgttaagcagatgcgtaagcaatatggcttaactcaaatagacctctcggagaaagcaggggttgggcttcgttttgtgcgtgaactggaacagggcaagcaaacgttgcgtatggataaagtcaatcaggtgttaaatctctttggtgcggaattagctcctgcaccaatagacaaaagtaaacttgaattatgaaacaagctgaaatatatatgcgcgataagtttgcaggaatacttatcgaagacgagaacggttttatttatcaatatgcttccgactatttgaaagatgaggactcagaagctatcagcttaacaatgcctttaaagagtgaaccctataaagatactgtgctgtttcctttctttgacggtttaatacccgaaggatggctattggatattgccgaacgtagctggaagatcaatcaacgtgatcggatgtctttgttattggcttgttgtaaagactgtatcggagcagttagtgttataccagtaaataccgaagacaatgaatgaaaaatgcctgtactgctatcaggaactgaaagaaggtcaagtagattttcacccagcttgtgcgaagaaaatatttggtacaactacagctcctgagttaccttatacaaaagaaaacatatcagcattagccgaagaagtagtccgcagtcaaacgactataacaggtgtgcaaccaaagttatctttagatatagaatcttctaaaaagaaaagcgaaccgaaacggtttacgattgtcggactatggggaagatacatcttaaagcctcaaacagatatgtatccgcatttaccggagttggaagacttaaccatgcacttggctgaaatagctaaaataaagaccgtacctcattcattgattcgttttgcagatggagaactttgctatatcactcgccgtatagatcgggatgataaaggcaataaatttccaatggaagatatgtgccaactcgcagaacgactgaccgaatacaaatacaaaggctcgtatgagcagatagccaagttaatcacgaaatattcgaatgttcccaaattggatttagtgaacttttgggagcaggtttatttctgttggctgacaggcaatgccgatatgcatttaaaaaatttctcgttatatagtacaacaaaaggtatatattctctaactcctgcttatgatatgctttctacaaagcttgttattcccgaagatacggaagaacttgctctgactttaaacggtaaaaagaaaaagcttaaacgttccgattttgagactgctttcggaaaatcagacttagataaaaaagtaattgaaaatatcttttctaagcttgaaaaggttgttccgctgtgggtcgaatttattgagcagtcatttttgagtgaggatatgaagaagaagtatgctgatctgattcagggaagtatgctaaataaataggcttataaaaaagagatttccttctttcatctgaccacaaagatatatttcgagaataaaacagcaaggctgaaccttacaggtttttactcaaatcttcctttttctgccgaaaaagcgtatttaagcaaaaagccctgccttatttattcccttcatacaaaaggtttttatcagatttaaaaaggaaaataatattcaaggcttgtgactgagaaggcttacctgattcccgcacatcctgtaacaataccctccaacttatatcttatacaataagatcccccttatccctctgccgacgatacagttcattaatcacatctttattagtttctaaatgttgtgataaaacagtatcaacataaccaccgatcgatatatcattactaccaatagaccgtactattttctgtaccacttcatgcagctccgaactgatatagacacaacggcggtttttcagttcattcctgtttaaaaaagtcgttcggtaatcatccgaatcttttcttttccttcttactgaatctttcgtctttaaattttctctgtcttgaatttcctctacctctgctttaggaagctcccgatcaggattcttcttagcatatatagatgctaaaagagctttctcgtcaatatcatctgtatttattattttcttactcatacattatcggttttataatttctactggttcatcagctaatttgtcaagtttttccataatcctgtttttaatgaattaagttagtatgtcagtatataattgattaagtgctattctaaatatccaacagataaagtacatttataaatacaccaatacattatcacttatttattgaatcagcttaataactcatgaattcgtgaatgaatccatgacttactgagttcaataaatcagcagttcagcaaatcagtaatgttatacctaactatttaaccgaataagcctataatcaacaaaatacgtatttgagaattcaattatcaaaaccaataaagaattgcatcatcacttcagtatataattactaatacaaataaacaaacaaaacgtaagattctagttatgaaaatattaatccgagatatttggcgtcggttggcgctagttggcgtttatgaatatgctgatttatccgcatataggctctaactttgcagaacccaataaagcaaattaatgtatggtatttatattttctataaagctaaatattatccgccatgcgtggaggattttgatgttcgtcagaacatggcaaggtgtgttttgaggcactcaaaactgttttaagtgccttaaaacccttgcccctgacgggagataaaaaagctccgaagtcgcatttttttttaaccactaaatatccaaagaatgaaaagtaagaatgaatccaatcgtaataaagggggacgaatccccaaagataatccagcaaagaatcgttatgttatctatctcaacgatgtagacaatgcccgattcctaagcctgtttgagcaatcggaaatgaaggtaaaagctcattttattacctcctgtatctttaataaaccgatcaagattgtcaaacttgataagtatgcacatgattattatatgcgactgactacttttttcggacaatttcgcagtgtaggaacgaactataatcaggttgtaaaagcattaaacaccaattttacggagaaaaaagcactcgctttcttgtataaactggaaaaagcgacaatcgaattggttgatatttacaagcaagtggttgagttaacgcatgaatttgaaacaaaatggttgaagaaataaacttaggggctttagttttacttgcaaaaaaaatggtaataatttaagcgaactttaagaaaatgtatattaaggcataatctcatcaaaatattcaggcaagatccgatggagcttgcctgaattataatagacctctcttttcaataaaaagacttaaagtagatatcgtctttcgccttttttatggatatgaaagaattgggtaatgtccaacagcttcggatatagtcgtactgataggttttattgagataactgatatagttgctcaactcgtctaagctgtcaaagaatatatgggaagcattgcaggtattatttccgtcaaaggcacacgtcagggttgctttctgatcttcaaaaagaagctcaatcatgttttctttgacttcattttcaatgtattcagctacatacataggattgtcagaatagctttctttgatttcatcatgggatagcctgagtactaaggaagaacagtttatgagtattgcacaatattcggttgagcttacttgttgtgttgccatatatacgtctgtttagagcctgataaaatacataatactatcagactgattattaatctaaaaaaacagatatatttacgactgtaagcttggcttatgaaactgcaaaggtatcagacccataaaaatagcagtacgaaatatccagttaacaaatatacaattttatgtaataaattatttcgcttttacttatctttggtaatcttaattttatagtatctaaataattccgatgaaaaagtcaatagcctatctgcctaaagcaaaacaagaggacttaatacgtcttgtaatggagattaacaaacggctacccgaagccgaaatgattatcttattcggtagctatgctagaaatgaatatgtggactatgacgaaagggtagaattcggtattcctacctcttttcgctctgattatgacatctatgtaatcacaagcaagatatcggacaataaagccggaatcatattagataacattgatgcactatattataaagaacccgattatcaaactcctgtcaatttcatcaatgacgatattaaaacgataaatagagctctcgaagaaggcaggtattttcatactcagatcaaacaggaaggagttatcctttacgatagcggaaagtttaagctagccagaagacgcaaactaaagtttgatgagatacaaaaacaggctcaggaatattttgatgagaagtttactagagcaagcagtttcttacgtgatgcaaaatatgcctatacgtgtgatgactatagacaggcttctttttatcttcaccaagcttgtgaaaactattactattctatccgtttagcctttacgctgagaagtagtaaacaacataacctgactaaactggctgcgtctgttaaaggtcattcgcctgacttggctcatgtttttcctaataattcggtggaggagaaacggctttttaatctggttaaggatgcttatattgaggcgaggtataatccgaaatttattgttacgaaagaagatattgatgctcttattccgaaagtggaattactgagggatataactaagcgtatctgtgaagcaaagatcagagagtatgcgaatatggggtgaatttcagagatatacaaaagcatccctattaattaaactataaagcaatagatatttttattatagaatttaagagccgatgtcaatcggcttctttcgtatgtagtaggtacaataatagaaaaagcgacaccgaagtgccgcaattgatgttttcacaacggaataatccttattatgatttgctttcaaattgtatttgcaaatatattaaaatttcacataaccataccaatattcttaaaatttatttatttatctttaaggctttgataaaaaggatactatgaaaaagatattgggattagatttgggtgttgcatctatcggttgggcacttgttagcgaagcagaaaaagacaatgaagtatcatccattattaaacttggagtaagggtaaatcctcttactgttgacgaatcatccaattttgagaaagggaagagcataacaaccaatgctgatagaactctcaaacgaagtatgcgtaggaatcttcaacgttacaaactacgacgagaaaacctgattgaaatcttaaaacagcatggttttatatctgatgatagtattctgtctgagtatgggaataacacaacatttcagacttatcatttcagagctaaagcagctacggaacaagtaacattacatcagcttgcccagattctgttgatgattaataaaaagcgaggctataaaagcagtcgcaaggctaagtctcaggatgaagggcaattgatagatgggatggaagtggcaagacggatctatgaagaaaatcttacacccggacaatttacctatatgttacttaaagaaggcaaaaagtttattcccgaattttaccgttctgaccttcaagctgagtttgaacgaatatgggattttcaaaaacaattttatcccgatatgctgactgaggattttaataaaaaaatagaaggaaaaggaaaacaaaatacagcaaaggtttttttagcaatttacggactttatactgccgaaaataaagataaagacaagcacttgcaagccgcccaatggcgtatagatggcttgtctaaggaattgacagccgaagaagttgcctttgttattagcgaggtaaatggggcgattaacaattcgagtggctatttgggagctataagcgacagaagcaaagaactgttttttaataaacagacagtggggcaatacttgatggagcaactggcaaagaatccgcatacccgattgaaaaatcaggtattttatcgacaagactatttgaatgaatttgaaaccatttgggaaacgcaagcaaaatattacgatatactgacaccggaactgaaaagtgaaataagggatgttgttattttctatcaacggaaactgaaaagtcagaaaggcttgattagcttttgcgaatttgaaagcaggaaagtcgaaataatagaagatgggaagaaaaagataaaaataaacgggatgagggtatgccctaagtcttcccctatatttcaagagtttaagatttggcaagtgctcaatgatattgtaattacagacaagcaaaatattttggcgaagcgattattgaatcaggaggagaaagaaagcctgtttgaggaattaagttttaaaaaagaattgaaaggtactgacgctttgaagctattatataaaaactctaaagagtttgaaataaactttgaaactattgaaggaaacagaacacagttagctttattcgaagcatatcaaaagattatagagcagacgggtcatgataaatatgatttccaaaaaatgaaaccgaaagatgttttagataaagtaaaatctatttttagcggtctcggctataatacagctattcttacattcgattcggcattggaaaacgatgcttttgagaagcaggcattctatcagctatggcatttgttatattcattcgaaggggatcagtcgaataccggaaatgagaaactgattcaaaaattatcagacttgtatggtttcgaaaaagagtatgcccatatcttagctaatgtttcatttcaggacgattacggaagccttagtacaaaagctatccgcaaaatcttacctcacatgaaagagggtaataaatacgatgtggcatgtggctatgcaggctatcgacattctaaaagctccttaaccaccgaagaaaaagaaaataaggcatataaagatagattggacattctacctaaaaacagcttacgtaatccggtagtagaaaaaatcttgaatcaaatggtgaatgttattaattctattatagatacctatgggaaacctgatgaaatacgtatagaactagccagagaacttaaaaagaacgccaagcagcgtgaaaagatgactgccgctataaataaagctaccgccgatcacgaggaatacaggaaaattcttaaaacccaattcggattactacgtgtcagccgcaatgatattatacggtacaaactgtatgatgagttgaaaaataacggataccgtactctttattcgaacatatatatatcgcctgacaaacttttctctaaggaatttgatatagagcatattatccctcaagcccgattgtttgacgattcattttcaaataaaacattagaacttagtagtataaatagggataaagggaatgatactgcttacgattatgtttcgacaaaatatggagcagaaagtttggatgaatatgagaaacgaatagaagcattatataaacaaggtattatcagtaaaacaaaatataccaagttgatgatgaaactggctgatattcctgaggacttcatcaatcgtgatctaaacgatacacagtatatagtcaagagggcaaaagagatgctggaagaactggtaaaagatgtcgtttctacaacaggctctattaccgaccgattgcgggaagactggcagctaattgacgtgatgcaggaacttaactgggataagtacgataagcttggattaacggaaatcatcgaaaacagggaagggcataagataaaacgtattacagattggacgaagcgtaacgaccatcgtcatcatgctatggatgctcttacagtagcctttacaaagcgaagccatatccaatatctgaataatctaaatgcacgaagtgacaagacaggcgatatttatggtatagaaagaaaggtgttggagagagaccacagaaacaagctaaggtttattccaccgatgccattaaatgatttcagaaccgaagcaaaaaggcagttggaaaatattttagtctctattaaagcaaagaataaggtagttactataaacgtaaataaaacaaaaaaaccgggtggtgtaaataagaagaaacaacttacaccacgtggtcagttgcataacgaaaccatctacggaagtattcaatgtcctacagtaaaagaagagaaagtgggtggtggattcgatgaaacacaaatagttaaagtgacaagcaaacgttatcgtgaagctcttttggctcgattagcagcattcgggaatgatccgaaaaaggcatttacaggtaaaaatgctttggctaagaatccgatttatttggataaactacaaacggaatgtgttcccgaaaaagtgaagatagtagagatggaaacaatctatacgattcgtaaagaaattagccccgatcttaaattagataaagtgattgattcgggtattcgcactattttggaaactcgactgaaagaatacgataacgatccgaagaaagcattttcaaatttggacgaaaaccctatttggctgaataaagataaaggtatttctatcaaaagggttactattcgggggattaacaatgccgactcgttgcatgataaaaaagataaagatggcaatttgatattggacaaaaatggtaaaaaacaacctgtggattttataaatacaggaaacaaccatcatgttgctatttatagagacaatgaaggcaatctgcaagaagtggttgtttcgttttatgaagcgacaatgagagccaatcaagaattgccaactgttgataagacttataaacaaagcgagggctgggagtttttgtttaccatgaagcaaaatgaatattttgttttcccaaatcctaagacaggattcgatccacacgaaattgatttgaagaatcacgataagtatgcagagattagtccgaatttatttcgggtgcagaaaatagctacgaaaaactatgtatttaatcatcatttggaaacaagtgctgttacgggagaaatactgaaggataagaaacaattatcagaaatcacttattattctatacgaagtttgccgccaatcaaggatattataaaagtccgtgtaaatcatattgggcaaatagtagatgtgggagagtattagtcttagaatattctaaatatcgcttaaccaataaacctaatactatgataaaaaagacactttactttggaaaccctgcatacctcagtatgcgtaataatcagttggtaataaaactacccgaagttgagaaaaacgacaacttacccgatagcttcaaaaaagcaagcgaaaccctctttccaattgaggatttaggagtagtcgtactcgatcataaacaaataaccctaacacatgggcttattgaaaaactgttggataacaatacggctttgttgacttgcgatagtagccgcatgcctgtagggttgatgcttccattatgcggaaataagacacaaagtgaaagatttaactcacagattaatgcctctgaccctctaaagaaaaacttatggcaacaaactataaaagccaaaataaccaatcaggcagaagttttgaaaaagtttaggtcttgtaatatccgtaatatgatacactgggcaggagaagtaaaaagtggtgatcccgataattttgaagggcgtgctgctgcgtattattggaaagaagcttttcctcagattgataatttcacacgagggagagaagagaatccacccaataatctcctaaattatggatatgctatccttcgtgcagttattgcccgctcgttagtagcaagtgggttgttacctacgttgggtatacaccaccataaccgttacaatgcttattgcttggcagacgatataatggaaccatatcgtccatttgtcgatgaattagttttgtcgatagttgatagtggtgaggattataccgaattaacgacttcgttaaaaagcaaactgctacaaataccaacaatagatgtgatgatggggaaacaaaaaagccccttaatgattgcagcaggtcagacaactgcatccttaaaccaatgtttcgaagggaaactacgtaaaattaaatatcccgaattattgtaatccgtcggtaatatggagcaagaccgattaaatcaataccgtattatgtgggttctagtattatttgatttacctaccgagacgaagaaggatagaaaagtatacgctgattttagaaaaaacttacagcgagatggatttaccatgtttcaattctcgacttatttacggcattgtatgagtgttgagaatgcgaatgtacatatcaagcgagtgaaaaactttcttccggcaaaaggacatgtcggaatactctgtatcacagataaacagtttggtatgatggaactgttttatgggaaaagtcctgaatcaaagaaaacaggagcgcagcaacttgaattattttagaaaataaaaatcccgatcaaagtcgggatttttatttgaaatacattgatttttcaaatgctaatggtgtttgcaatatgttgaaatacatatacttgctctatggtatgatgtatttcaatgaactaagatacaattttgaaagcaaatcacaacttgttgaatcggggtatttagaaattagaagatgtatttcaatgaactaagatacaattttgaaagcaaatcacaactagtctgcaatagcttctatctctgcgtgcgatgtatttcaatgaactaagatacaattttgaaagcaaatcacaacagtgtcacaggcggccgatatgttcggggcgatgtatttcaatgaactaagatacaattttgaaagcaaatcacaaccatttacgctgtaattcgttacacaaacacgatgtatttcaatgaactaagatacaattttgaaagcaaatcacaaccagcggtttcggacttgctctcgcccatttgatgtatttcaatgaactaagatacaattttgaaagcaaatcacaacgataacagccccgacgtttgcgcaaacatcgatgtatttcaatgaactaagatacaattttgaaagcaaatcacaacaaccgcgatgagtttcatgttatccaagacgatgtatttcaatgaactaagatacaattttgaaagcaaatcacaacccactaatcttatggagtcgcttagagcctgatgtatttcaatgaactaagatacaattttgaaagcaaatcacaactgtcaacgtctcgcaactgtacggcgtgtgatgtatttcaatgaactaagatacaattttgaaagcaaatcacaacacgagggcattttaacgcccgacgcggagagatgtatttcaatgaactaagatacaattttgaaagcaaatcacaacgattatggcagttctgatagtttaacccaagatgtatttcaatgaactaagatacaattttgaaagcaaatcacaactaacgcaaagaggcaatgcagttaatagagatgtatttcaatgaactaagatacaattttgaaagcaaatcacaaccccatataggggtctaaagaaatatagctggatgtatttcaatgaactaagatacaattttgaaagcaaatcacaaccgtcgtgtaaatggtgtgcgcaaagagccgatgtatttcaatgaactaagatacaattttgaaagcaaatcacaactgcctgtacgtgcatcgttcagggcttcgagatgtatttcaatgaactaagatacaattttgaaagcaaatcacaacgggagcgttataatgtttagaggcatcaaggatgtatttcaatgaactaagatacaattttgaaagcaaatcacaactgttgccgacattatcgcatccagcgtttgatgtatttcaatgaactaagataggatttttccaaatactagagtgttatttttcatcttttatacaaaaatatatataaagaataaaccatcaatactgaacctttcgatttatataaaatattacaatccttgtagttagcgtgtttttatcgaaagccttgctttatttattctttgtttatgtggggcgtatatcagatgtaagagaagagaaatatgaagcttgggctttgcattagaggtatcctgtccgtatagccatccgtcaattgttggcaaaccagacctgttattatcacagcaatatgtctgaaatattacctgtagccaaaagcaccctttcgcagcatctgaatgaactgaaagatgctagaccagagaacaatcacacctctgatagttccgaagctttattaaatctgatattaacctgattgacgatctttaccaatccaacaatcgtttaattagctgtaaatttgacatataaatattttggcaacgaattgtaagttttgtttcaagaaatagttttgacctcatgaggtgctaacgtcaataagtcatttcgactttgcttttaattaccttcacttaaaagtggaggtaatttttttttaagataacctatccatgtagtttttgtttattagtaggattttccaacagcaagtttatctgaaatcaattcagattgtctttcttcttatttttcaatagttggtttaaaattttaggataaaatatttgcttgtaaaataaaaaatgattatttttgttatataatcatctgtataacaaatagatggcttgatggaaaatagtggataaaaaatcgttaccaattcgttaccgtcaattatttcactgtttatattttgctggttatcatataattataaaggtttacatccgaccctagccggatcacataaagatcagaaaatcaaggacttatttctgacaaaacaaggcaaacctctctaaaatagacttttagagaggtttttttatctccataccagacatcatcagtcatcaaaatgccgatattggacagtcattcgttacggaatcgttacggatttcgccaaagacaaaaaccgtaacgattaagattgtaagtttctcatttgtcgattattggcagtcgtttgtctgcctgacttctaacaattaattctagttttgaacactaaaaaatgatgtgttatgaatgttatgaagtcaacttttcgtgtgttgttttatcttcgaaaaaatgaagtaaacaaaagtggtaattcttccattatggtcaggattaccgttaatggagaacaagtacaatttagctccaagctacaaatcaagcccgaacgaatggaaaggcactcggtcggaatgctgaagcaatgaataccaaccgcttgttggatgctatcggcgtaaaagcaaatgagttgtaccacaagtacctgagcgagtacggttatgttttacccgaaaaaatcaaaaatattattttaggaatcgataccgaccgcagaaaaatgctgctagagcattttggggagtacaatgagttctatgtattaaagataggaaaagacacttctttgattactgccaatcgctataagttgacaaaacttcgtttacaggagttcttaaaagcggaatatcatctatccgacattcctgtgtttgagttgactcctatttttgtggagaagtttttcctgttccttagaaacacccacaattgcagcaacaatacggctctaaaatttattcagcggttcagggcagtcttttactacattaaggacaccggagcagatattaagataaaccctttcggcagttttagattccgcactactaaggtggttcgtgaggtactttcgcaagaagaaattgatgtgatatacagaaaagagttcctgaccgaaagactaagcttggtaagggatatgtttattttcatgtgctatagcgggttgtcgtacatagatgtagcacgactgacagaagattctgtaaagactgcttttgacggacacaaatggatcatgattcaacggcaaaagaccagtgtaccttcaaatattcgtctgttggaaatacccaaggaaatcatggaaaaatatagagggcagcagtcgggtggaaaactatttccgatctgctccaatcaaaagatgaatgaatacctcaaagaaatcgcaactatctgtggtataaataagtgcgtgacctgccatatcgcaagacatactttcggaaccactgttacgctcgccaatggtgtacctattgaaacagtatcgaagatgctcgggcataccgatattaaaacgacccaaatttacgccaagattgtcgatcaaaaactaagttccgatatggacagtttagcgaagacctacaaaagaaaaagatacgctaataaataagccttatggaaacaggatatattaaattttcagatgtagaaacagataaacccatcatcgaggtaaaaatcgttgatggtacagtttggatgacggtaaatgaaatagctgatttgttcggggtatataccccaacagtcaacaagtatctaaaagcaatctttaaagataatttagtgagagaaaatgaagtaactaaagagtatcgttattcttgtctcgaatatggagaatgtattcggatatactataacttggatataatcgtatgtttaagttttaagattcaaacagttttcacaaaaatatttcgggagtggatatttcgttcactctacaaatcaacacaatcatacaataatcttattagctgtgaatcaataatcaaagaatattcatctctaaatctgaattaatatggaactgcaaaaaatagaagagaaaataattttaattcaaggcaagcatataatcttggatagtgatgtagctgaactttatggagttgaaacaaaacgtatcaatgaggctgtgaagaataatcccgataaattcccagaagattacatcattgaattgagtatgagcgataaagaaaaggtagtcgaaaatttcgaccacctccaaaaactaaaattctctccggctttgcctaaaggattttcagaaaaaggtctttatatgattgctacgatcttgaagtcacccaaagcaacagaaaccactatcggtattattgaaactttcgccaaggttcgtgaattatctcgtagtatagccgaagtgtcggaaacgaccgataaggatgtgcaaaaatctttaatgcagcgaagtggtgaattgatttcggatgtcctgagcaacaattatcaaactgttggaactgaaacgacaatagaactcaacctttctattctgaaagtgaagcatactgtgaaaaaaaaccgaaagaataattgatagttgaaatttgagcatagccttttacctataagtaagaggcttttgctatttttgtgattgacgaatctaatctaaattatggttttaagagacagactgttgcaatgcctagagatggaagatattaacgaaataatacttctatatttttgaaacaaacaaggggataaaaatgctccttcattatttctatcttgcaattcttgctaatatgattaaaattcacagtaatttagagggaacatatatctataataaaagagtttaatgaattgtcagtttataatatacttaaaaaacaaagcatcactaaagtttgaatacaaaagagatgtttccacagttgtacgtaggagcaatggatatcgtatcacatttaacaatggaaaatcctataactacggagccgataatgtgaaatactatccgcttatatcaacacgagataatgtacgtatatatgaaaatggcaaattaaacaataaatacaacacggtttataattatgatcgttattttatttttggaaatgaagacaattattcttatccaattgaaaacgatgccgatatcgaaatatgtgatataaagagaaatactgatctggcagaatcggttgtcgattactttaaggaaatactgaaaaatacaggagaagttttatttgatgttcctgccgaagaaacagaaagcaagaatataaataaaataagttccgaaatattgctcaaagcccttgatagcatagatatactagaatcgaggtcggtattatctaactatattgatggaaccaatccggctgtcaaaaactctaaagaaactattatatacccattcggatgcaatgaaagtcagaaactggcagttgaaactactcttagaaatagcataaatatagtagaaggtcctccgggaacgggcaaaactcaaacgatcctaaatattatagccaatcttatcgtgcagaacaaaaccgttgcaatcgtttcaaataataactctgcggttttcaatgtacaagaaaagttagagaaatatggctatgaaatgcttgtggcatcacttggaaataatgataataaggcattatttttcgaaaaccttaaagaaaaaacaataaatcaagattttgatatctcagcacagagattagttaatgctaagaatgagattgatgagttggacagcatactaacaacatgttttcagtataggaataaactagctactctaaaaacagagttagcagatgccaaaatagaatttgaacatgtaaaagcagaacagccactcgaacaaaatacaaagtttgtacttgacaagaaatttcaccgcaattggagtttcaacaaaacattgaaattgatagatttactgtcaaatgttagcattaaatctaaactgtctttcataaacagattacggtttgctgtgcaatatggcttatttgactttaaaatcattagtcagtatagtcaagagtttcctatttatgcaaatcacaaattttatgaattatacatcgctaaaatagaagccgaaatattatacattgaaaactggttggtctctaataatgaagaaaccaatcttaagcattttatcgaaacatctaaagaagtgttcaatggcacactatttgaaaaatataaacgattaggaaaatcaatgttttcacttgatgattatcgtaatcagtttgatcattttacaaaacactatccagtaatactaagctctactctttcgctgcatacaagtattcccaaagggtatctttttgattatctgattatagacgaatcttcacaggttgacattataaaatcagcagtatgtttttcgtgttgtagaaatgtagttattgtaggagatagtatgcaacttaatcatattgtggacgaacagagcaaagcggcatcagaattatttaaagcaaagtacaacatttctccttcatatgattatgtagaacagaatatattaaactcactaaaaagcttgtatggtaatagtataaagaccgttttattaaaagaacattacagatgtcatcccactattattggattctgtaataagaaatactataataacagtctagttattatgactaacggtaataaccacccgtttaaaatcattgaggcaaatatatctggcggaagagacaactacaatcaaagacagatagatgaaacggatttctatattcgtcaaaatcattctgcagactatactaaagtaggagttatagcaccgtatagaaaccacgcaaatattctgcaaaagcaacttcccgacggagcagaagctgacactatacataaatttcagggacgcgagaaggatgtaattatatttaatacggtaagaaacacagtacaaccatttatagacaatcccaacctgataaatgtagctgtatcaagagctgttaaagaatttattgtagtaaaacccgcatcaatggaacttcctcatggaacaaatataggtgatatgatacgctatatatgttataccaccgatcctaaagagacaattgttaagggtagcatatgttctgttttcgaccttctatataaagaatacaataaggtttttacttcattcatcacatttaataagaacataaaagggtctgctgcagaaattataattcacaagctattgagtgagaatgtattattgaacaaccccaaattttcatcaattgatatggtcagagagtacagacttcgagatcttattcgaaaccttcagtcattctcagaagatgaaattaagtttataaataacaattcaaggattgatttcctattgtataacaagattgataaaactcctgtacttgctatcgaagtggatggtgtgtcgttccacaacaatgaactgcaatatgaaagggataacaagaagaacaatattttaaaaataattggactgccattgcttaggttatcgacagatggatacaatgaagaaatgaggattattgaaagtttagactctgcaatgggactataggttctgttgaaataaattctctcctttgtgatattaatattaattctttagaatgcaagtggtaatctcttgattagagttacctctatttaatttacaaatatacttactaatacaattttaacatctttcatgtgataattacgagaaacgtactataacctatccaagacccactttcactcccattctattcacgatcaagtaagtcttggactcaaatcagcaagagtacatctaacggtgtacacttgcaaagaactgatgcgaatcagttttattataaactatattttcaggatttctcttccctttctcccaatataattattccacattaatacgggtcacccttgctcggtctattgttcaatgggcaaaggtatgtacggatcttagccctgcatattcaagccttttaggtttttatcgaaatcttcctctttccttacaggcgagcgtatttagctaaaaaaatatgcctgcctaaaatacctatacctgcttgttgcccttgaaacaaaaacgaccgacccgaaggatgacgcagaaaaaaaatgtcacaattatgagaaacgaaaaagaaataatgaaacaaaactccctctcctccggaatcatcataaaatttgggtttaagatagcaggattggctctgtatataggacttatttcacggttaaatatcagcacatcggctgtattaggactcattctttgctattggggcatctgccttgcgttcaaattagcaggctgtatcattcggattatcctatctattctttccattttgattatcacatccttagttata

SEQ ID NO: 2244 - DNA, 24143 bp, synthetic construct
  source 1..24143: mol_type = other DNA
  misc_feature 1..24143: note = Synthetic
tcaattctcgtaagtacattttcatcacgaagacgtactaactaacatttgtttgactattaacttactaataactattttgtatgtttgtaatcaaaaattgttctataatttgttgcaaaggtaaggataaaaaagcatatcgcgaacaatttggtcatcttttttagtgtaattatggaaaattatggtcgttctagtattctagtgtataattttgttctttatttcgccttgtgatggtgttttttaattctattttcttatatctctaaacaatgtgttcgctttttctagtgggttgtttagcggatttattacaaaagtacgataacattacgtttttgctgttgagaggtgagaatgaggatattttattgttcgttttttcgatttgccttcttgttctcattcttttttcttcttactctcccttcctcttatccatcttctttcttttcgaccaacagaactcctcttcttctgcttcttaatcgttcttactctcttcttgtttttctcttttttcttctgctaatataaaggtaatgtcagagtatgtgattcccgatggacaagcatccttaatgtttttaattccgtcttcaggcgaaatggtctttagtatgcctcgaattatctttgctttctgtgtatctacgaaatcagtagccttcagttcgccacttgtaacataccttgcaatgtggcttacaatggtttgcggtgtaagaccgcgttcttttgcaatagcttttaagtccattccgtctttataaagtctgtaacttatagcatgcgtagcttctttaggcttcttttctgcttttgttttccgctttttttcgcgttgtttgagaccatcttcatcgcccattgatgtcagaatagattcttgtttgcatttcagatagcggctagtggtgaagtcttcctccatcatatcctctattaataatagctttgcctgttttgtttgttcgagttcggcaatgttattatctatgcgcttcatcgcttccttattcttactctccaccgttttagttatttcaatttgctccgagaatatttcagtaagctcgttgtagaagtatcgtgcgccatttctgattctttcaagaaattctgggctgtgcaaatcttccgttagcatacctttcacaagatgaatccactttgatgatacggtgagaatgcgcttttgcaagtcgtctaagattgttcgatggagtgctattaactttgcgtacttgtggaaatgctcgactaaagttctaaaaagtgctgtttcaagttcagaaatttcgttgaagttgaatagttccagtatcaacattctgtaatattcctcttttagcagcggtaaattcttaatactctctgctgctcgtatattctgttgagcaatataactatctactcgtacatcgtttatgacagcattttgattcaatggggagcccaataccaaaccttccaacgaccgacagcggctcaaagccacataaacttgtcccgaagcaaatgcctgctgagcatcaatgatggcatgttcgaatgtaagaccttgacttttgtgtatggtaatggcccaagctaatctcaatggatactgtgtgaaggtgcctaacacttctccttcaatctgctttgtccgttcgttgagcgtgtaacgagtattttcccatgtttgtggttctacttctatggtctcattgtcgccgggacaagctaccaaaatcctatcttcgttaatgaaagtgatgcgtccaatctttccattgtagtatctttcgaaacggtcgttgtggataaacattacctgcgcaccacattttagtgttagttcatagtctgcggggtagttgttttcggggaattgtccttcaatttgagcgcaaaacctatacgcttccgattctatttgcttgagttgattgttgtttatgttgtcggcaatgcgattatgagttgtcagatgaatatagtcgctgccttcttcaggtttgaaattcagctgataccgactattcagagttttgaaatcatcgtctgttacgttgccatctctaaagtgattcaggatgtttatgaatgtttcgtcttgttgtctgaatacttttgtaagctcaatcgtaacatattgtatgctttgcagtgcttttgagtcgaagaaataaggcgtattataatatctacccagtagttcttcctcttcaggcttaactactggcgtcagttgttgcaggtctcctatcatcaaaagctgtacaccgccaaatggtttattatgttcgcggaaacgacggagcaccgaatcgatagcgtccataatgtctgcgcgcaccatactaatctcatcgataacgagtaagtcaagcgttcgcattatctttcgcttttgtttgctgtattcaaagcgcggttttaccatgctttcaggtacgaaaggggagagaggaagttgaaagaacgagtgaatagtaacacctccagcattgatggcagccactccagtaggtgcaaccactaccattcgctttgtgctatgttgcttaatggtacgcaagaaagttgtttttccagttccagcctttcctgttagaaagatactaatgcctgtgtgttctacaaagtcccatgcgttttgcagttctatattcttctccattgctttaatatcgctatcgttcagcaaaattacgtaaaaaatgcgatgctcgcaaatagttattgataaaagtcaatcggcttgatgcatggcaacaaaagcgccaatattgagcaatctttacttaactatttgtgtaaaacactgagaagctgtaactttgcacacgtagaaaagaagtaagatataggcaatatgagtgcaaatggcgctcagtttaaggtaaaaagaaagtattaatagtatcaatgatagttgcagttgcagctgctggtgaagcataggcactctgcaagaataaagattagttgattagttattctaagagagtaaattatttaagttagttgatgatttgagaaagagaaaaggtgatgtatcaaataaggatacatcacctttttctttcatctatttaagtgcaacatctctactttcttccctcagttaccttcgttttatcttttcgaaaattgataaaagcacagtaatggtttttgtttttggacgttccaaatatgatgttattctgcatttcattggtaaatagaaggggagggaattgtttagaattttcataaagcgttgttcagcgtaactatttgatagatagagttttgtgatagagcttgttttgcattataaaagtgcctgttttgcatcgcaaaagggcctatattgcaatgcaatacaggcacttttgtaatgcgaaagcgatattatcgttttttattgtaattttctttacaaaatgaaagtagttcttttaagtttttcttgcgtaagaaatgagagttcttgaaaggctaatggtatccgactgggatatgttctttgcagcaaaaagatggaataggtataaaataaatgctgaaactctcaacgagcttcagcatttatgttgtttaaccttaattgttcttttcttttgaatagaggaaacctcacggcctccttgcttcctttgtaatacaatctgttaaactttacctttaaaaaataactaaaaacctaaatctattactactaacctaaacaatctattaaccttttgacaatgcaaaggtagctataatttgtaattcttgcaaatatttcggggtctatttttaatgttattgcaaaatcttgatgtatgtcaaagattgaaaatcaaatgttttggagttttagtatcctttgataaaaaccgtataacacttttgggttttgtgttttttcattgtaaacgaggtgtgtttcctttattttcagttcgtttttgtagaagttttatagcattatttagaggcttctttccgttatttaattgaaaacatgtatctttgtcaagtaaaataaggtaagatgaaagtactgattgtgaatacaagtgagcaaacgggaggtgcagctgtggctgcaaaccgcttgaaagtcgcacttaataataacggaatcgaagcaaatatgcttgttcgcgataggttgagcgacgacgaaactgtgtttacaatcaagaataattggtgtacaaggtggaataaactatgggaacggtggtgtgttttctggcatctgcatttctctaaacgcaatctttttgccatcgatatagccaatgcgggtactgatattaccgagttgcaagtgtttaaagatgctgatgtaattcatttagcatggataaaccaaggtatgctctccctcaaaagtattgaaaagatattgaaatcgggtaagccgcttgtgtggacgatgcacgatatatggcccgctactgctgtttgtcatattactttagactgtaggaagttcgaaagtcagtgcaaacagtgccgcttgctaccttctggtataggaagagaccttgcaaaacaaacgtggaagcgtaaagaagcgatagaaggacgaacacacattatatatataacgtgtagtaagtggctgcaaggcgaagcaaaacaaagtgcattgattgggcagaatacgattgaatgtattccaaaccccatagatacaaatgtttttcgcaaggttgataaggtcgaagcacgccgaaaactgggcttacctgccgataaacgtttggtacttttcgcatctcaacgagttacaaaccataataaaggtatgaactacttggtagatgcgtgtcgaaaaatggcggaacaacaccctgaaatgctcgaaaatacggcggttgtagtgctcggaggacacgctgaagacctacgcgaacaattcaatttgccaatgttcccactgggatatgttagcgatacgcaaaagatagtagacgtttataatgccattgatgtgtttgtaacaccatctttgtccgataatctgcccaacacagtaatggaagcgatggcttgtggcgtgccttgcgtgggctttaaggtaggtggcatacctgaaatgatagaccatgaacgcaatggatacgtggttaagatgaaagattcaaccgatttggcaacaggaatacactgggtgctgaatgtggcagactatgaaatgctgtctgcagaagctgtagaaaaagtgaagcagtgctattctcaggctcaagtagccgcacaatacatagctgtttacgagaaagcgcttgctaattcaaagacgaaagaagtatgataacattctcagtaatcaccattacatacaatgctgccgatgtattgcagcccacattagatagtgttttgaagcaagacttccccacaatagagcatattatcgtggatggagcctctaccgacaacactgttgcaatagctgaggcttacaaagatatgtctgatagtgccgaaaatgggcacgttgttcgaatatatagcgagccagacaaaggtctttacgatgctatgaacaagggattggtgcgtgcgaagggcgattatgtagtgtttttaaatgctggcgaccgctttccaactgccgatactcttgagaaagtggcattggcagcagaggttggagatggcgaggaacggcctgctgtagtgtatggggatacggatatagtagatgaaaaaggcattttcttatatcatcgtagacttcagccaccagaaaacctaacctggcagtcgtttagagatggtatgttggtgtgtcatcaagctttttatgctcggttagacatagctcgtaaaactcctttcgatacacgttatcgatattctgccgatgtagattggtgtataaagataatgcgtgagggcgaacgcaaaggtcttttattaagaaatgtgcacgctgtggttgctcattatatggaagaagggcagaccacaaagcatcaccgggcatcgcttcgagagcgttttcaagttatgtgcaagcactacggtttgttctcaacccttacaaaacacgcttggtttgtagtaagaaaattcgtaaaaaagtaatattgtcgaaaagtcaacgttctttatataaatcaaatcctcagaataaaatgaaaacaaagattatttataccctgcttaccttcctttttataggaataagcacaagcgttagcgcacagacaaatgcagttttaaactatccagtgcctgcaaagaaacagagtacgaccgcaaaaaagaagccgcagacagagccttatgctacagaacagtacggcgattacgatacaagtacaacaagtaacaggaagaaaacatctggagaaaagattaaagaagggctcggtagcataggcgaaggagtgggagactttgtagaaaacgagtctgaatcaattggaaatacagcaagtaaggttcaaaagaaaaccaaacgcttctttaaaaggataagtgattctggcaaaagattcggtgaaagagtcggcaaaaccctcaataaagccagcgatgcggtatctgaccatcagataaacaagaagaaatattagcattttgtgcattcttttggtggtattggatattttcagtacttttgtacaatacatatgactttgcttttgcataagttcgattctacaacaatgtgcttatgagtccacaaggaaataagaaacctacatacaccaagcccgttgctatttgcgctggagtactcttcttcggttcaatattgctgtcaatactgatggcaacacgtgagatggcacccccacgtaagtacgaagtggatatgtcgggaacggtaataggtattgatactacttcaaaaattcctgtattaaccaaggaagaagcaaaagaagtagaggttaaggaaaataagaaagttgattacgttgaatcgaatgatgcaaacttgaacttaaagaatataccggaacctgaacctattgatgtttcggccactcctccgccttctacaaaggaagaaacaggaaccaataacacgcaaataacagatgtgaaagcacctaagatagagcctattgagtaggaaaatagatgtttatgtgctgtaaatgtctaaaatcgcttaaaataatataaagcttttttacttttataggtatctcccgtcaaatgaataactttgtacaagaagcaggcgaaatacgtctgcacctgttatatgcaggtaaaagaaatattattgagtataaatttaaaagtattagtaatatgaaaaagaaccttttagtattaaccttgtgcgcaggcgcacttttgtttactggttgtgccagcaaaaaagatttgcaaaactgccaatctgagaaccaacgattatctggtgaatatcagaatgcaaaggaaactattgcggcaaacaatgctcgtatcaagagcttggaagaccaattggcacaagctaaggctagtgctgcagcgttgcagggcagtcttgacaagagtttgaacaatgcaaattcaaacaatatcaatatttcaaaattggtagaccaaattaacgaaagcaaccaatatatccgtcatcttgttcaagttaagagtaagagcgactcactcaacctcgttctcaccaacaaccttacacgtagtcttagcaaggaagaacttaaggaagttgatgttcaagtgttgaagggcgttgtttatatctcgttggcagataatatgctctataagagcggatcatacgaagtaaatgaacgtgcagaaaagactcttagcaagattgcaaagattatttctgactacagagattacgatgtattgatcgaaggtaatacagataacgtgcctgtaaacgctcaaagcgataagatgaagaatattcgtaacaattgggatctctcttgtttgcgtgcttcttctgtagcacaatacttgcaaactcacttcggtgtagatccaaagcgtcttactgctggtggaagaggcgagtataatccaatcgcaactaatgatactgagcttggaaagcagcgcaatcgtcgtacacaaattatcattactcctaagcttgatcagtttatggaccttattggtaaggctcctgaatcagcagaaaaataggattcaattgatttaataatagaaaagtttttaaaatctcttgcaagtcacccgcatttaaaggatatatgcgatggaggacacgaccaataattgttgcattgtgttgctatttagtctatagtgcaggcaaatcagttggcgaagcagtttattatctgctgcattaggattgagagaacatattaaaaaaagtcttcaaatgtgcaatatacaacatttgaagactttttttaattgttgtttagtctgttttcatcttaccattttagcttctactcattgttttgcttctttcttgaggctttttttatcagttgataaagttatcttcaattagtttttcaaagctattggcaagtttttgcttttcttctagatcgtagttaaagagtacaatttcttcatttggtgctattgctattggatttccagccccgtcatcagagaaaacaagacattaatttatttcgggggagagagttgccgtattaaaaagatggcgagcattcgtcgttaggtcgataattgtatctttccctatcaatgttccgttctaaaaagcatgaatggctatgccttcataagcacctccgaagttcaaaataaactctttgaagtcgttatccattaccacaagaagtactttttcggtaatttcaatttgctcgttggtagcagcgacgcccaataacgtagggctttttataaagaaggcactcaatttcttaataagagtttgcttgatatcttttatttgtagttctccaattcgctttgaatgtccttaaccatatcttccatcgatacattcagtccataaccatcagcaactggaaaaatcaaagcatggttaaccttgttcatttgcagtttctttacaatcgtctcaaggaattcgcaaagctcaaaacttttatatgagacacctttcatgtctcttgtgtttgttgcatagtgcttagcaaagtctttaaacggaaacaatagcacatataactttccgttcttagcttcgtttagcacaatatagtcgtcttcatatagcgtccataccttttcccaatcgcatattttttttacgaaatagtcataacgtttttctggtgatagaactatgacggcctcaagttcctgtttagatacttccatcgtttctctccttagattcaatttatagcttattcatataatgttctcttatatctgcgtcgtcatggtgttcacataagatttttaaatccgctggtaaatcgttccgaagtgcaatggcaactttgcaacccttgtctccatgattgtaaatcaaacgcatcaactcttcatttaatccgtccttttctgctatttccgatagaatactgaaaactaaatcgttcaatggctttctcaaaagttcggtaacgacaggttcaatgtcgggtataggaatgttcagacataacgacaagcttgtcgatttgtcccatacgttgctcaattcatcaaagttgctgaatatattctccttatttatatatagagtctccatttgaaaaaatagtgataaggttccttcttatgttttttgcaaccttttttaatcatcgaagtttaatttcttttccttttcttcatacatttcgtcttcactctttactaataatacaccttttgtatagtagttataagcaaagattcagacataaaaaaagccccgttaaggacgaggcaacctaatgtcttcacaacggaaaaatccttattgtgatttgctttaaaattagtattgcaaagatatagctttctaaaacaatatgcaagtttttcaatacatgttttctttaatttaaaatatttttgtaattttacgcaatattattaacataaatggtcgaaaagcatgagaaaaatattaggtttagacttaggaaccacaagtataggttgggctttagtgaacgaagccgacaatgataatgaatcatcttcgattattcgacttggggtaagggttaatccattaaccgtagatgaaaaaagcaacttcgaaaaaggtaaggctatcacaaccaattcggatagacagcaacgtcatggtgcaagaataaatcttcaacgctataaacttcgtagacaaaaccttcgcaatcttctacaagatcaaggttggttatgtaacgaagcgttgtacgaggaaggtaaaggaactacttttgaaacctataagctacgagcaaaggctgcagaagaaaagatttcgcttcacgaatttgcccatgtattatttatgttgaataaaaagcgtggctataaaagtaatcgtaaagcaaacaataaggaagaaggacagctttttgatggcatgactatagcaaagaaactctacgaagagcatcttactcctgcagaatattctttccaattgcttagtaaaggtaagaaatttgctcaagattactatcgttccgacttaattgctgaacttgaaagaatatggaacgagcagaaaaagtattatccagagatacttacagacgagtttaaacaacaattagaaggtaaaaccaaagttaatacaaacaaaattttccttgctaaatatggaatttattctgctgacttaaaaggtttagacaaaaaattgcaacctttaaaatggagaattgaggcattaaaacaacaagttagcaaagaaattttagcctttgtcatcagcgatttaaaaggtcatatagcaaatacaagtggttatctcggtgctatcagtgacagaagtaaagaactcttttttaacaaacagacagttggtcaatatctttgggcttcgctgaaagaaaacccacatatcagcataaagagtaaacctttttatcgacaagattacttggatgaatttgagaagctttgggaaacgcaagccgctttccataagcagctaacaccagaactgaagcacgaaataagagatattatcatcttttatcaacgcccattgaagagcaagaaaggacttatctctgtttgcgaattggagcaacgcaaagtaaaagtaacaattgatggtaaggaaaaagaaataaccataggtccaaaagtagcaccaaagtcttctcctgtattccaagaatttagaatttggcaaaatatcaataatattttacttataaataacgatacgaatgaaaaacattcactcaatgagaaagaaagaaacttgctatatcaagaattaagtgtaaaggtaaagctaagtaaaaccgatgtgctgaaaatacttaataaaaaaggtaagcaatgggaccttaactataaggaagtagaaggcaatcgtacacaagctattctttttgattgctataacaaaattatttctttaactggtcgtgaagagtgtgattttaagaagttacaagcttccgagatccgtcatcacgttacaacaatttctaaaaacttaggttttaataccgatattcttgactttaatccatcattagtgaaacatgagttggaagaacaacctatgtatatgttgtggcatttactatattcttacgaaagcgataactcaagaacaggtaacgaagcacttctaagaaagttagcaattgcttttggttttccaaaagagtatgcaactgtactttgtgatgttgtttttgaggacgattatagtaatctcagtgtgaaagcaatgcgcaaaatattaccttatcttgaagtaggaaacgactatagtcaggcttgtgcatatgctggatataaacattcacgtcgctcacttacgaaagaagagttagaccagaaagtttataaagaaagattagaactgttaccaaagaatagtttgcgcaatcctgttgtcgagaaaatcctcaatcagatgataaatgtcatcaatacaattattgatgaatacggaaagcctgacgaaatcagaatagaaatggcgcgcgaattaaagagtagtgctgcagaaagagagaaagcaacacgtgcaattagccaagctaacgctgaaaatcaacgtattcgtgaaattttggaaagagattttgcgctttcatacatcagccgtaacgacattataaagtataaactatatcaagaacttgaagcaaatggctttaagacattatactctgatacatatatttctaaagaaaaactattctctaaagacttcgatgtcgagcatatcattccaaaggcacgtcttttcgacgactctttctcaaataaaactcttgaagcacgcgatataaaccttgcaaagagtaataaaacagcattcgatttcgtccaggaaaaatatggtaccgaaggtgctgaagcttataaaaagaaacttgatatacttttgtcaaaagaagttataagcagagcaaaatacaacaaactattgatgaaagaagccgatatcccttctgaattcatcgaacgagaccttcgcaatacacaatacatagcgaagaaagcatgcgaaatattgggcgaaattgtaaaaactgttacaccaacaaccggagaagtaaccagtcgtctgcgtgaagattggcaattggtagacgtgatgaaggagctgaactttgaaaagtaccaaaaacttggtttagcagaaattgtagaagatagagacggaaggaaaattaaacgcataaaagattggacaaaacgaaacgaccaccgtcatcatgcaatggatgccttgacaatcgcttttacaaaacccgctttcattcagtatctaaacaatcttaatgcacgaagcaataagagcaatagcatctatgcaatagaaaataaagagttacacagagaggataataagctaaagtttaatgctccaatccctattcacgagtttcgtgcagaagcaaaacgccatcttagtgccatcttaatatcaattaaggcaaaaaataaggtgatgacacagaatgtaaacaagattaaaaccaaacagggagtaataaaaaagattcaacttacaccacgtggagcacttcataacgaaaccatttatggaacaaagaaacgtcctattataacaatggtgaaagttggagcagcattagatgaagcaacgataaacaaaataagcaatcttactattcgcgaagctcttctaaaacgcctcgctgaatacaacggtgatgcgaaaaaggcttttgcaggaaagaatagtttggaaaagaatccaatatatctaaatgaagaaaagacaaaagttctacctgcattagttaaaactgtagaatgggaaacttaccacccaattcgtaaaccaattacaccagatcttaaaatagaaaaagtaatagataaaggtatacgaaaaattctgaaagcccgcttagcaaaatttaatggagatgcaaagaaagcattcagtaatttagatgagaaccctatttatatcgacgaagcaaagaaaatagcattaaaacgagttagcatagaaggagttttaagtgccattccattacatacactgaaagatcaagcaggtaaacctattattggaaaagatggaaaacctgtattaggtaattatgtacaaacaagtaacaaccatcatatcgctttctattacgacgaaaatggcaatctacaagataatgccgtttctttcttcgaagctgcagaacgtaaatcgcaaggaattcctattgttgacaaaaactataatcacgataaaggttggcgttttttatttacaatgaagcaaaacgaatacttcgtgttccctaatgaagcgacaggatttattcctaccgaagtgaatttaatggacgaagccaattatgacatgataagtccaaatctatacagagttcaaacaatttctaagattatctatgacaaatctattatccgtgattatctttttagacatcatttagaaacaacagtagaaagaattccaaatcttaaaggtattacatacaaacaattaaaatctttaccacacttaaaaggtattgtgaaggtgcgcatcaatgctattggcaaaatagtggcaataggagaatacgattaatattctgaatctatgataaagaaaacattatgtttcagtaatcctgcatatttgagtttgcagaatgcgcagctggtaattcgtttgccagaagtagagacttgcaataatttgtctgatggttttaaaaagcaaaccgagcgtacaattccaatagaagatattggagttgtactgctcgataacaaaagaataaccatcacttcttcggcattagaagctttaatagaaaataactgtgcagtaattacctgcgatagcaagaatatgcccatcggacttttgcttcctttatgcagtaatacactgcaaagcgaacgttttcgcacgcaaatagaagcatcgttaccacttaaaaaacaattatggcaacaaaccattaagcagaaaatatttaatcaagccaaactcttagaaagatatactaaggttgatactggttgtatgtacgtttgggctgataaggttaggagtggcgatcctgataatcttgaagcaagagcagccgcatattattggaaaaatgttttttctgatattcctaatttcataagaggtcgcgaaggagaacctcctaataatcttttaaattatggttatgctatattgcgtgcagtagtagcacggtctttagttgctagtggattgcttccaactttaggcattcaccaccataataagtataatgcttattgtcttgccgatgatgtaatggaaccttatcgcccttacgttgatggattagtattagatgtaatggcttcaacgaacgattatagcgaacttacgaaggaaattaaaatgaaactacttgctattccagtgctcgatacaacaattggaaacaagaaaagtccattgatgatagctacacaacaaacaacctcttcgctttacaagtgcttcaatggcgaattaagaagaatggcttatccagaattataatgcaaatgagtggaacaatatagatttagtcaatacagaagcatgtggttaatggtgttttttgatttacccacagatacaaagaaagaacgaaaggctgctactctctttcgtcagaacctattaaaagatgggtttacaatgtttcagttctctatttatatacgccattgtggtagtaaagaaaatatggaagtgcatataaaaagagtttctacctttattccaatgtacggaaaagttggaattatgggaataacagataaacaattcgaagaaataaagttattttatggtaagaaaccacaacgccccaatgcaccaggtgtacaattagaactcttttagccctctgttagaaacaataaagttccattctcaatgaatggaactttatttttcttgcatttttctttctctctaaaccttcgtaatgatactgaatatcattgctttatgcctgttgagttgtgtttgctaatgcaaagatactaattttaaagctaatcacaactaaatcaacactgaaagtaaacctgttgaagttgtgtttgctaatgcaaagatactaattttaaagctaatcacaaccgtaactacaaatttcaagatgctattacgttgtgtttgctaatgcaaagatactaattttaaagctaatcacaacatcaacatacacccagataaatggagcggtgttgtgtttgctaatgcaaagatactaattttaaagctaatcacaacaatttgtaacattactggtacatgtacatagttgtgtttgctaatgcaaagatactaattttaaagctaatcacaacggtacggttaaacctttcttattcttagtgttgtgtttgctaatgcaaagatactaattttaaagctaatcacaacgcaaagtttacatcgaaatagtagattgagttgtgtttgctaatgcaaagatactaattttaaagctaatcacaactcttgaaaggagataccctcaacgatagagttgtgtttgctaatgcaaagatactaattttaaagctaatcacaacaggctgcttgatatatagaaaaagtagcgtgttgtgtttgctaatgcaaagatactaattttaaagctaatcacaacaggctgcttgatatatagaaaaagtagcgtgttgtgtttgctaatgcaaagatactaattttaaagctaatcacaacaggctgcttgatatatagaaaaagtagcggttgtgtttgctaatgcaaagatactaattttaaagctaatcacaacagtatcttagcgtttggatataacgcttttgttgtgtttgctaatgcaaagatactaattttaaagctaatcacaactatttgttccatttaccaatcactatctttgttgtgtttgctaatgcaaagatactaattttaaagctaatcacaactgcgcccgcattatcatgcaatcctttggtgttgtgtttgctaatgcaaagatactaattttaaagctaatcacaactatcatacaaagcctaacattcagttagttgttgtgtttgctaatgcaaagatactaattttaaagctaatcacaaccctctcacgaacaagttattttcttaggagttgtgtttgctaatgcaaagatactaattttaaagctaatcacaactgctacaacaacaatgtttggcgttcaagagttgtgtttgctaatgcaaagatactaattttaaagctaatcacaacaacgagggtgttattaatgatgctcttggtgttgtgtttgctaatgcaaagatactaattttaaagctaatcacaacatgttattgttttcttctttttttatatacgttgtgtttgctaatgcaaagatactaattttaaagctaatcacaacagtagtttttttcataagtgtatttagtagttgtgtttgctaatgcaaagatactaattttaaagctaatcacaacactacctttacatcatcaaaataataataagttgtgtttgctaatgcaaagatactaattttaaagctaatcacaactaatctttataataaacttgtatggcctattctttacaaacacctattcccagagctacgctatgggtttaccgacgaggttcgcaactctctgcataatcaattatcctatgcaatagaaaaaataaccaaactgttacttgtgcgtttcaaggatattgcttatctttgtcgcaggaactaaaaacaaaaactatgtggatatttctcgaaataatcataacgctgataacaattccattctttataaaggctgacgattggtgctggagaacttgccttatttacattggttgctgcatactctttacacccctcgtaggaatccccgtttttctctttgctttcagcagatagacagacagttttgtcctttcctgctttattgtctgttattacctttgtttgcaaaaggtaataacagacaattttatttatggcaaaacatttatctgaagacgaagttacactcgttgtaaatgctaaggcagacaaggcgcagcagaatattcgcaagttctctaaggaaattgataatcatggagagcgcaacaagtcactccaacgtcaaatggaatctctcgaacttgcagggaaaaagaatactgattcgtggaaacaacgacgtgaggagtatggaagaaatgcaacgcagattcgaaatctcaaacagcaaatcgctgctgagacgaaagttgtgtttgctaatgcaaagatactaattttaaagctaatcacaactaaagtgcaaggttgcaccgtttgtgcttggctatacggtcatttcgtagacgatatgccatatctaagaagcgaagataaggcagaatccgtacgaaaatggtataagattcgcccgaaatacttgtattaaagaatgtttagaaagggaggttagaagacgccccgagcgaatctgataattgctacgtacaacgctttcttgcgtagcatatattttagagataccctgatggagagtgtcgtgaacaaatttcttatgaacaagactttttgttaccatatttaccttttaagtgcaaatataataacagacagttttagtgcaaaggacagtttttcctaatgatggatattatttcattagatgtttgtaaagggaaattcctattataggagtaaaacaacagcaaagccccaagtagatacattttacaagaaacggtgtgccacgagtaacaaagggcattgcaaggagggttataaggaatgaaatagtttcgattatcaacatacctattcttgtttttaaaagtcttatttttattatgaaagcaaagataataaatagttctgtttgctaatgcaaagatactaattttaaagctaatcataacggatttgccataacttttaacgtttataatttgcgtttatcgaatattatctttatatttgcattatagattgatggtcgcatcggtagcggggcttcccaaaaggcagcatattgcaaggttcaactccttcgccaatctacttaggggcttcgttgcccctattttattttcttatattgagttgtgtttgctaatgcaaagatactaattttaaagttaattactttgcaaaatatctgtataatggtatacctattattggggtaaagagcatagatagtcctaaaaagaacaactttacataccaaggctcaccatgtgtaaagaaaggcataaggacaagcgatatcaagaaaaagaaaatttcataaattgacataattaatatacagttgtgtttgctaatgtaaagccgataatcatttatttactattattgcatttttgttccaactctttgatacgcattcggtattttactaattcacataacaaactctcgttgttacgtgttagcttcttgttcttctctataagatggtcgcggaactcttttgccatagcagctttaaaatcactaagaaaagcacgaaattcatctgtgtattctccatcaatcatatatttcttttgcatgacttgtaaggcatgctccccacgcattattctattgtattcttcaatctttttatttcttgttttctctctctttgataaagcctctttatcatctccataaagttcttcttcaagctcttcatatctttttctcaacgtctgataattctgctcgagtttgtgcacatattcagttcgttttttatcatactccttaaacttttcgatggttctttcagcccaaaaaagccttttttggtctttggaaagcatttgagagtttaatatgtgcgatttaggttctttctcttccattttcaatgtgtattttgattattattataatcctctaatgttatgtttactaatgcaaaggtactatttttaaagttaatcacaacacctttttatttgtttgttttattattacatcgtgtttactaatgcaaaggtactaattttaaagcaaattttctgtccaagatgcctatatatttagtaaagtttgttcgatataatcaagctgtttgaagttataataacaaacacaaaaatttttaattataaaattaaaatttataattacaaaaataaaatttataattataattttgatggattataataaaagttttttggaattaagatgtgcttgaaaaaatgctttatttcttagtctgtaatatattcgcataacattgtaaattgattgaaagcagaagataaaaactcatatattcaaaacgggcaaacaggagagaaaggattattaggtggtaaaacttgaataatcctattttttgccgtacctttgtcgcaaagtttagaaaatgactattttaagcagtattaccagacttttagaaaaggtagggaaccctattaagagtaacttccgctttttcttctttatgtatctcgttggtatttttgttgcatacgcagaacttcctaccaaccgagaggatgtgtcggtatatggagacctttggttggaattatttttcgatctttatattgtttgtgttcttctttcactgatacctgaacgtgtgcgctgctggatagttggagttttctctactatcgcctatgcaacaagcattgccgaccttttttgttgggtgaaatttcaatctcctcttaatccttcgatgttattgttggttgcagaaactgataagcgcgaagcaagcgagtttttcagtagctatatcaatgccgaagtaataacatcaagagtaggatttttactactcatcgtgcttttgcattgtttgctaacggtatggagtgtatatcgcaaaagaaagaatataaaataccctgtaatattcaatgttgtaaaagagaaaagtggccttttcatcggtataattgcgctcattctgtttgtagtttcggctatttcgtcgttccataataagcgtgaaatggcgcaaatgttctcgttgaaaacaataggagctgtagaacacgaacttacaacatctgattgcgcagtattctataccccaatttaccgacttgtatttagtatttatgccaatcatttagccgcccaacaaatagatagattggtagatgcaaaagatcgtgttgctgttcaagactgcactttcgatgcaaaaaacatagtattaattattggcgaaagtttaggaccacaccattcgcagcaatatggctactttatgaagactacaccacggcaagttgcgttggaaaagtcgggattgttggtacctttcactgatgttgtagcagcatggaaccttacaagtttcgtatttaagaatatcttctcgctacatgttgttggtcaaaaaggagaatggtgcgactatccgctcttcccacaactattccgaaaggcaggatatcatgtatctttcatcaccaatcaattccttccgcaagcaaaagaagccgtatacgatttcagtggaggattctttttgaatcataaagagttatctgcgtcgatgttcgatacacgaaacacacgtttacatacctacgacgaaggattattggctgactacgacaagacattgaaggctgaaaataaagacaacaaccttattatattccatcttatgggttgtcatgtgtcgtataaccgacgctatcctgaaaatagaaagcactttagagctgcacaatacaaaacgaagcgtccagaactaaccaagcaacgccgctatatgttggcccattacgacaatgctgtattatacaacgactcgatagtggaccagattgtaaagcgttttgccaacgaagaggcagtagtaatatatatgcccgaccacggagaagaatgttttgaaggcaaaagaagtataatatgtcgtaaccattctgcacaaatcgactacgatttggcacgttatgagttcaaagttcctttctggatatattgttctccgaaatatattaagaagcaccctgaggtgtttgaacaaataaaagctgcaaaagacaaacattttatgactgacgctttgccacacttgctattgcacttaggcggcattaaagcaaaagactatcgaagtgaatatgatattttgagtccgcaatacaatgagaagcgccctcgaatacttaaaaacaaaaccaactacgatgaactggtggctgaacaaaataagaaacagcgatgaaaccgtagattttaaagattataacccacaatatatggagagcaaaacaaatactgctgttagcaaaggtatagtcgataagacgttgagtcatgcagagtgcaacatcttacgtggcattgcgattgctggtattgtacttcataattactgccattggctccgtcctattgtgaaggaaaacgagtaccaattcaaccaacataatgtggattggtttaacaacgttatggcacatggctttaacgaccgcaccttttttcatttgctgtcattctttggacattatggtgtacctatcttccttttcctatcagcttatggtttagtagcgaagtatgagaatgctaaaccagtatcacccagtcagaataccagcactatacacgaacccaatacttttcgttttttgcgttatcactggctgaaacttttccgtatgatgatagtaggtttttctgctttcgtcttagttgatgccataacagaagggcaacatcactacgaagtaatggatattgtggcacagatgggattgttcaataaccttctgcccaatcctgatgatattatatggcctggtccttattggttttttggtttaatgctccaattatacatggtttaccgcttgtttttatacaaaaaagggtggacatggattgtaggtttcattgctatttgcacactaatacaactatcttgtgagccaaatggagaagcattgaaccgttggaggtataattttgtaggcggaatgctgccttttggtttaggattgctttatgcaaagtatatgcgtaacatacaattgcgcatctatgggataacgtttattgtgtcgttactctttattcgctttggtagcaataattttttaacctggttttttgttcctatgtttatatgttcggcaggaattagttttgtaaaactgctgacttactggcacgaacattttccccaatttactttcggtatagcaaaaacatttgaatggttaggcgttatatcagcagcgctgtttatttcgcatcccattacacgaaaaattataattcccatttcgcgcagtggagactattggacaggacttctgctctatatgattacttctgtatgcgtggcatggttgtttaaagaaataatgaggcatgtgccttcacccaagttttgagatgaaagaaaaaggaatagaacttgcaaatattagtaagtatcgaggcgaactgatgggcttagcgatattgttcgttatgcttttccatgtaagtgtacctcgtacagatgcttttttcggacttcggcgcatgggaaatattggagtcgatatgtttttcttccttagcggtattggtctttggtattcatggacgaggaatgccgatgcaatgaatttctttaagaagcgacttttacgtatttatcctgcttggctcattctagcatcgttgtattacataccagattttcttgctattccatgggtaaagcacagcggaaatagtacaaatattattgatttaatcggagatattacgataaactgggatttttggttgaacgatgaacttacgttttggtacataccagcaaccatgatgctgtatttgataacaccagcctatttgtcgcttattataaaacaccccacttatagatggattcctgcaataatgatagcttggtgcgttgctgttaagtatgttgtacctatcaatgaaactgtgggacatattgaaatattctggagtcgggttccgatttatttaataggactaaactttggagcgacagtaaaggaaaaaagaactttggaagcaagctctatttggctaatattactgacgtttgtcggaatgcttgctacgtgtatctatttggaacaggtaaggcatggacgttttccgctatttttggagcgaatgctatatatcccactcaccataactggaataattctgctttgcatcgtattaaaaaaagcttcaaataaatatctccacaaggcacttatatttgtgggtggaataagtttagagctatatttgttgcacaaccattttatacttatctatatcgaacgacttagttggcactattgggcaaagttttttgcaacccttgtaatagctttaccccttgcatggttgctgcatataggagttgagaagataacaacgaaaatagaaaggaatcaagaaagatgaaagaaataatcagattgatacgtccgcaccaatggataaagaatcttgttgtgttgtttccaatcttctttggtggagctttaggacatttggagtcgctatacgaaggttgcatcacaatgattgctttttcatttattgcttcttcca

SEQ ID NO: 2245 - DNA, 24143 bp, synthetic construct
  source 1..24143: mol_type = other DNA
  misc_feature 1..24143: note = Synthetic
aggcggtaaaggcaatgtaaactccttaaacatgtataaactcatcgcagattcagatactcctgtctccttgttaagtttgttggcagataaattaagacctttaccagatggtaatctcagtaagaatgtagcgaaagggattgctgaaaggactgttgatcatatagaaggagggatttatactgactattttcatttctttaaagcaaatactttttattcaaaataaccttatgagcaatacattaccacttgaagagtgttctatcaatcagatttatttagatagttcagacgtaaaaacctacatgattcccatctatcagcgtaattatgcatgggaagaagatgagataagagcgctgattaaggatatccatgattcttttaggaaagatccaaaggcaccttattatataggaaccttggtgacttataagcggggagatacagaatatgaggtaattgatggtcagcaacgcctgactaccatctatatcatcttgaaagtattgggcgttaataacctgacaaacaaacttacctatagtgccagacaagtatctgcatcaacaatagcgaacttagacaactatcctaacttgggagagagtgttgatgatggtattaagaatggctataagtatgctgaaaacgcttatattgagtttgttgaggattccgagcaggatgtttttagacagtatttcctcaataatgtacatttgatacgttatgaagttcctaaagatgtagacttgaatcattactttgaagtgatgaattctcgtggcgaacagttagaaaagcatgagattgttaagtctcttctcagtaactgtttgaaaaataagacggaaagagcaacgtttagtcgtgtatgggaagcctgcagtgagatggatatgtacatacaacagtgcttctctgataagtcggtgtttggtaattctatgcgttatttcaagatagaggactttgatggtatcccaaaacaagagggctcagagggtaaaaagtcaatttcgaaatttctaaaaggcacaatcgatgaggctgaagacgatacttatatagaaagaaatgataagtttcagccaataattgacttccctaacttcttgctgatagtcttaaaacttacgagaatgagctgtgatagctttaatccaacagatttcacacttgatgataaagagttacttaatgagtttacagaggctattaaagatgtagaaggcaagactgagtttgctaaatcgttttgttttaacttgctgaaggctaaatacttccttgataattacgttgttcaccatactcttagtgctacagaaacggtaggagataacccttggaagctgcaatactattacaaagagtcggcagataggcagtatcctaagaacttatcaactgatgataatgatgtacagaaagagcttgttcatctgctatccatgtttgaagtgtcatttactcctaagcaacgcaagaactatctcttctattgtatgttgttcctctttgagaattgcgaagtaaaagactatttagagttcctccaaagtcttgcagctaaatatttcgttgatgtctatatgaatcctgataaccttactgataggaatcaacctaagccaaatgcgtttgattatgctgtgttgagagatggtgaattgaatgtatatgactttgatggagctggttatagagaacggtttgagaagatttatcaacaaggtagggctgatatacctttgtttgtgttcaactttactgattatttgatatggaggaaatatgcagatgagattcgtggagaaaagacaaggaaagattctttgagtcgtaaggagttctttaatgcattgggatgtagtgattttgaactcaatcctttcaataatttctatttttcacgtactcgtaagtctttagagcacttctatccgcaagcgaaagttggcgatgataagcctcttacggcgtatgatatcaactgctttggcaactttgctatgataggagctgatgcaaacagctctggttcatgcttagatccaagggcaaagctcgatcgttatagtgacagtagggctaatcagataagtgttgcatcattgaagtttaagataatgatgcagatatgcaaagataattacaaaaaaatgcttagcaaaaagttagaaagacctgatgggatgcagtggaataaagaagatatgcagacccatcaagagagaatgcttgatataatctttgctggaatagaataaagcacctcgttatttaccaatacagaagtgctggaagatgttgccgagaacctcatgggtggtgatttgaccacccgtgatgtcggcaagttggtcgagacagatgcggagatcctcactgataaggtcgccactgagttgcatgttcatgccatcaatgacacgaaggatggactcatcggcacgggtgagggcttcataatggcgtgcagaggtgatgatcacactgttttcgttgatctctgggatgtcagctgcctcataaatagccgtctccaaagcatcaatgttctgcttcagtttggctgatatatatatataaggtgtaacctcgtctgatggttgaggcttttctgtcttgttatccatcttgttgaatatcgcaatcagcttctttccttccgtgagatgttgcatctctgctagctcttctgccgttggttgctggtcaacaacccacagaacgatggctgcttcatccattttctgataagcacgttcgatacctaactgttcaacctggtcggttgtgcgtcgtattccggctgtgtcaatgaagcggaaggtgatgccatggatctcggttgtgtcttcaatgacgtcacgagtggtaccgtggatatcggagacgatggctttctcttcatgaagcaggcagttgagcagggttgatttccccacatttgtcttgccaacgatagctactggtactcctttcttcaatgcattgcccgtttcgaacgactttctgagccctgctatacgctcatgaatggtctcggcaagcgctttcagttccgaacggtcggcaaactccagctcttcatggtctgaaaagtctagctcaagttcgagtaatgaggttattttcagcagttgttcgcgcaataaggacaactctgagctgaaatgtcctttgagttgactcatcgctacttggtgtgatgcacggttagaagcgctgatgaggtcggcaacagcctctgcctgactgaggtccatcttcccattcagataggcacgttgcgtatattcacctgggagagcctgtcggcaacctgcgtcgatgagtgctttcacaacctgattgaggatatatgccgagccatgacatgctatctccgtactgttttcgcccgtatagctatgtggagagaggaacacactcaccagaacatcgtctattgtattgcccgttttgtcatgtatctccccgtaatgcagcgtgttgcccttggcactggtcagttttctcccgcttctactatggaagatcctgtccgtaatctctattgcctgttgaccacttacccgcacaatgcctattgctccacccggttgtgtagcaagtgcacagatggtttcgcccacaatctggcgtgttgttgaaatggtttgtagtgcctgttgtggagtaagtgtctcttttttcattctttttgtttatgatgattgatgtgacggagcgtttatattctgtcaagcaccgtcttaacgagtccgtcaatcgtgtttttatatcctgcatttgccttctttgccagtcggtttgcaatgaccatgcagcatgttacagcccgatgtcccatgagcgtagccagtccggcgagtgcagaagactccatttcgaagttcgttatctgtagtccattgtaggagaacttctctattttctcgttcagatgtgggtcttgcaatggcaaccgaagctcccttccctgtggaccgaagaatcctccgcaggctatggtgacacctctcaccatgtcgtcctgtgcaatctgctcggtaagttgctcatcagcgcaagccacgtatgggtttccgagttgtgaatcccacttcacttgccgcttgaattctgcttcaaagtcaaggtcggaagccttgtcacgtccggcatagaagttcaacagtccgtcgaaaccaatgctttttaccgatgcaatgtatgttcctgtcggcgtataaggctgcaatccgccacaagtaccaatgcgcacgagggtgagctgccgcagttggtccttctcagtgcgtgtttcgaagtcgatatttgccaacgcatccaactcattgagtacgatatcgatgttgtcacaaccaatgcccgtgctcacaaccgtgatgcgtttgcggtgataggttcctgtaattgttcggaactcacggctttccacttcacattctatgtcctcaaagtgggaagctacgagtgctacgcgccccggatcgcccacgagaatcaccttgtctgcaaggttttctggtttcagatgcagatgaaagatacttccgtcctcattgataatcagttctgacggtgcaaaatacttcttctccataggtcttgagatatttgggtaaatgtgttcttatataatgtttaggagacaaagataagaagaaatatgcagatgaccaaatgaagaagaaagaatgattgtaagataaattcactattgattttcagaaggtgctcttttgccttctaaaaggtgcccttttacattgcaaaagggcatcttttgatgttcaaaagggcatcttttacaacgcaaaagggcgtcttttacaagcctgtttgtaacctcttgatatactatgggttacaaaggcagttttatatggttattgtttgcttttcggtctgcgcctcttctgtttctgtaaagttatttcgttacgcctgattgtctgtgatcaggttccttcacagggctcttcccctctatgcttcttctgcttctgtatcacggaaagcctgaagcgggaagggtagtaggcgagagtcggttggcagttagcgcttggttatttgtctaaatatgtaataacatattttcttataccataatacacatcgttctccatcaactcaatagggcgtcctttatcatcaaatttataagaatcggtatttgttttccccaatttattatcataaaagacgtgccttttggcaacaagatgagcagagcggatgcccgtttgggttgtccatataccttcgttacggttgaaaatggaaggatatacccggaagatgtttaagtctgggaaggttctgttgggcacattggtatattcgaaacgaacgaatgtatttccatatgttatcttcccttttcctccaacggtagctttgacgaggtcattgttctcccactcaaaggtattctttaagtttatttcatgaatataggatgaagtcaggtgtccgtcagcattatatataagactatcctttgtgtgaggcgccgttacaggctcatctgtcagagggtctttataaggagcttcgttgataaacttcgttgctctgccttgtttatctaagtacatagcacctctatggtcctcaagaacgatcctaccggtgatgtatccctttgttgtatacgagtagatggagtccgtataggtcaccgttgccactcgaggagggccatatgtgttgtggaacaggtcgtcacaaaacgttagaaggcgcttctgattgtcataagtgaagacatattctccttgcttatagccctggggatagacgtaaacctcaatctttgagatgtaatcgtagccttttttcgcaagagtatcagacgaagtatccacctgatcatcgcttgaacaggagaaaaatgcgaaagaaatcgctaagagtagaaagagatgtttcattaaaacctaattttttatgtattgaggtgcaaaggtaaaaaagatgaaaggaaatacatgatggtgaaagttatagtctgtaattaaaaacaaacacatcgaaagttatatatataaatcctaaaatcaaggtgaaaaacaggagcagatgcctaaaaagtataaattatgaagaaggaaaggacttgctgaaagcgctaatcatacacctattagccgcttacgaagcatgggaaaagtaggactgaaaggtgtttttgaggaagaaaagcatggagaaaggtgtgagagaaagagagaaatcgcatgaagaagatagcctttttgcactgattctgtccgatatcggtgaatattcagtacgtaataaacacaaaaacggcgcagtgcagagttgcactacgccgttttttctgttttaaaagaaacgctttactttcgccaaaagcgtgatgttatgtcttcaaacgtaccgtctgcgcatcgccgaagcatccgttgattggtccgaggagagttaagtgcaccgagatgcttgaggtatggacctatttttatgtagtcgaaacgctcctgatggatatgaggtgatacggcagtacgccctgtgtaccatccaatcttcagtctgggatgctgctttcggatatgttctgctaactcatcaaccctctccggtgctatatcacctcccataaagcccacgcaagtgatgggatttcctgcttcagagatgagcttgtcgagtgtctcagtggtcagatcgttgccttcatccttccaaagaaaactgctatggcagcccggacaacgacaaggacagccggaaatgttgatggcaagcgtcacttcgtcagggaattcctgaaagactatgtctgtgttgatatagtgtagcatcttaattgatggcgggtgacggtgtttgggagccttgtttcatcctctcttgtcacccgcttgctaatcattatgcctcctgtttgcactctttcgtctgtttcccagcttcggaaggagcagtagtctttatcgtatacttgttctgtccggcatagaaacgacggtgtgcctcatcctgacgtggtgctgagaagttgctaacacgcttcatgtagccaatgacacgtgtgagataatccacgtttgtagagtgacaatgaggacattcgtgcagataacgcttgtcgatatgcccacaatcgttacatacagtgttaggaatattgaacgtaaagtagttacatccctcctgtgctgccgtacgtaagagctgtcgatactgtgcttctgacaggtgttcctcaaggttcatgtgcagtgcagagcctcctgtgaggtgctcgatatagggtgcaccatgcaatttgaacttgtcgagaatggtcagagagttgtcttctacacgatagaagtagctgttgtaacagtcacgtggtacgaaatagccatcctcacggtcccattttgcgtgcttcacaccgacgttttcggcaggaatcatctcacaattaaacattgcttccttggtgcggaaggccttgttgtgcttctctatcagtccgagaacaccctgtacgaacttcttgtaatcctcgtttggtgtgatatcgagtcccatgaactctgcagactcaaccagtccgttgattccaatggtgagatattgacggtcaatgttgatgtatcccgcatcaaagagtggcaacatgtggttgcgtagcagctctttgaggttctcattgtatgccatctgcaccttatgacacagtacgatgacgtgctcgaggtattccttatagtctaaatcatggttaacagcgtactggatacagcggttgaggttgatagtcagcacactctttgaaccagttgacacacctccggcacctaaagtataggagaatccgttgtcttgtatctcattacggagtcggcaacatgaactcagagagtcggcattgtcgctcatgtaagtgaagaaactgtgtccttcagcatacatcttagctgcataatcgccccattccttgtccttgcactctccgttctcagccaacagcgccatcgtttcgactgggaaagtgaggacagtcttgagtctttcctggttaaaccacttcataaaacgcttctgaagccatgagagactctcccagtctggctgtgatccatcagggaaatagaagtttccgaagagtgattcgaagtaaggacgatcgtaataagagatgttccagaacacagcctggtagttacgggcacctgtaggttggttaagtgaatagacaatctgctcgaaatcgtccgtgataaccttatctatagtacgctttcttaggctgaggtcgaccacttcatcagctcgtttccagtagtctttaccgtattctttctgtatgaagtagttcatgtacatcaggaactctggtgttgcacaggctccggcaagcatggatgataccatgaagaccatgttgataaacccaccacagaagctcttgaggttggttggggctgtagagttaccgccaatggatgttgttccaccaatgagccatgggtacatggtgatggaagcacagtagttggcgaggtttgtctcatcattcttatatataaaatggtgggtgaggaggttgatatattcgtcagccagctccttaccatacatctttttgatacgatctaccagcattcggcgattcaaacggatgaaaccttgctttggaagttcgccgataagcgttgcgatattcttgttttcaacgttcgcattggcgtcaaacttagaaccagttgcagcattctgcgctacacaatagtctgtgaggaattttattttctcaactgtttctcggtcttctgtgtgctgttggcgatatacaatgaagctctttgccaccttatagaagccctctttcatcaaagcttcctctacttgattctgtatatcctcaacttttatgtcgttatgtatgttaaggtcagataagatcttcgataccataccaaggtcggtaggctcattgacactctcgaatgcttttaagatagcattcataatcttgtcgagggagaacttttccttcgaaccgtcacgcttagtgattgtaaagtttttgatttccattgctatattttctatatctttattgttgttttaaattaaatagctcatagctcatagtcttgatggtcttctgatgccctgatttcaatgctcaaaccacaaggttagtcacgttttagcttgtgtgaagttatccattttgggaaacttttttctgtttttaatcttcaaagttgtccgttttggaaaactttagtggtgcaaagatagataaaaggattcacttccccaaagataatctggttaaaaaagaactaaattttctgctgtttttcatcgtatattcttataatctcctatcccattgtcatttataaatgtctggttttagtgccactttatttcctggtttcatccccatttctttccgttttatctatgacaacctttgcctttgtcttctttcccgtttattttcccgtagtattacatccttgtatatcatagaaggaaccgccagtaccttatgtctggattcaaatgtgcttaacagtcttcttcagttcaggacaaaataacttttttgtgcagctcctctcttctgcacgtctatatatataataaggtgtaatgggatagaaagaaaagtaaagttacctctttaaaggaagttttccagttatgtatatggctgtttttgatagattagaaagttaagtatttgctagaaactagaagggtgatcgtctattcttgaatatgtatacaataaaaaagccccgtatggtaggacgaggcaacctaatgttttcacatcggaataatccttattgtgaattgctttaaattagtcttttgcaaaggtatatattcctataataataagcaagttttttaaatgatattttgaatttgttactccttttttgtatctttacgcaaaattttaaataatcaattcaacatgaagaagattctgggattagacttagggactacaagcattggttgggccttagtatatgagagtgagaatacagatgaaaaatcatctatagttagacttggtgtgagggttaatcctttaagtgtagatgaaaaaggcaactttgaaaaaggcaaagctattacaactaatgctgataggcagcaaacccatggtgcaaggataaacctccagcgctataaattacgtagagaaaatcttaaagattgcctacagaaacaaggttggataggaacagaggcattgtgcgaagaggggaaagcttcaacttttgaaacctatatgttgcgtgcaaaagctgcagaagaagagatatcattacatgaactctgtcgagtcctgtttatgctgaataagaaacgtggctataagagtaatcgaaaggcaaataataaagaagatggaaagctttttgatggaatgactgtcgccaaaaaactctatgaagagcacttaactcctgcagaatattcactcaaattacttagtagtgggaagaagtttaagcaagagtactatcgttccgatctaaaagaggagttcgatagaatatggaatgagcagcagaagtattatccagagatacttacggatgattttaaacagcagttacaaggaaaatcaaagggaaatacaagtaagattttccttggtaaatatggtatttactctgcagatttaaaaggtctggataggaagttacaacctttgaaatggagggttgaagcgttgaaacagcaggtcgataaagaggtcttagcctttgttattagtgatttgaatggacaaatagccagtacaagtggattgcttggtgctattagtgacagaagtaaagagctctactttaataaacacacagttggtcaatacctatggacttctttaaaagaaaccccatatgtaagtataaagaataaacctttctatcgtcaagactatttagatgaatttgaaaagatctgggagacgcaagcaacctatcataaggaactaactcctgaattgaagcaagaaatcagagatataatcatcttttatcagcgaccattgaagagtaagaaggggctgatttcagtgtgtgagcttgaacaacgtaaggtaaaagtaactatagatgggaaagaaaaagaaatatctatcggtccgaaggttgcccctaagtcttctccaatgtttcaagagtttagaatttggcagaacctaaataatatactacttatagacaaaggaaataatagtattcatcctctgtatgaggaagagaaaaatttattatatgaggaactaagtgttaaggagaaacttagtaaagctgaggctctaaaagtattgaacaagaatagtaaacaatgggatctaaattataaagaaatagaaggcaatcgtactcaggctgtcctctatgactgttataatcgaattattgcgatgacgggacatgaagaatgtaatttcaaaaaactaaaagcctctgagatccgttcttatgttaagactatatttacgggtctaggtttcaatacagatatattagaattcgattcatcacttacaggccatgagttggagaaacaacctatgtatcaactttggcatctgttgtattcttatgaaagtgataactctcgaacaggtaatgatgctttattaaggaagttggagatagcatttggctttcttaaagaatatgcagcagtactttcagacgtagtctttgaggacagttatggaaatcttagtgtgaaggcaatgcgtaagatcttaccacatttgcaggctgggttagattatagtcaagcatgtgaagaggctggatataaacattcacgtcgttcacttacgaagaatgaactggatcaaaaagaatataaggagaagttagaattattacccaagaatagtttacataatcctgttgtagagaagattctcaatcagatgattaatgtgatcaatgcagttattgatgaatatggaaagcctgatgaaataaggatagaattagctcgtgagctgaagattggagcagcagagcgagagaatatgacacgaagtattagtcaaggtaatgctgagaataagcgtattcgtgaaatactccagaaggaatttgcactttcgtatatcagtaggaatgacatcataaaatataagttatatgaagaacttaaatcgaatggctttaagactttatactctgacacgtatatttcaaaagataaactcttctcaaaagattttgatattgagcatattattccgaaagctcgtttgtttgatgattcactttccaataagacaatcgaagcacgtgatgtaaatattgcaaagagtaataagacagcttttgattttatttttgggaagtatggtcagcaagggattgaggcttataagaagaaactcgatattcttttgcaggatggttccattagtaaggcaaagtacaatagattattaatgaaggaagctgatattccatcgggattcattgatcgtgaccttcgagatacccagtatatagcgaagaaagcgtatgaaatattgagtgacttagttaggaatgttacaccaacaacaggcgctgtgactagtcgtctacgtgaagactggcagttagttgatgtcatgaaagagcttaactttgagaagtatcaaaagttaggtttagcagaagtgatagaagatagggatggtaggaagataaagcgtataaaggattggaccaagcgtaatgaccatcgtcatcatgcgatggatgcattaacaattgcttttacgaaaccaagctatattcaatatctgaacaatcttaatgcacgaagtgataagagtagtagtatttatggcatagaaaataaagaactacatcgtgaagataataaacttcgctttaatgctcctttgtctattaatgaatttagggcagaagctagaagacaccttaaatctatcttagtctctgttaaggcaaagaataaggtaatgacacagaatgtaaacgtgataaagacaaaacatggagtaattaaaaaggtacaacttacgccacgtggagaattgcataacgctacattttatggaacaaagaaacgttcaataataaagatgattaaagttggagctgcattagatgaagcaacaattaagaaagtaagtagttcctttattcgtgaggcgttgctggatagactccatgagtataatggtgatgcaaagaaggcttttacaggaagaaattcaatagataagaaccctatttatatagatgaagagcacaaaaagactgttccatcattggttaaaacgatagagtgggagatgtatcaccctactcgaaagatgatatcaccagatcttaaaattgacaaagttatagataaaggtatacgagaaatcttaagaactcggttagcaaaatttaatggtgatgcccagaaggcctttagtaatttagatgaaaatcctatttataaggatgaagcaaagaagataaccttgaagcgagtcagccttgaaggagtttcaagtgtaattccgctacacaaacttaaggatatgggaggaaagccagttgttggaaaggatgggaagccggtatggggtgattatgttcaaacaagtaacaatcatcatattgctttttacatggatgagaatggtaacctgcaagatgatgtagtaaccttctttaaagctgcgaggcgtaaatcacaaggagtacccgttattgataagaactataatcacgataaaggttggcatttcctatttacaatgaagcaaaacgaatattttgtgttccctaatgaagcgacagggtttattcctaccgaagtggatttaatggacgaagccaattatgacatgataagtccaaatctatacagagttcaaaagatgtcaaaaacaaaacaaggcataaccgacaagagggattattggtttagacatcatttagagacagtacttaataacgatttaaaagttaggaactctatatttaaacaaataaattcattaaagcctttagaaggtattgtaaaggtgcgcatcaatgctattggcaaaatagtggcaataggagaatacgattaacattctgaatctatgataaagaaaacattatgtttcagtaatcctgcatatttgagtttgcagaatgcgcagctggtaattcgtttgccagaagtagagacttgcaataatttgtctgatggttttaaaaagcaaaccgagcgtacaattccaatagaagatattggagttgtactgctcgataacaaaagaataaccattacttcttctgcattagaagctttaatagagaataactgtgcagtaattacctgcgatagcaagaatatgcccattggacttttacttcctttatgcagtaataccttgcaaagcgaacgttttcgcacgcaaatagaagcatcgttaccacttaaaaaacaattatggcaacaaaccattaagcagaaaatatgcaatcaagccaaactcttagaaagatatactaaggttaatactggttgtatgtacgtttgggctgataaggttaggagtggcgatcctgataatcttgaggcaagagcagccgcatattattggaaaaatgttttttctgatattcctaatttcataagaggtcgtgaaggggaacctcctaataatcttttaaattatggttatgctatattacgggctattgtagcacggtctttagttgccagcggattgcttccaactttaggcattcaccaccataataagtataatgcttattgtcttgccgatgatgtaatggaaccttatcgcccttacgtcgatggattagtgttagatgtaatggcttcaatgaacgattatagcgaactaactaaagaaataaagatgaaactacttgctattccagtgctcgatacaacaattggaaacaagaaaagtccattgatgatagctacacaacaaacaacctcttcgctttacaagtgcttcaatggcgaattaagaagaatggcttatccagaattataatgcaaatgagtggaacaatataggtttagtcaatatagaagcatgtggttaatggtgttttttgatttacccacagatacaaagaaagaacgaaaggctgctactctctttcgtcagaacctattaaaagatgggtttacaatgtttcagttctctatttatatacgccattgtggaagtaaagaaaatatggaagtgcatataaaaagagtttccacctttattccaacgtacggaaaagttggaataatgagtataactgataaacagtttgaagaaattaaacttttttatggcaagaaaccgcataagccaaatgctcctggagttcaattagagttgttttagaaataaataaagttccacttctaacggtggaactttatttatacttgcattttttcttttctcaaagtaggtgttacggtgttgataaccaacttcttacgctacttctgttgtgtctgataatgcaaagatactaattttaaagcaaatcacaaccatgttgctaattttattaccgacataaagtgttgtgtctgataatgcaaagatactaattttaaagcaaatcacaacatgttgtgagttcggtgataatactaaacgttgtgtctgataatgcaaagatactaattttaaagcaaatcacaacgtactgctggtattaaaattgataatgctagttgtgtctgataatgcaaagatactaattttaaagcaaatcacaacacttcgccgactatgcatcactaaacatggttgtgtctgataatgcaaagatactaattttaaagcaaatcacaacaagaggacaaagggatattggtttgaaaggttgtgtctgataatgcaaagatactaattttaaagcaaatcacaactataaacgtggaagagcgtcttttagtttgttgtgtctgataatgcaaagatactaattttaaagcaaatcacaactctctactgacaatcttaaaaaagcagttagttgtgtctgataatgcaaagatactaattttaaagcaaatcacaacagagattcccttgcttctctcgttctgatagttgtgtctgataatgcaaagatactaattttaaagcaaatcacaacatcttgatcctttcaataggaagttaaccgttgtgtctgataatgcaaagatactaattttaaagcaaatcacaaccgttttcgcagtgtcgtctaatgttgctacgttgtgtctgataatgcaaagatactaattttaaagcaaatcacaacagttgagttctaatgctgctcaatctcgcgttgtgtctgataatgcaaagatactaattttaaagcaaatcacaacaaagcttcggttacctccctacgtatagtagttgtgtctgataatgcaaagatactaattttaaagcaaatcacaacttatgtgcttggatttctgtaagcgctatagttgtgtctgataatgcaaagatactaattttaaagcaaatcacaaccatctgctgacttcgatgcactcggttatggttgtgtctgataatgcaaagatactaattttaaagcaaatcacaaccttgattctgtagatgttgctgcggttaatgttgtgtctgataatgcaaagatactaattttaaagcaaatcacaactaactacatagggttaattacgtatcttaagttgtgtctgataatgcaaagatactaattttaaagcaaatcacaacaattctgtactatagcagaaattcgtccaagttgtgtctgataatgcaaagatactaattttaaagcaaatcacaactgcaagtagaattaacgtgcaaggaatgtagttgtgtctgataatgcaaagatactaattttaaagcaaatcacaaccattaaagccttgaaacgtttatctctgtagttgtgtctgataatgcaaagatactaattttaaagcaaatcacaaccagcgattgcttctaccatcgtcttactacgttgtgtctgataatgcaaagatactaattttaaagcaaatcacaacaagcggcaaccgcataagaatccaacttctgttgtgtctgataatgcaaagatactaattttaaagcaaatcacaaccctttccaaatcataagaaagcatagagagttgtgtctgataatgcaaagatactaattttaaagcaaagcacaacaattcatccatgctcttttatatgcgcttagttgttgttgctaccacaaaggtatgattcctggggcagataaataatgcttaaccccctaatagagttttgttttaatttgctgtcacttttaacacttcgtgtaatgggcttatttttaggagtttgtatgcccaaaagctgtgacggaagtgacagcaaatttgttttttgtcccttatattcattttattttttcatttttggcatgctattttccgcatgtaattaacatttttatggtaaaaaaaatgtgttgatagttgtttgctaaaagataaaatactatatttgcggcataaatttctatttaccgagttcgaaaattactatttgagcggtttaatactgccaatctattactaatatctaaacaatgctgacgatgagtccattagactatgtaaagacttttaatgagtttctgtggaacagttttctcatgtatgcgcttttaggagttggtattttctataccgtctaccttggtttcccacaatttcgccatttaaatttggcgttcaagtatgcctttggtcccgtttttaagaagaaaaagccaggtgaaaagaaggtaaactctttccaggcattggctactgccgtagcagctcaggtcggtacgggtaatattggtggtgttgctactgccgttgccactggtggtttgggtgctattttctggatgtgggtatcagctttgttgggtatgagtactatcttctccgaggctgtgcttgcccagaagtacaagaaagagtttcatggtgagacggttggtggctcagcttactatctttactatggtcttggcagtaagtggctggcagttttcttctctgttgccattgtcatagcccttggtttcgtgggtaatatggtgcaagccaactctatttctattgctttgacgaatgctttccacatcccatcttatataataggtattattcttgcagctgttgtggcagtggttgtcattggtggacagcgtcgaatcactgctattgcagagcttttagtacctttcatggctattgtttacattgtcggttcactgataatcatctatatgtttgctgatcagttgccttcagtcatccgtaccatcttccacgatgccttctctctccagtcagcagccggtggtgcagctggtacagtgatgaagtatgccattcgttatggtgttgcccgtggtttgttctctaatgaggcaggtatgggttccaccccacatgcacatgctttggctgatgttaaggatccttcagagcagggtttcgtcgccatggcaggtgtatttgttgacacagtactcatctgtacctcaacagctttcgtcatcatgcttaccggttcttatcataatacagcattgaagtcggttgctattacgcagcaaggcttcgagatagcttttggtgaaggtggtattatcttccttgccatcagtcttatcttctttgctttcaccacgattatcggctggtatatgtttgctgagatgaacatcaagttcatgtttggtaagaaaggaatccttgcttatcgtgcattggtagtaggattcgtcttcttgggctgtcttttcgcagctgatttggtatgggagttagccgacaccttcaatggtttgatggttattcctaaccttataggtatcatcttccttgctccacaggtgaagaagatatactctaacttcttagcaaaccgtaaaaagaaaagttcttaaggtttttagccattatttttgttattccttgttcattgcaaagcttatagcgatgggtctgaacaatgaacttatttaggggggaataatccatggtgagttgcaatagtattgcaactcaccgcttttttgttgttatttcttatgctttataagattattcctggttctctttattgtcatttactaatcattgcacactcatgtgcaatctactgtttaattcacaacaaagtgaaggataatctttgggttatttgtttataatcatcaaaaaaaagcgatgaccttcacaggcgatcgctttatcttttgataggcattagtcttctaaggtaaaaagattgttttcaggataacgatacaaagatatggtattttttcgttacacacaaactttatttcgtctttttttcgttgttttttttgtgtgcgaacacattgtaactctttgactatctgtcgtgtatgagataaaattttattgatattttgcgcctattttgctcactttagcttctgctttcttgctctttcgttccttacgaggggggggatggagtaatggggtagggcttcctggtatttattctttggtgttttgtctttcacgtttatagtctttgctatcccagttcagtgtctttgcttttcatgtttataatctttgccatccttgttcggtgtctttgtcagtcacgatcccggctctttgtaggattggcgcatgaagtaatagcatgtaggagtgatgaagatagcgagtaaagccatggcaccagtgaggaagaacgaaccccatagcaggtcaacgttatcaagtatagcgatgaaagtgatgtataagagatttaaaccgttggcaaacatgatttccagaaaagccattaccgcccagtggtgattgctccaccgccatgtcaacagactgcttacgagatagaaaccagcgataggtgtggcgtagaggagcatctctctgtccaccagcgcatgcagatcagcgtttaagaaagcaatgattgcctgattgataataaccaacagagcaaccatcacaaggtttatgcgtatgaaacccttgaatggttgcccccatttaatagttcttttgcccataggcatacgattgtgtaagcccttaacgccagtttacttgtgttattctgttgcccttgatcgtagcagagataacataattgcgtttcgacttaccaccttgacggtcgatatccagcgttgcaggaacctttaccttcagctcttcgtcgttgtcaccctcctttgttacttcagcaggtgagcccagatgccagttaatggtcttcacatcagcctggtaaagcttgtctttcatatacttctgaatatcttttgccgttgcaccacctgctccgaggaagttcagttgtgatgctacagcccctgcaatcttatcactgctcttgctgttcataccctgcaacaactgacgcaagacgctaaccgcctttgatttgtcaccttctgttgccgtatgtacaagcaaaaccttcagtttctcgtctgcttccttgctatgtgcaccatttggatgttgtgctttatagcctaagaaagcgtcttcgctgccctttgccactgctgcagcccagtcaatctcgtcaatcttggcaagtaattccttgcgatgaggcgtgttaggatgtttggagagatattcctgataagcctccttagagttacttgtcatcatgcttgtccactcctgcgtgtcattctgtagcgaattcaaccgtgcagagatactgtcacgatgcgttttcggtgcatcaggattgttttccaggtaatcctgcaacacggttggttcattactgccaatcgcctgtgcgtaagcatcctgctcttcgttggttctgttcttgttaactccctgattatagaggaacaacagtatacctgccgtgatgatagcgatgagcagtgagatggcaagcgagctgtgactgcgcttctgttgcttctgtttctcgtcgtcgtcatggttctttacgactctttcagcagctgctataacctcctcatcggcgttatcgtccatgatgaagtcggcatccaccgtctcttcctcgtcttcattctccttctggggagcctcttcgttgtccgttggttcggtcattacgacctccattggtatctgttcttcagttgaatcagttggttctacgggtttctgcatgggttcttcctgtgaagctgaccccatgtcatggtgccctgtctccgtatggtggcagttcgggcacatcccttcctccttgagatagagctctccacagttggaacatttgatgagatgtccggcaatctctacgccacaacttgggcatacaggtgccttatcgctcacttgatggccacattcaggacatttaattatcattttctttagagtatcttattcgttagtgtgatggttaaaaaagtctgatgatgccagacggcgtgtcttatcgccgtcgtcggtatcttagttcgcgcatactgtgctttcccatgagtcggctcttgtccacatagccgttcacaccgttgattctgccttttccggtgtactgccatgcaaagatgtctctgccgtcctgcagcacgggttcacgtgttgtgtactgcgcaatgaatagtttatatccgtccaatgccccactgaggtatcggtcatagaagttcgtgtaagtgtaaacgagcggtcgtacaccgtattcctgcgtcatgagcacgaggaatttctgcagactgtctcgtaagtcctccctgcttagtcctcccgttgtctctatgtcgaccataggaatgaggtcttgatcctgcggacggcactgcatgcggaagttcctaagctgttctgcctgtggctgagcaggccgatagaagtggtatgaacccacgttcatgccgtatcgttgtgctgcctcgatgttatcaaggtaacgttggtcgattcttgagcctccttctgaagctttcagatatacgtaattaagcttatggttgctgttttgagccacagtctcccaccatacatcaccctgataatgactcatatccagtccgtggatatggctgcaggtgtcttcacattgtatgttgtattgtgcctttgcgttgttgaatgtgagcagacaagttatgataattaatatatatttaatcttcatacatgcaaagttactgatttctattgaaatagaagtagtaaaggtgggtatatttggtttttttaagccacaggcagcctcttctgtatgaatggggtggggcgggggcgatgggaatatgcgtttttttgcctctgtttccgtagggaagagcgtgggaaagactgattaaatggggctgaatggttatttgttatgcgcgatgaaataaccttacaaatatcagaagggtgatgattgtaaaatgaaggataatcgtgaaaaaccgcctttgtaaccatcaagatgtcaaggggttataaagaggcttgtaaaaggtgcccttttgcgttgcaaaacatgcccttttacacatcaaaacatgcccttttgcaatgtaaaagggcgtcttttagaaggcaaaagggcgtagattgaaaaacggaagggaaagaactttacaaataaagcctccccaagcccctccgaaggaggggatgtgagaggaaacggtgggataagaaaggaggggatgtgcctggcggggtacagaatgaagtgtgttggggatataaaagggtggagaaaacggacttatagggtatttatcgattcgcaaggggtaaagatttagaatcccaaatactggcttatcacatttaaatggtctgtttgtcaacttgtaaacacgtcaactgagcgcataactcgtttgttcgttaacttgtaaacacgtcaactgagcacataactcgtctgcttatcaacttgtaaacacgtcaactgaaacttcaaatttgaacatatggaaagataaaaaagcaatttggaaggaaaaaagacaaacgagggaagtggtaaaaagctgctttgaagggtaaaaaataaaagagtaaaaaggcaaaacggtgtacccaattactctttataggatgtaaccaagttggttatgtcgtgtgaatatgctggttctacgatgaaaacacgcgcaatgtgtcacgtaaaaatgcctgtaccccatatgatgatggcgtaacggatggcttttccgatggtcatactgaggatggtgatgacgatattggaacgtgtcaaacccagaacgacggtgatggcactaccgatgatgggcagaaaagcaaagaatcccatccatgaaccacgccccgccatgaaccgttgggcacgatcgagcgacttctgactcacatggaagtaacgttgtaaccactccaacttgcccattctgcctaaaccatagttgattaagccgcccaagacattacccgttgtaccatagatgagcaggagaacggggtcgagtccgcttgctatcagacccaccaataccacctcactgctgaaagggagtacacttccggcaagcaaagccgagagaaacataccccaatagccgtagtctaaaaggatgtgtgtaagaaaatccataagttatagagcgttatgaggatggcagagactgatagaatcttgaacatccagtttgttatccttccgtgtgtcagtgcaaagaaatgggctatgagaggtgccgcggcaacaatcagtacgccgataagggcatcataatgctgtggttgcaggaaaagaaaggctgtcgcaataaggaagatattgatgaaaacctgataaaagagtcgggttcggatactgtcacttcgcttctggtcaaggaaatggatgatacctatcagtccacaaagcaacacatagaccaaaagtattatcctgttgggggtcagtatggttaggtcaaagggattaccgaacactgccagctcgcagaaatggtctatgaaggtcatcaggtcgcccctcatggcaaggtaagcggtgtagaaccaatagggaagaatgatgcctaagagggatgcaacgaagttccgaagact

SEQ ID NO: 2246 - DNA, 24143 bp, synthetic construct
  misc_feature 1..24143: note = Synthetic
  source 1..24143: mol_type = other DNA
caggtttgcctttaaacacaaagagctctgcaatctcggcggtgcttacttcaaaatagccgcgtttttttggcggcgtaacggaattgttatttgctgacatatagagaagctaaaattagaaaccgactataaagaagtcaatccgttatttagcagaaaaagaaaccgtgttttcacggtgttgctgaaaacagcacagcatcgtaatttgcgatagcaagaggcaagtagcctaagatgaggttttgataaaagagccattttttgtcatggtcgctttggtgttgcaagacgtggcttgtagctacaactaaagttgccgcaccaagccgcttgcaaagggggatggctccccccttgaccccccgggtacaacaaaacaacaccaaaacagatggaacaggcgcaaaaaaacgcagacgggcagcgatcctatacgatgcgatttcgggtaacggcagacgagcgtaccgacctgctggcaaaagcggcggcggcagggttatcgtatagcgactatatcagaagcaaggtaacaggcagcaagcccgtaaccaaaaaagctacgccggagcgcgaagcgattatccgattaatggcagcattgggtaaatcaggcagtaacctgaaccagatggcaagagtactaaaccgcaaagcggatgatgcagatggcatcaaaaatacactggcaatggtggaatatgcgataagcgaccatcgcaccatattaggccatttgaacaaattactggaagatggttatcaggggtaatgcgcggggcaacggcaaacagcttgccaaatacctgatgacaaaacaggacaatgaagccatccgcatactggatgtggacggacaggacaatgcggatgcaagagatttataccttgcgctgcatagtatgcagcttaccagcgaactcaccaaaagcgataagggactataccatgcacagataaaccccgccaccgatgaatcgaaaaatatggatgatgcagcatggttactggcaaccgatatactggcagaacggttaggcatggaagggcagcgcagggcgattgtgctgcataccaagaaagggcgtacccatgcgcatgtagtttttgagcgttaccaccatgaaacaggcaaaatggtaaaagacagtttttcacggctggcacaggataaagcgagaaaggaaatggaagctgtatttaaacacaaagccacaccgcaccgtaacaaacatcgtcccgaactgaaagccagcctatcggcattgtggcatagcacagggacgggggcgcagtttttagcggcagcgagaaagaacgattatatcataggtgaaggctcgggcaggtcggcttatatcgtggtggatgcgatggcaagatcgtatgatttgacaaggcagttgaacggagtgcgggtaaaagaggtgaggcaacggctaagggggcttgccatgccgggcgagaaagaagctatcagcatcgcacgtaaaaaaatgaatgaagccgacctgaacaaagaagcaaatgctgatagtgtgcagccaaatatcaccatgcaatacaaagagcgtacaacaacggaaacagccaagccgcaaactgtcaagcacagctatacgctgaataccaacgagctgacgggaagccagccgcagcgcaaggaacagctaaaagataacaaggccgacatcaatacgccacctgccaaacaggataagccgaatgaagaaaaaaacactaactcgcgcaggttggcattcagggaagaaatgaacaagattttacgcgataataaaagcaaggataaaggcaaggatatagaaccatcataaaaccgctaaataattatggcagagaaacaatacgcttatacgagtttcggggaaatactgtcccgcatccataaccctaccatcctgaaagagatgctggcacgtgccaaagaaattgaagcggaaaaggataattactggcaaaactattacgtgcagtacgataattacaagctgcataatcgcaaattcggcggcaacagcaagggcattacgccgatggagtttgataaacagatggacaggctgttactgcatgagggtaatcaggctttgcgggagcaggatgaaatcgaacagcgcaagggggaaacgaaatcagaaaagcaaaacctatcacctgaaaataaacaaccaagcgcaagcaacgataataaaagcgataggaacgacaaagaaacctatgtgagtgcggatgattttcagaagctgatagacgagctggcggcaagaaaaaatgtacggcataataaatgggcaacgaaaagcgcggaatacaataaagaagcggataaagatattgacccgcgccgtctggagttcaggcagcagctaaaggaaatctatgaaaagaatgcgcgggataaggataaagagaaaggcttgaattaattaatgtctttcacttttgtttcttatcaaatgcttctaagttttttgatattatactcaaatgattgttgtcctcattccagattaatagatataaatatttgtgtataattcgcctgtcaagcatataaaatataaacaggtaaaatgccactttaccccacagtgcaataagcaaaattaatgatttaaaaaggtcgtcatcgcccaagataccactatcaaataatccccatagcggctgtactgacgcatataatggcaagaagaatgttgcacctaacagataaaaacttttaagtgctttcatactttttatttcttttaaaaagaactcaatagacaggaaacggctaaacaataagcacataccaactgcattaaataatccgctaataactcttgataaagacactattgttattaagttcatattgtagaaccccataataagtgctttgatattcagcatgatgaaagaaaatgcaaatattaatggcaggaaattcctccttgtaatcttattccatttcttctttctatattcatcatcattttttgttctatgatataaaatgaaaaaactggaatatagaaatatgccactcactacattcagggcattgtcaaaaaaagactctgtaagataatattcagcatattttttttcaagtacagtataacttgtatcataccttagattaataaacgattttgataataaaattctattgtatttagccaaagaggtgtctttagcgctttccttgctttcttcatttgtaaatccaacaattgaatagattgcagagtctattctcgttgcccctgtttttaaaaccaatactgcattttctgttttcttttgttcaattacatcatccattttatggtcaaagaatatcagggtaacatacaagcatatcaacgaaaatgtaaaccatttcaaagagtgatataattctaaaactgcattattgatacgctctatcctgtgtttgatagttgtcactttatcttccgacgattcttctatctctaaaagtttttcaggtaaatcatccgggctaaattgttctcttattaaatatttctttttaaagatgagtattgatagtgagaataataaaacaactccgttagcaacttcaacgtaatgtaaaaagtctaccttgcttgctttgtttgttctggaaaggaagaagaaaacaccccctacaacatttaccagtattgctataaattctttgtatttatctaaaaagcctaatacagagaatgttttgcttttgtgaactggttctgtattcattgtttgttatttgacatacaaagcaacagatgttattattcattatcaatccgttatttaacgtcaaatcgtaccgtgttttcacggtattgatattttcctgaattaatatgagttttgtactcatagcaaacacactagtgtttacgcttgtttcatagcctatgaaatacgtacctgatttaatacccaaagataaaagggtattgccagattactttaagaacaatcctttcaaatacactaaagggaatacagctttaaacgtattaggatatatagccggatcaatatttattctgatggcttttgccagtataaattacattttgctggcattattatatggtgtaataggctttgtcctattgcctgtagggcataggtttttagagaatattttcagcttcaaactgacaacacgtataaaagccattttctgctctagcttatttgtcatttcacttcctgtccatgcacattataagggcattgatattatagaagctaaacgagtacaggtaaaagaagcggaaattgcaaaggcaaatgtagaatccaaacgtaaagacgctatcagaattgacagttttaatatctattacaacaaggccttatcatttgaaaaagagaataaagcggacgacgcagaaaagatgctgaacacagctaatcttttcgccgtatctgacagtgaaaaaggcttgcttgaaacggagcgtaaaaacctttcaaaaatcaagaccttgttacttgtcaagaatagtaaatacaaggaggcattacctgcattatcatctttattacaggcaaacccggaagatgtggatttattatgcaacagggcgaaatgtctgcataaagttggcaggacacaggaagctgttaatgacctgaaaacggctatcaattacggcagtgcagaagcggagaatttacatgagaaaattaacccaatcaggaaacgcgtagcttactatactacactttgttgtgatggcacaacgtccagtgcaaccggcagaggagcctgttcatggcatggtggtgtttgcgattggaatcatcctatatacgaagagtacagaaaatacgaataaccatggcagagataatattcagaaacgtaccgtttatccaaaggagttttctgcaacgggtatttaaacaatatcccgaagaaaatgcagtaatagaattgaataacctgcttgcagcaaaggaaattgatacgattactagggaggatgttgaggctatcgaagaaaaatacaatatcaatctaaaagagttcaatctgaaccttgaagaattttacgcggtttatttaaaccattcattacgcaatggtaaaatgagcatgagtgaaaaagcaaacctgaaccatcttaaaactattctggacttatcggatgcaggcgtacaaaaccttagtgtaagaataggtgaaaatattttcaggcagtcgcatattgaagcaattaaggatggtaaatacacggaagcagataaaaacagattagacgaacttgctgatgatattggcttacctgcaagccttacatcaaaaatatcggaagatgtgcgtatatcttatataaagcgcatggtaaatcaaatagtggaagaccagcgattatcaccagaagaagaaaccaaattacatgctacagctaaagaccttgatgttaatctgcagtacgataaggaaacggcgggttatttagataaattacggatgtactggtcattggaaaacgggccattacctgttatcgcaacggatattagcctgcaaaaagcagaagtatgtcatttaaagatttcaaatgttagatggtgtgaaatgcgtactgtacgacaacgcacgtcctattcaggctattcaacaagcatcagaattgcaaaagggatttatttacgtagcggctcatacaatccaaaaacatatactaccgaacaactcaaacagatagatacaggaacgatgtatattaccaataagcgtattcttttcacaggcgttagcaagaaccacaatatacgctatgagaaaatcgtggagtttacaccctataaagacgggcttgaaatcggaaaagacgctgggagaaatgtatttctgatgttttccggtaaactggacattgtctgtattatgcttggacggttaattcagtaagcgtttaccttgctgtgatatattttggttgtcaactgtacaacaatatatggcatggttgcgatagcaccgttcatcacctgaatatccatcaggcagatacaatgccccacttgtggagcggcattgcatcacaaacgtggcaagcgaagaaagcaactgcttacatcgctttagtaattttatagcatggaaccaatcaaagatgatatatggcagttggttagcgaaagctcaacatggctatcttttaaagaaactgtattacagcccgtatattttaaagaagaagtaccgacagaattaaaagaggcaggtataattacgcacaaattactaatgtatagttactacgaatatacatttattgaagtggctatcacacaagcaatatttttattggataaagcattgtcagttcgatggaaacaaatacatggaagaaaaaccgacaaaaaatttagtgccctcataaactggttttatgacaaagggtatcttgaaacactaaatcgagaacgcattcataatttacgcaagctacgcaatagcaaagtccacgatgcaaataatggtattggcggcatgggaataatccatcaggtatattggatttttgatttaataaacggattgtacgaaaatcccgaactaagaaaacaaagaattgaagcacggtataaattggcgaatcagtttaaatcatttgttcaggacggcgtaatagtcccaatccatgaaaagaagtatatcgcattttctatcagtcctgtttttctggataacaaatctgaatcgcctatactgcatctttatatatctctcatttttgacctgcagcctaagcgggatggtaaaattcactactcaaaccataagttatcggtagcagactggcgatttgatggcaaccactttaaagctactaatctggcagatggaaaaccaattactatcagcaaaatcacagataaaacgaataggatgaagtttggcaactggcataatgattccaaaaattatcctgatttttctttattactattcgagattttagccccggttactaaacttgaaactgacttgttaagacagtttcataaaagcaatacgaatagcttacaataatttacagagctacaatcattacaactgtcttaggcctttgagccagcaaagctatagcccatgccgtatggcaggcaaggtctgtcgctgcatccttcctgttgtcaggattgcacttgcctttcggtttggcaaaaacaatcttccctttctgtttcggtggctatcgcaaatctacctgcacgcccaagtagtattctttttgccaaaaccttgcctgccatccctcatgcgcacaattgggtgcttatcaaagtccaaatgaggctttttgccgaattgggtttttctcaacatttaaaacagcatcgtttatgcacagacaaagattatcgcgcctcatgaaattgtcttgggacattcagcgcaccaaacgacacaacaggtcaaaatcccttaccgccgcatgggcaattatcggtaacgaggacatcactgtcttttatctgacacggcggcttaaccaccacaagcccatcaaacaaaccgccctgcatcaaatgggcttatttatgcgctaaaacaaaaggctgccaatcggcagcctttatcgtttgttgcttataccagtcgaagttacttttcatttaaacccgctacctctatcagtttgtcaaacacagcgtcagcttcacgttgtccaagtccacttgcaatgactatatcttttgttccgtatctgatgtaaattttatagcctgcatcctgtaagtgcttacgtatcatattcctgctttctgctcccagttgtcgtaaacctgttcccaaattcgctacatttcctgcaactgaaagcggattgatttgtgtaacatacatagtcgtagtttcgacataattgcctgacgggtcttttacaaaataggaaacaatatcttttcttgcataggatttatcttttaccaccacatctgtatcgcagattttaaactcacctgtttttctgaatttgttgatgataaatgtaatacccaaaccaagcccaaccatcagtattacccacaagataatccctgacacaaatcccggtgcgccgacagcaaatgcgagcatagcggcaggaatagccgtgtagaaacatagtggcattgtcagtttgtaaccgactggcgtctttttataggtaaatactgtgtagtttccatcccgttgcgtggtgtaattatatatagcagttacttcttgcatggtattattttgaagcgtaattatttattgtaattgtctatcatgcatttgactgtttccatgattttctgcacctgtttatccttgatgccgggtaagtcatggtcggcatcgttcagtttgaacctgacagccgtaataggcgattgggataatttttcaaagacaggtaaggggacttcctgatggacgtaccacattcgcaacggtacatccaagacacggaatacaatcggtgcaaggtcttttggagccgttatctctataatgtcgccgcttgccagcttgatactgaccttatcgccttttttaaacggtacatcggcaaaatctgtgttgaacgttatgcgcaagccgatatggtatttgccttccgtttcatagataatcagttcgcgcatggcaagtggtgcgccgagtgccatttttgccatattgtaagtctgaccagtgaattcgtctttttgtggcttgatgtatttgcaatgctgggctgtggcgcagtatgccatacagccagtaatcagtgttaagagtggtttcatactatattgttgttttatgttacacttgttgttcacttatgcgttgcagcagttgatgcactgtagcgatatgccatttatggctatgctgcctgtaggttggcacgttcagtcggttcagttcacctgttatcgccctgacagaatgcaagcctctttgcttcaacctttcaatcaatggtgtcatatccaaggcaaactgcttcgcgttctcatggttcagctttgataatatatccctgccatgcttgcctaagatgacaccctttagctttgcagcttgcagggcggcaatggtacgctggcttatcatatcccgttcatgctctgcaaagaccgccatcatctggacgactactttatgcgcattgggattatccaccgctttgaaatcgacttttgattccatcaacattgtaataaaagcgacattgcgcccaagcctgtccagtttggcaatcagtagcagggcatgttgctttttacaggttgcaagcgcatcgttcagcacaggtcggttatttcgcttgcctgattccacttctacgaactcacccatcagcctgataccgttagcagcacaaaaagttttaaccgcttgctcctgtgcatccagccctaaccctgatttgccctgcctttcggtggatacacggtaatacgcataggctgtgttcatgtctgctgtcatgtgcgaaaccctttgaatggcaacgggttcagacatgggcagtgttcatggacaaacgagggtttatctttgaacagctttcagtctgaaaggtgaaagatggtgcattgtgaatagctgaaccccttgataaacgcaaggtcttgatgtggagggaatgtgaaaacgacttaatacaggcgtagtttgttcatacacaaaccctcgtttgtatatgaacaaatttttgttggataaaataagtaccgtgaaaacacggtagtaaacctgttgaaaaaacaatctcaatagtactattagatttttttcaattcagtcattcttcgtagtttgtatttatgaagttagtgtgaaaaaagtgagtaaaggaggttataagctaatgtgagggttggtaaaaataaaaagcccccgtcaaagtcgagggcaacttaatgttttcacaacggaataatccttattgcgatttgcttcagaataaaagtagaaaaagtattgaatatggcaaaaaaagttttaggtcttgacttaggcactacatctattggatgggcatttgtgcttgaagacgaaagcaacacagaaaagtctgaaatattaaagttgggggtgcgcgtaaacccgttaactacggacgaacagctaaacttcgagaaaggtaagcctgtcagtattaatgcagagcgcacactaaaaagaagtatgcgccgcaatttgcagcgttataaactacgacgcaataacctcattgcaattctcaaagagcataatatcattacagatacaagcgtacttgcagaaaacgacaagcataccacacacagtacctatgctttacgtgccaaagcagctactgaacagttagagcttgaagaatttgcgcgtgtactattaatgataaataaaaagcgaggttataaaagcagtcgcaaagctaaaaatcaggatgaaggtcaattgattgatggcatggcgattgctaaacgcttgtacgaagaaaacctgacacccgggcagctttgctatcaattactgaaagacggcaaaaagatattgcccgatttttatagttctgatttgcaggtggagtttaataaagtttgggatttgcaagcaaaacattatccggcaatattaactgatgattttaaaaaagaaatacaagggaaagggcaacgagctacggcagcaatattctcgaaggtacacggaatgtacacagcagaaaacaaagggagttttttaaataaaaaactacaagcatataaatggcgtagcgaagctgttactatgcaattagatattcgtgaagtagcctatgtattggctgaaataaataacaacctaagtagctcaagcggatatttaggtgctatcagcgacagaagtaaagaattgtactttaataatcttactataggtgaatacttatataaccatttgaaaaataatccacatgcacgtaccaaaaaccaggtgttttacagacaggattatatggatgagtttgagaaaatatggacagtacaagcccaacactactcacaattgactgatgcattaaaagcagagatacgcgatgtaattatattttaccaacgtaagttaaaatctcaaaaagggttggtgagtttttgcgaatttgaaaacaaaatcattgaagtaacaggtgaagatggcaaaataaaaaagaaaacagtcggtgctaaggtatcgcctaaatcatctcctttgtttcaggaatttaagatatggcagacattgggttatataaaagcaaaaaataaaataacaggcgtagaactaacttttgacgattcagcgaaacaaacattgttcaatgagttgaatgtaaaaaatgaacttagtgccaatcaagcgtttaagctactgggctacaaagccgaagaatgggaattgaactacaaagagttggatggcaacaaaactaacaaagtattgtatgatgcttatctgaaaatgatggcttccgaagacgatgaagaaagtgccatatcttttagcagcacagacttaaaagataatgttgctgcattttttgaaaaagaaggcattgatacatctatcctgttttttgatgcagagttggatggaaaggattttgaaaaacaaccctcgtatcagctatggcatttattatactcatatcaggaagacagctcaccaacaggcaccgaagccttatatatgctgctcaataaaaaatttggctttaaaaaagaatatgcaaccatactggccaacataacactatcaggcgattatggcagccttagtgctaaagcgatgcgaaaaatctatccgtatataaaagaaaatacgttcagtactgcttgcgaattagccggatataatcactcgaaatccctcactaaagaagaattacaaaacagaccgttaagtgataagttggaaatattgtccaaaaacagcttgcgaaacccggttgtagagaaaatacttaaccagatggtaaatgtagttaatgcaattattgcagaaccatcacttggcaagcctgatgaaataaggattgaacttgcaagagaattaaaaaagaatgcaagtgaacgtgccgaaatgacggacagtataaataaagccaaagcagaacatgatgctatccgcattaaactcaataacgatttcaatattaaaaacccgacaaaaaatgatattatccgttataaactgtacgaagagttgaagaataacgggtatcatactttgtatactaatatgtacatcccacccgagatactatttacaaaagacatagatattgaccatatcataccacaagcggtattatttgacgatagcttttctaacaaaacgctttgtttcagaaacgataatctaaaaaaagcaaacagaacagcatacgattatataagtacagagtatggcgaagaagcattaacagcttatgagcaaagagtaaagatgatatatgaagcaaaagatggcaacggaatcaagaaagctaaatacaataaattattaaagaaaggcagcgaaataggtagcggatttattgaaagagatttgcgtaacacgcaatacatagctaaaaaagccaagcagatgctggaagatgtgtgcagaaccgttgtacctacaacaggcagtattacagacagattgcgggaagattgggggcttacaaacgttatgcaggaattgaatattgaaaaatacagacggcttgggttgactgaaaaagttgagaggagagatggcagctttaaagaaaaaataattgactggacaaaacgtaatgaccacagacaccatgctatggatgctttgacggttgcattcacaaaacacagccatattcaatacctgaataatttgcatgcaagaggggataaaagcggcagtgtatatggtatagaacaaaaagaaacctataaagacaaagaaggtaaccgtaaattcaatctgccaataccatcattcagagaagaagccaagaaacatttagacagcatattaatttcgtataaagcgaaaaataaggtagttacaaaaaacaaaaacaagacatccttaaaaacagggacacatattaaaattgaacttacgccgagagggcaactgcataaagaaactatctatggtaaaatttaccaatacgccacaaaagaagaaaaagtaggtgcccgttttgatgaatctaccattttacaagtggctaacaaaatacacagagatgcattactaaaaagattggttgctaatagcaatgaccctaaaaaggcatttacaggtaaaaatagcctcaataaaaatccgatatatctggatgaacacctaaaaattaaaatgcctgaaaaggtaaagttagtgtgtcaggagccagattatactatcagaaaagatattactcctgaaaattttaaagatgctaagacaatagaaaaagtcattgatgttggtgtaaagaaaatattgcttgaaagactgaaaaaatctaatagcaaccccaaggaagccttttcaaatcttgacaaaaatcccatttggctaaatgaaagtaagggcattgcgataaaaagggtaacaataagcggcgtaaaaaatgcagagccactacatgacaagaaagaccatttaggggatgtaatcaaagacgttgatgggaataagatacctgtagattttgtaagtacaggcaataatcatcatgtggctatatatagggatgcgaatggtgaactgcaagaaaaaatcgtttcattttacgaggctgtgcataaggcaagtatcagtatgccaattattgacaaaacctataatcaatctgaaggctggcagttcctctttactatgaagcaaaatgaatacttcgtatttccttcacaagatttcgacccatcggaagttgatttgttaaatcctgctaacaataagctaataagcccaaacctttttagggttcagaaaattgctactaaaaattattttttcaggcatcatttggaaacagaacttgttgataaaaaagaagtcaaggatatagtatataaaaatatacagagcctaaagccattagaaaagatggtaaaagtaagagtgaatcatattgggcaaatagtacgtgtaggtgaatattaaaatatgcagatatgataaagcgtacattgtattttggcaacccagcttacctcaaaacatctaatgagcagttgataatagagatgactgatacgggtgaaacaaagcaagtgcctattgaagacatcggtgtgctaatattagaccatcagcaaataaccatcacgcaagcattaatggcaaagctattagctaataatactgcactgataacctgcgacaacacacatcatcctgtagggctttttctgaatcttgatggcaatacattgcaaagccaaaaatttcaggcacaggtagaagcaagcgtaccgcttaaaaaacaactttggcaacaaacagtaattactaaaatacaaaatcaagccgctgttttagaacttgaaaagatacataatggtctattgttaacctttgcaaaggatgtaaaaagcggggacagtgataatcatgaagccaaagccgcagcatactattggaaaaatatatttcctgattttctgaattttacgcgagaacgttttggcgcaccacctaataatttgctgaattacggatatgctattctaagagctgtcgttgccagaagtttagtagggtctgggttattgcctacactcggcatttttcataagaaccaatataacgcctattgtcttgctgatgatgttatggagccatacaggccgtttgtagatagaatagtttgcaatatagtccgtatgaatggtcagtatcttgagatgacaccgaacatgaaaaaggaattacttcaaatacctgctatggatgtaagtattgatggacaaaaaagcccattaatgaatgccgtacaacgtactacagcaagtttagccaagtgttttgaaggcaaaacaaagaaaatattatacccgaaatttatttgatatgattatgtatgtattcacgcataaacgcatacaggataatgtgggtgctggtattttttgacttgccaacagaaaccaaaaaagacaggaagaactatgccacgttccgtaagaaaatgctggcagatgggtttcagatgtttcaattcagtatatatctgcgccattgcagtagtaaggaaaatgctgatgtacatataaagagagtaaagactatcctgccgcccaaaggtcatgttggtattatgtttgtgacggataagcagttcggcatgatggaaatatttcagggaagggatgtagtaagtgcgcctgaaactaatcaacaattagagcttttttaataaaataggattgaaaaagtgggcattatatccattttttcaatcctaaaaataagctcaaaggcttaatagtagaggcttttcaggcattcagttgtgtctgatagctaagctactataatttgaaagcaaatcacaacaggaagaccacatatttgcgcatatcattcgttgtgtctgatagctaagctactataatttgaaagcaaatcacaacattacggctaatcctaatcttaattatggtgttgtgtctgatagctaagctactataatttgaaagcaaatcacaacagcatttccaatgttcagactgtatgatatgttgtgtctgatagctaagctactataatttgaaagcaaatcacaacgctgaaggaatgatgtatcaaatccaaagtgttgtgtctgatagctaagctactataatttgaaagcaaatcacaacatccggttcagaaagattgatcagtagttggttgtgtctgatagctaagctactataatttgaaagcaaatcacaaccaccttgccccgtactgtatcggcttgttagttgtgtctgatagctaagctactataatttgaaagcaaatcacaacattttcctctgttgttcctgcgctcgttccgttgtgtctgatagctaagctactataatttgaaagcaaatcacaactgatttgttagtcaacagccatgcaatagcgttgtgtctgatagctaagctactataatttgaaagcaaatcacaactcagtaagctgtcggcagataccatcaacgttgtgtctgatagctaagctactataatttgaaagcaaatcacaacattatacagtttgaacgctccgaaagcgagttgtgtctgatagctaagctactataatttgaaagcaaatcacaacgggaacagttatacaccgagcaatttcattgttgtgtctgatagctaagctactataatttgaaagcaaatcacaacggcaatcattctctgtctttggcccatcaagttgtgtctgatagctaagctactataatttgaaagcaaatcacaacaacaatgcaatgatggctatatatggcagcgttgtgtctgatagctaagctactataatttgaaagcaaatcacaacgcgaggagtacagcgcggtacgtgagatgtgttgtgtctgatagctaagctactataatttgaaagcaaatcacaaccgtgatatgattgcagccacaaagttcaagagttgtgtctgatagctaagctactataatttgaaagcaaatcacaacctccaatgaggcggtttcatttgttacctggttgtgtctgatagctaagctactataatttgaaagcaaatcacaaccggtacatttttggttgatggtgcgccttagttgtgtctgatagctaagctactataatttgaaagcaaatcacaactatcttcttaatgcgccctgctatgctttcgttgtgtctgatagctaagctactataatttgaaagcaaatcacaacgagtttctgcaacagcaacacagcatagctgttgtgtctgatagctaagctactataatttgaaagcaaatcacaacatgctaccatttgcgcaaaaaggtgcatcgttgtgtctgatagctaagctactataatttgaaagcaaatcacaacatacgtgtaaaagctaaaaagaagtttgacgttgtgtctgatagctaagctactataatttgaaagcaaatcacaaccaaaatatatttgtaaagacaagcgaatacgttgtgtctgatagctaagctactataatttgaaagcaaatcacaacaagtagcatataacgctcaggaaaaacactgttgtgtctgatagctaagctactataatttgaaagcaaatcacaacagtagacttatctgagattgcagttaaaaagttgtgtctgatagctaagctactataatttgaaagcaaatcacaacgatgatatattggaagaaataaaagaagcagttgtgtctgatagctaagctactataatttgaaagcaaatcacaacgcaggtgattgtaaccgttaggagtacctgttgtgtctgatagctaagctactataatttgaaagcaaatcacaacacaagcgacatcacaagccttatcgaaagcgttgtgtctgatagctaagctactataatttgaaagcaaatcacaacaaacgattaacggaataaatagaaatacaagttgtgtctgatagctaagctactataatttgaaagcaaatcacaacttgtttagtggtttgcccttcatctactaagttgtgtctgatagctaagctactataatttgaaagcaaatcacaacagggttaggtgtccagtcctgtattacatagttgtgtctgatagctaagctactataatttgaaagcaaatcacaacacaagctacacttgatgttgttaactatgcgttgtgtctgatagctaagctactataatttgaaagcaaatcacaacgctggtgtaagtgtacttcctgaattgtggttgtgtctgatagctaagctactataatttgaaagcaaatcacaactttcaagctaagagagccatcacgttggccgttgtgtctgatagctaagctactataatttgaaagcaaatcacaactgatgaattgcaaacatcgcgcgacaatttgttgtgtctgatagctaagctactataatttgaaagcaaatcacaacgtgactattgctgggatgccaattatatgtgttgtgtctgatagctaagctactataatttgaaagcaaatcacaacctgttgagcttgtcgataaaactctgaaacgagttgtgtctgatagctaagctactataatttgaaagcaaatcacaacgcactagcccttcaggtattgtaacgctttgttgtgtctgatagctaagctactataatttgaaagcaaatcacaacgcattcacctataaccattaaaggtattttgttgtgtctgatagctaagctactataatttgaaagcaaatcacaactgccttcttcatgtggttcatgcttatttagttgtgtctgatagctaagctactataatttgaaagcaaatcacaacttgtttttgtgtgttagttaaattgattacgttgtgtctgatagctaagctactataatttgaaagcaaatcacaacacaaacagattaacgaacaaacgtaacattgttgtgtctgatagctaagctactataatttgaaagcaaatcacaactatttgcaaattattaagccaaacaacgcgttgtgtctgatagctaagctactataatttgaaagcaaatcacaactcataaaacagataaaacgccgcgtatgctgttgtgtctgatagctaagctactataatttgaaagcaaatcacaacgacttgggagcgattgagaaagaagttaaagttgtgtctgatagctaagctactataatttgaaagcaaatcacaacatcgttcatatgcctacctacacggctcttgttgtgtctgatagctaagctactataatttgaaagcaaatcacaacacatcattaagtatacaaaaacggtatgttgttgtgtctgatagctaagctactataatttgaaagcaaatcacaacgagtgccggaacatggataaaattaggtgtgttgtgtctgatagctaagctactataatttgaaagcaaatcacaactggaagaactggaacaaatttatgacaagtgttgtgtctgatagctaagctactataatttgaaagcaaatcacaacaactcaaacagataggtgtacaacctacaggttgtgtctgatagctaagctactataatttgaaagcaaatcacaaccagcaacttcatcaactcctcaggcaaacagttgtgtctgatagctaagctactataatttgaaagcaaatcacaacaacaaatgcaaaaagcagcgcaacaacgcagttgtgtctgatagctaagctactataatttgaaagcaaatcacaacggcattccatctataccccgccgcacaccgttgtgtctgatagctaagctactataatttgaaagcaaatcacaactcagcactcgtcatgtaggcgaaaccaccgttgtgtctgatagctaagctactataatttgaaagcaaatcacaacgcatccgcggcgtaatagaagtgcctattggttgtgtctgatagctaagctactataatttgaaagcaaatcacaacccaataacagtaggcaaagcatcctcatcggttgtgtctgatagctaagctactataatttgaaagcaaatcacaactggtgaaacaagcgatttaaaatcgcttacgttgtgtctgatagctaagctactataatttgaaagcaaatcacaaccaatattccgcttttgttctttgcgccccgtgtatgatagttaacatacagatgttcatttaatattgtaaaagttgttgggaaaaaatgattaatccattccagcggaagagatgctctcatttaactgaatatccggattttcaatccctcttcatttgtatatgaacaaatttttgtggatgcttttctgttatgcagaaaaccatacgactgcccgcatcgaaagaaaataccgtgaaaacacccaagattacaaccgttaaataacggtattatattgcggccttctgttgattacttttgtggatattttataacttgaaaaaatgatacttcaatctttgtctttatgggaaaagctaattaatattctacaggagtctacaattatcaatatactgatagtagcttgtatcctattgattatttacattattgtattcattatagcttttattactaacagagaaatttcattctgggggctaaaagtgggaacaacaaacaaaactgatacgagtagcggcaatacaagtaagccatcattgcaagtaggcacgatagaattttatgaaacgtataagaaagtggattggactaaattattgagagatagtaacgagagtcttgatatagttgtttattatttcgactcttgggtaaatcataatgaagatgccatccaagcttttttattaaagccaaacacaaaaattcgtgtagtggtttcagaccctcgcattgatatgattagtgataatgtacaaagattattttccgagtatgataaaggaacaatccaacaaaaaattgcaaatacaagggataggtttttgagattgtatgataaggtaggagcatcgcacaaccgtttcgagtttttttattatccccatctattaaactactctttccaagttcttgataatagtaaaatggttttatctgtatttgaaatgtaccgcaaaaaaactattgattctcccgcaatcataatagacctaaataaatcaaaacactctaaagactttatgttgaaagaactaaatgggattatttctgattctgaaaaggtcatttagtgattatgaattaaatattagagttataggatataataaaaacgatttactttactatacaactactccccatgctagataaatttatagaatttcgcaaaaccctatcaagctacagcttagggcaacttaatgtagcaaaatatccaattatacctgctacaaagttttataagtcatttgttgaatttaaaaactcttttgatgcgtatacaaagagtatattgaaaggtaaagtatataatgatagacaacgggcagatacaatattcaaagataattttaaaagcgaggctgcctttataagtcgtctaaagattgaacttgcggttgcaaatgaatatatacaatttttaggcactcaagttaataaaagcaatatcaagagatactatcatcaactatctgtacttaccatagatatagacttattaattggaaatattgaagtttatctattgaagaatgtaaagaagtataaattatctggtggaagaagaccaacccaagacccttgggaaatttattttgccgcatggtcgatatttgacattgagagatttgaatacacaaacgaattacacgtaagggatacaaaacctgcaagtatttttttaattcgtcaaactattgaaatatacggaaagaagattttaggatacagtcgcattatagataaagatggtagaccatcaaaaaaacatacacatgttgcttggtcttttattattaacgaaattaaaaagaagaaatcaagaattgacataccgtttgaccctgaagttgtagagaagatatatacttggtcaaatagttatgtgcatactactttgtatcccagttgttatatagtttacgcagccctgagtatgcttgagcctttatttaaagcatctagtattcctattcaaatttataatggtaaagagtttacaagattcttttttgctgctattaagatttcaaactatgcttctttgaaaagaagttttaagttatttctaaacaataataagcccaagggtgatattaatatagagtggatagacattaaaaacgtagattcatacgttttaaagagataattatatctaaaatattaaaaataaaatgcctgaaaaaataatagtcatccaatcaccgcatccagcgcatcatccgcatctttgaacatgaagtttgcctgatagtttatagtcgtggtaatggatgtatgtctgtatagtttttgcagcatttgtataggtatcttgtcgcctgatatattgccgaatgtatgtcgtgctatatgcatcgtgagtggcttggttattttgatttcttttgccacattctttaaggcagcattcagttttattatttcaactacaattcgtttctgtactttataggtatcagcaatatcttctacaacttccaaattaggaaatacgaggttgtgaattggggctttacgcttgtattgtttcaggatagctaatgccttatccggtactttcaagctaccacctttggcattcttacccatcgcatagaacaatctgttattctgaaagtctgcccacgtcagacgtaatacgtctgatacacgcatcccggcaaaataaaaggcgaataaccatatatttcttgcatgatgcatataactgtcttgtggcaattgcaattcttctaatgcttgcacttcttcaagcgttagcccaatcttcatagacttttgggccttgagggttatcttatcctttccgaatggatagaacctgatatcggccacttggttggcaatggcaagattatagactgtctgaataatagtcaggtaattaaccaccgtttgttctgccagtttcttttcaccacgcagataagccctatatcgcatcagcaatgaaaccgtaatatcttgaaaggcaatatcactattatcaaggtaatctttaaataccttgatgcgggatttatcgcagttctcacgattgtatttaccttgctttttcaggctatcaagatataactgcgcctgtgcaaaaaatgaggcttcttttgtacccttgatttttcgcttgatggttttggcagaaatcgctgctttctgtgtttttaggtcaagcagattttcttctgcttctgccagcttagtcgtgaggaagtgatttagccgtacagaattagggtgcgattttttaacgcgatgattagttttgtcccaataggattcatgaacattatgccctaaataaacataggatgatttgcgatcttttgtgatacgcaccgcaagcgggaacgagccatcactgttttgttttttacgcagaactatctttacggatgttgccatgtggtgtggtttcagtttccacaaaggtacaacataggtacaacaaaacctgcttttgcttgaattactttatattgaaaaaatcatttataacgctatcagacaagcatattagagtatatcaggtcgtatcaattcactaattgttggtgttgttcaccaacaataaggcgatgcctatagttgcagatgaagtacacctgcaccgtataaatacccataacagggtattttccaccaaaacccagcccaaccataccgcaccactggtagtttttatatctttgctcactttatcatttatccttattgaatatggtttcccttgggggcaaagcaatagacttggcagcgtttgagcagatagtacttcacgaaaaagaagtaaacattgccgtgcctgccatcaaagaggtaacacagagttacaatttcctcaaagccttttctaccgacaagctcatatacggcatcaatacgggcttcggccctatggcgcagtaccgcatcaacgatgcagaccgtacgcagttgcagttcaacctcatccgcagccatagctcgggcatggggcagttgctgtcgccgctgcatagcagggctatgctgctggcaaggctgcataccatgttgctgggctacagcggcatacaccccgataccgtgcagctaatggccgacctgctgaaccacgaagcctacccctgcgtatatgcgcatggcggcgtaggtgccagtggcgatttggtgcagcttgcacacttggcattgggcctgataggcgagggcgatttttggtacaaaggcaaggtaacacctgccaaaaaagtatataaggaactggggctgcaacccatgcagatacatatacg
